United States Patent Application Publication US 2014/0325702 A1 - sequence listing, part 21

SEQ ID NO: 25057 - DNA, 1723 bp, Heterodera glycines
ccggcagcagaagacatacatacgacagcagtgtgccacactatgccccccccccccccgaataaatggcacaagccctgaggggatggatgcggaggatgtcttaaacacacacacacacacactcatcagtcgataatgagtgagtggcctatgcctacgcttagaatgggcccgccattgggcaccctttcccctctctctctgctgcccaaatctctcccctacggcgcacgcacagttcgttgttcgtttgcgttcgccattccggcccagcggtccccattttgaagggccaccagtgaaagtgagaaaaaaaaatcccagcggcagagactcagaggaaagcgtttccatcactttttctgtgtctgcttctctcttccgtctaaattgggatgcgtcggagaaggattagcaactccaacagcagcagcagcagacacagcggacaaagacaaatcaattctttttgtttgtcgactgaaaatttggtttcgtgccaaaaagaatgggaaaatttttgcgtggctcactcactcatttaatttgtgcatatttaaatgttttaaaaaaatatttcaatgccaatgcctttggcatttaacgtaaaaacaaaatatttaattcatttgacaatttaatcataaaatctgtgacgagtttatgaagcagattgagcaactcacgtaatttacaacaaaatgagatacaaactataataaagcgactaaaattcactgagtttgactaaaaaaccggggacatataaaagaataaagcacacaatctgggatcttggtaattgcacattaaatacaattgcgaaatattcgtccatgtccatgctcaacaacgcctacgaagcaacatgggccatcggtgcaaaaacgaaattgaacataaatttgaaggcgtagtggaaacgggcccacactttgcgccgactgttcttcacgctggtcaaacggaggtgtttattggagccattcatctgaaaaaggatggattcatattcagttcagacaaattgccggcatttttacagggttttcggggtaattttgactaatgtctaacccaaattcgaaaaggaaattgaaaattttttgagttgcgacttttttcatgtttgggctagggattaaaaataggtagttaaattaatgtcatacatcgtgatcagggacctcaaaaaatctctgtaaacaagtccaagactatggacaaaaaatttttttgcaaataaagagggtctctctcccctttggttttcagtattttcggggcaccccaactgtaagcattggggccaaagtatcaaatgtctacaaaaatgggacgacctttttgcagaaaatgcattccaattggagcagtcgaagccggggcgggtaccgaaaaattgggtaggcgtcgaaaaaggccacaaaacggataatgtcgccctcgccgagcagagacaaagtgtcaccaaaagagtgcgcggcagccaacaaaagttgtcccttattcacgctgatttggaacttctctccgtaagggccactgacctaaagcgaaaaatggactataaaaagaattatatgggcatatccccagtgagccaggcccgtaaatagaaaaattttcagaaacaaacacgaggagggatgaaccccaaaatctcgacgagataaaatgtcgccgcccagaatttttttttatttgtctccccccccga

SEQ ID NO: 25058 - DNA, 1182 bp, Heterodera glycines
agagtcggaacagcttgagaaacattgaaaaattctgaatgtgagggggaggtgaatacaaatcgtaaaccaactgaggggaggcgaaaagttggaaaacaattagcacagcagcagaaacggcagatggtgccgatggaaatgccaaacgaaccgatgaataaacacagcgggaaaatgaatggacagagaaagtgaaggtgagggtggcacaaaaagagacagacaaaagcgagggtggaaggtcaaaagtgagaaatgccgaacacgaaaagggacaaaaccattgtgtgagggaaaaggcattttggcatgggaaaaatttgagtgggaggggggggggacaattggaaacagacggaattggagcgacagaaaatgattcataaaaatgattcataattagggaaaggaattttaatgatcagaaacaacaataatgatgaaagaagcaaaatgaatggtttagtcattcatttaccataatcatagaagcaaaaaaaaggattaaaaattaataatttatggacaagggcacaaattgggtgccatcggcggggaatgaaacacaaaaaatggcgaattttaccgaaagttggccctatttgggacacatttgttggtgagggtggcggagagctctagctgtgccaatgtcaatatgaagctcggacttttcaagcgaaaaagtgtgccgacccgcccacgctcaactgactgagtcggtggttcgttcatttgtttttcagaaaggcgccccgggggagggggccgtggtgccataaaatggttcggcgatgcgcgtaatttggcctcacatcatccaaaaaaaagttgtgggcgtacaaacagtgagtgagtgggtgagtgagcaaacggtgctaatggagcgaaaaatggccattaaaaaggaaacgcaatgagaaaaaatcatttattaaggaagagatttaatggaaaattgaaataattaaaaaatggatgaaaatgaatttgggatcaaagaccaaatggccaactttaacagaaaattcacatttgaaaaaacacattaattttgcaggcttttggccgcttttaactttaactaatgactaatgattactaatgataaatgtttatgggccattaggggtgggggtagggaaagtcagtcacacgacagggcggaggacattttat

SEQ ID NO: 25059 - DNA, 1481 bp, Heterodera glycines
  unsure (1)..(1481): unsure at all n locations
cgaaatnttgatttccaatattgaaatatantgaccactatgtctctaatatttggagaatattctagatttcagatacgaaatttgtagaattgttaaaattctaaaaattgaatcttaacctttttggtccatgatccgaatgatcaaatatttgaggaattccccaaattggatcgggtccgtgcagtatttttagattgcgtaaatttaaaaataaaaatttgtttaaaaaatccaaaatttttcctttttaagggatgtgtgatagtgaaaatgattgtggtgacaattcggacgaaattgatgaggagtgcggtggaacatcacgaccatgttccgagtccgagtttcgctgcaacgacgggcgctgtattccgcactccaaggtgggaagaattttaatcaaatttaaattccatttttaaattaatattttaaaaatagtaaattcccatttcaatgatttcgtatcataaataaatctgtttataatattttaaatgtctttgaataaacaaaaaatcgtcataaattatttaagtttaaattatgccggtacaaaatttttatttaaatttaaaatatcagttaatattttgaaaaaattaacaattgcgagttaaaattcttaaaataatgaaaaattgaaactttattattcaatcaaggaaaaaatatttaaaaaaaaataaattaaaaaatccaaattgtatttttttttaattattattttaattaggtctgcgatgggaccatccaatgctctgacggacttgacgaatcggagtgcaccacgcgcaaatgtgtggacgggtaagtaaaaaaaaaaatatatttttaatttaattttcatttaaatattttatatttttcctatttaaatattaaagcatgcgccaatgtgaggacggcacatgcattccggaccacaaatggtgcgatcgtcgccgcgactgtgccaatgcgtcggacgagcgcaactgctccaaccatccgaaccgtcgccagtgctcccagtacgaatttgagtgcaccaacagtgtgtgcattccgcgcaagttcatgtgggttttaattataatttatttgcttgtttaaaaggattttttattattattattatttattttaatttaattttattttatcgagcaaaccaaaggcacattagtgctcttatatggtgccaaaaacaaacaaataaaaatgatcaaataaaaaataaaaatgaataccgtaataaaaatgaataaaaataaatcaaatgttaaaaattcacaggtgattaaaatatagtgtatatgtggcacagaaaatttcctactcagaactcattgcttttagtaattcaagaaaacataattaaaaggcaaaaaacaacatgaaatttttagagttttcttcgaaaagaaaaattttagcaagacaaaattcatcagaanaatatacaaaaaaattaatttataattanaaaattt

SEQ ID NO: 25060 - DNA, 1903 bp, Heterodera glycines
aattcaaaacaaaaatttaaattatgataagcccagctaatttgtcaagcaaaaaaacagttatatcgccatacaaaaccgaatttggctgtgtcaaagtatttattacgaaccaacataaatgacaaaacctgttgctgatgcggctgctcgactgttggtcccatcgccggtggcggatggaatggtccgatgttgggcggacaaccgaaaagcgccgcggccatggcattgtgatggtgcgccggcggtgccgtctgcggaggcggtgtctgctgccgctgcatgtgcactccgctgctggtggtgggcgcggacaacgacggcgttgggtaggcaaagtgcggctgctgatagtgggggtggtgatgcatcggatgctgctgttgctgatgtcgcacaggcatttggccaatcagttcattcggctgttttcaaattttttttgtttttttcttcaaaacatttattttgaattcgggagaatgaaaaaaagaaaacctgctgatgcggctgctcgactgttggtcccatcgccggtggcggatggaatggtccgatgttgggattgtagccgaacagtgcggtgggcatgacgtgttggtggtgcgtcggcggtgccgtctgcggcggcggtgtctgttgctgctgcatgtgcgctcctccggtgctgacagtgggcgccgagagcggtggcggcggataagcgaacgacggttgctgatagtgaggatgatgatgcatcggatgttgctgatgctgtccgggcattgggccgatcagttcattgggctgtgaaagtgtaaatgttgagtaggtaaataggtttaatatgaaattgccatataaaaatatttccggatttttatggcagtttttgccttgcaaaatccgactgaaatgcaacctaagtgcagtttaaggaagtgaacgaaaataaacctgctgatgcggcggttcgcccaccggccccatcgccgccgccgcctgctgaaaggtgccgaaattggtagcgtaaatgaacagtccggtgggcgtagcggacgccgccatggcgtgaagttgtgccgcctgtggtggcggagtcggctgctgctgcatatgtgctccggtgcctgcgttgggcgcagacagcggcggaggcggataggcaaattgcggttgctgataatgggggtgatgatgcatcggatgctgctgcattttcaaaattttcaaatctttaatcacaaagcagtcagtaagataataatgacttttgcataataaaaaatatcttcactctccatttagtaacaacgaattaatcactcggatgtgcaagatgcgcttgtggtggaaaataagttggcaaaaagaccaaaataggaatgtttaattctgattctacagaattctgtgaatatgtttttggactgcaattagaaactaggatactatttacaagaaattctaagccaagtagtttgtttgacaaattaaattcaaattccataaaattttaaagctgaaaattgcatttccgtttatacgcgaaagcttgtgcttaaggaaatgttggtcaataaacaattgtaagttgtcggcttcggcactttgatttgggatcgagccagttccctaccgccaattccctaccagccaattcctaccggccgattccctatcgccaaattccctactaaggcatttgggccatttccataccaaagtatgaatattaataaacagtatgtttaaaacatacaggaaaatttattcactgctttttagacctagcacgtcaagaagagcttttggatgataccaaatttttcatgattcgatcgtttaaaaaaaggttagagtgccaaatctctcaatttttcgagttttgaaccgtcgtcctaaaaataggttctaa

SEQ ID NO: 25061 - DNA, 1056 bp, Heterodera glycines
ctttctcctcccttttccaattgcttttgcatttgccgaatctctccgcccccttttttgacttatggcctcgtcctttttgggtaaaagtccgaattcattcacaaacatcgctcatcatcatcagcttcttcagtcatcgcatcatcaaaatggcggcaccgaaattggttggactttggaaaattaaacaacacattttgttaattaattgttaattgtcattcccaaatttttggcaattaattaatgtcaattaaagagctactaaattttgaatatgcaaaaaaaaaaaaacacttcattttcggcttggcttttttggtctagaattttcctcttccaattttttcctaaatttttatattttctcccaacagaaaaacggtccccctcctcctcctccacggcacttaactccggcgatttgctgtcagacaacaacgaagcggcaatggcactttcctcactgatcgaattgggtaaaaatcggcaacaaactcagcgagacgaggctgaaaatggcattgacaatgagtaggcaaagattggcttacaattagcgtttaattgtcatttatcttttcttaattaattgcagcgattgccgtttcgatgggtccgtcgccgtttcgtcgccttcggtcatttcgtcgacttttgcggcaacaccagcgaactgttctgccgaaacattccaatcgcacgccaacggcacacacaatgtgacgacaatcaaaacggaggacaacgaatcgggcgacgaattgccaccgcaaggcaatgcgaaaaaacaaacgaacgaaggcattttaaatgccaagcaaaaaattcgaatacctttattttaaattatgaccattttaatttttaaattgcgctttgttcagatgattccgcgtcggatgcgcccgttcacgaaattcgctgtggtctgttgaacgcgcggctgcacatgcaacgctttacctgcccgggcattcatcggaagtgcgttgagttcgaaggtcgaccaaagataaaatttatgtattttttggaggggaaatgagcaat

SEQ ID NO: 25062 - DNA, 2091 bp, Heterodera glycines
catcaaaattgcaagattttaaattgtctttgtttccggactgagatttgcttggcaagagagtcacaaaaaaaatttgttaaaaaattaatttaaaacaccgaacaaagtcacacgaaagataagaattaatttagttgtaaaatatttttttttaatataattaatttaaatttaatgtttaaaaagcataaaatttgcgaagctgacaacagaatcagctgccttcgttcacaacaccttgctgcagggtctctgattttattaattaaaatgacgtatttaagaaaaaaaaacaataatggcccatctcaccgtttaatcactataaattttttttcttttcttctgcgctatttcaaatgttttatttttcacgcaaagtcttcttgaaaagctgtgactaatatttttgaaagattaataaatgcctttaaaaaatttttatgtaaaatagattttttcctggattataaaaaatagaaaactgaattccatactatccctgctgatacatacactaatacagtaacattaattaaaataaatatttgatttttaatgaataaatgcgaaaatgaagaaaaaaaagcacaaattgtttgatcattttatgaattttattcaaattttttataattaactgaatgattgcgtgcctcattttgttaattaaattgtcacacttacgcctaataggcaggcaatttcaggcattccatgtgtgccccatatgtcgagaatgttcaagatcactcccgaatagcgtgtccaccaatccttgctgccaggattccaatttccatttggcaaatttagctttgcaaataattgttgtgttacagcggaaggattctcaaacaatttggcactgcggtacaattcgccaatttgtgtgattttgtttatcaaatttggctaaataaatattaaataactttttaaattattttttacccataaatccccttgattgattgtcattgaatttgtttcaaaagtcgggtccttaaatgtcgggtccccaagttgcaaatcctcaaaaatcgagtagccattgtaatccgctaccaagtttgagcttaaaattttttcgtaaaaagctgcaaaaataaaatatatgtatatgttacgtaaaaagcggcaaaaataaaatatatgtctatgttattgatcactttaataaaaatttggctaatattgccctttttattatatacaaaaataaaaattcttatattatacaaaaagaattcaataaaacaatataataatgtcatttgaatgaggtcactttaatatattcctaagcgcagcattttattcaaataatttttatatatgtaaatttcttttatttaattttaattaaccatcaaattttcccttactatttttcaaatttatttataaaaacaacatgacccatggcttcagatacgaaggggaattaaaatgattaaaatatgaattaattggacgacattttttggaatttttttaacatgtttaacaaaccagctctgaaaaatttgaagtagattatattttcccattttaggttattatcataaatttctaattttaaaaatcaattttttcagaaaccctaagaaatgtgcaaatttgcctcgtttttagttattttttttgctgtttttctgctttttgcaaaaggtgacgcaatgaaattaaaatccaccaaagattggataaagaaaaaattctcttcaacttcttcaccattttcatcacaatcagtatcatcttcatcctttcataatccattaatagaatcatcattttcctttaatcctccagaagaaaaaggtaaacaattcataaatttaaaatggagaaaaaacttgatacatttattaaaaacaacaataattaatattctaagcaatcactgcagcgcactttttccaaaaacttttgggaacagggacagacatcatctgcgactcccgataataatgagcaaaaaagataaaactgaaaaacgcaaaaaattctcggtctgtcggcttcggtttaaaaaccgaaaaaaccgaaaaactcaaacatctctcggtcgcttttttttgg

SEQ ID NO: 25063 - DNA, 2181 bp, Heterodera glycines
atttcattattgcactaaaattaatgctttttcattatggcatgacaaatttataagaaaaacattatcacagtatttctttctttccttgagcgctggcattcaatcgaaaactttttcacatattattaattagaaaattttatactctttccttgattatttttagaatccgaaaattttgaaaaaatcagcatatttgggaatactgatttatattcataccaaataaatgaaaacctgcaaatacacaatacgctcctctataattcagaatgacattctgatcaacgaagtcatcaaacgctttaccccgaaccccgtgctggtcataatccaagcttctcaaggccgacaggatttggcactgccgacggatgcttatgtggaagtccaggaagtgcacaatgtgtgttttgattgaatggtaacaacaagctgacaagtcaattttaggatggttctcccccggtgaaaacctttgaacacgttcccagtgaaatcggagcagaagaagcggaagaggtcggagtggagcacttgctcaggcatgttcatattgcatatttgtgctttggtagtaattttaatgaccaaacgcaattttcagagacatcaaaaatcaaacagccggcaccctctcgcaacgaattgctaaatcagttgacggaattcgtggtctcgagaaccatttggctggttttacgagctatttgcatcgtgttgcgagtcgagaattgcccatcaaccacgctatcatatttctaatacaagtcgctgggaaattttgaaattgttcttttaaagccctacgttgtttttatattcctctgcttctcaaacacccatttcgttcttatgaatccctttcgcaggaaatgctcaatttgttgccggaggtcctctcaccggactttgtcgacgcgcacaatgtgcagacgaacgaccatttgatgtgcgtttacatcggttcgatggtgcggacgataatcgcattgcacaatctgatcgacaataaggtgaaggaagggggatgaagccgtggaagagaaacagaaaagcatatacatttactatagtcaacccccccccccccccaaaaacggaaaaattttccaaaaaatttcgctacgcccgaagggaggggtacccacccgcaaccccaaatcctgggaccgtccctggttcctcgagacgtatcgatttgtatataattgtagaacttaacctggacctggatccaggcctggtttttttttctggattcggcaaactggatttttgtccaggtcaaatacgaaaatccaggtcctggcaaaacacgaaggaaactggaattactggacagcattttagaatttattctttcaagtgaccgatgtttttttcaagttttcaaaaaatgattaattgatttaaaaaccgattattattgaaaatagatatttttagatgtttccaagtaattaattgattttttcaaaaaatttgttggctttttaaaagaaatttcaaaaaatccaggcctaggtccaggtctcgaggagcctggattttcctggatgtttgtccagaaaatctaggcccagctccaacatagagtccaggtcctggcttttttcaaaatcgagttcatataatttgtgccattttttctggggggctgactatagttcagccataaacgagaaagtttgtttaatggacagattaagagatatttttgctctcacaattaaacagttaacgctgcaaaaagtggcagaaaaaagtgcgaaggaaaagacggtcaaagagacggaaaagaatgaagcaaatgacaaagagattgtcaaaaacaccaaataattgtatgaccattttgctggaaaatattttaaatcattgacggacatttgttgtagcctgctgttttcattttcaatatataacgtaaagacacaaactgctggggagtgttatttttattaattagataattaaattgcgaaaattattttcatggttttattgtgtcttctggtttaattcatattaataaacctaattgtaagatctaagtgcattccggtgtcttttccatttatcttctttctgccggcaacgaaattttttcccagccccattcggtggaacgataaacggacgacacaatccaattggacccgggcgtgtgcgtca

SEQ ID NO: 25064 - DNA, 1264 bp, Heterodera glycines
  unsure (1)..(1264): unsure at all n locations
cggcttttagtaaagaataaaacaaataaatattgtctattttatagtgtaatattgagccaattgtatcaattgattaatagtgacggatcggatagaattacatataaacaattcacattaatatatcaaaatgaaaaaagacaacaaaaaatggttgatgaattaacatctagtacaaagattgacagaaacaaaaactcttatggaattgaggatttaatcgtaattcaaaattattttgatactaaattcccgaatagattcttaattgtggctttttctaggtaaaataaataatttattttaatgaattttttaggaacatgggttaaaaccaatttttaaaggacaaggccatagagaacatttgatatgcgtctttaacgaaaacggacattgggatggtaaaaaaaattatttttaaaagaatcaaaaattttaggtttaaaaagcatcaaacaattttttaatgttaaatataagtattgtgtttattgtgaacaaactttccaaagcacaactaaacattcaattaaatgtatcataaaatgcagccgatgtggatcgtggggtaaaatattcaaattaaattcatctattttgaaaatttaggaaatgattttccgtgtaaaaatagtctaattaaaccagaagaatgtaataaatgcaaccgtctgttttataataaaaaatgttttcaattacacttggcccgtgcatgcaaattatataataggtgtattaaatgtgacaaagaatatcagaccgatcacacccatgtttgcggtaaagttgcccgaaatttatgtactttaatgttatttaggtgaaaaaatatgcaaagtatgcaaaactaaacatacgaagacggaaagttgttatatcagaaagattaaagtaccaaataaattgccgaaatatagaattatatgctatgatgtagaatgcagcgtaagtaattgacgataaattttaaaaattttatatttagacagataataggattaaagaaggaaaatattttggattttatgagcataaaattaattttatttctgcaagatacacgtgcagcatgtgtgaaggagtaaacattaattgccaaatatgcgggccaaaagggaaccgacataaaaaatggtgtacaaatganacccaaaaacctatgattgaatttttanaatgngtattgtcatttcaacattnaacacccctatgtatgcgcattatgcangtaaaagcaaaaaaactatgcngttta

SEQ ID NO: 25065 - DNA, 1231 bp, Heterodera glycines
ttattcaaaaaaccatcaaacgaaatattttttgatataactttgctcaaaagtaactaaattgtcaaattttgatatcattcgatagcactaagtgttttctattagcctacaaaatttcaaaaagtttcgataagtttcaacaaagttatgaccaaaaatgttcaaaaaaaaacttgggttttttttttgtttctcaggtcatagcttttttaaaagttaatgaattttttttgaaattttgcaaaatattgaaaatacttagggctaacgattgatatcaagtgtttaaaatttggttcattttgtcgtaagttataaataattttctgtcaaaaattttccatttgatggtttttgactaacgtcccacaccgttcaaacctacatttttttcaatcccagatagcttaaacagcattgaaattatgaaaacacaatcttttgtaaattagtgtcattaattctgtagtttgaataattgacgatttttcaaaaacttacaaatgatcaaattatcggacgcattcactttctatcatttatttaatgctaattaggctattaggggttgaaaaaagtcagacttgaaccccattttagacataggcgcaaatgtccgaggcgcaaatgtctgggcacgcctcgaacccaacaaattgtatttagtttttttaaaatttaaatgtaatgtcatcatatggttcgccaatgagcatatcgacacgcaaagtcatcatgtcctcctcccggttgtaccaatccttttgcttgctcatcagtaactaaattatttcattttcattatagtctcacataaagcctggagcgggacgggaaatcccacgagtggttttcgcgggatcccagtcgtaatttcggggatttaaggatccccgtcgtaatccctggattttgcgggatcccagttgcaatcccggtcttttgtgggatcccagtcgtaatttcggggatttaaggatccccgtcgtaatccctggattttgcgggatcccagttgcaatcccggtcttttgtgggatcccagtcgtaatttcggggatttaaggatccccgtcgtaatccctggatttttcgggatcccagttgcaatcccggtcttttgtgggatcccagtcgtaatcccgaatttttgtagaaaatgcatcagttgatacaaatataaaataaagttctgtaacattaagtattgtaatataaaagtaaatat

SEQ ID NO: 25066 - DNA, 1650 bp, Heterodera glycines
  unsure (1)..(1650): unsure at all n locations
agttcctaattgcaatttgccttattctctaattccttgtcagtaaagtggtgttgaaaattaagtaaatctttccttgaccccaaaatctcaacccgaaccccagcaaatcccaaagtccctccccgaatatacgccctttctccaacgcactaagaaaataggacacgaaacttatatttttaaaaataatgatatttgatttttatttcttcgtccggaaaatgagaattcggaccaacaaaatataaaatgtgtgggtaagtgcatgtttttgtaagatagtaaagggaaaactggtgcttaggttcaagtccgcagcacgacacaaatatttttatttgcttatttttgaagcaattgaacaattcttgatgtcattcgaagacgcttaatgaggagaaactttttcaaaacaaaagttaggaacttgaagcaccaaaaaaaaattatgagtcttttagaaagggtttctaccagggatggcacggaattccgatttccgacttccgatttccgacatttttgtggtcggaattccgatttccgacttccgatttccgacatttttgtggtcggaattccgatttccgacttccgaaaaaattttggacgtcggaattccgatttccgaaatttttgataaaaagtcggaaattttcggaaatttctttttttttaaatttatttttcaaattacataaaacgttttgccaattcaaaagatttatttttcggtgtcaaattattaatttttatatgcattttctattttttttgttttcaaatgaaataaactagagtgaagcgagaccgcccacaatacatgttagtctcctcaagaaattgctggtgccttcgccggtgttgcttgtgatgcagcgtacgactactagctaattggaccgtaacctgccatcgaaagctgaaattatatctctcttagctgtacgttcccgtatggcataagatcatgccctacgcaggaattttctcggtgcagaccgttgccttgctatgtatatgcgtccaagagatactatcaccatggtaggtggttactgttccgatattcgtgagagctgataaaacatgtggttgctatgtccacgctcactagatattcggtgaggtacgctgaatgagaaaccgtgtccagtgtctgagcattgctcctttagagctcatgaccatatttctagaacttgcttggaagatttctacggtgttaactccacctcgtatcattgtacaggatgctggctactaggtgacatgtcatgtatctcgttgaaagctgtccagttactggctccgacgagtgaaaagagtactactccacgtacaccaatgagcgaaaacctggccagctatccgccgcttacatgacatgccannccgtcactcaaatactctgacgatagaacaggctgacgataagcaatccaatctcatgcacaattctattgtataaatctcgctctaaaggccgaaaaaagcacgctcgacacagactcattgtcaccacccgtcacctaaaatctactcagcgtcggggaagggagccatggggttctagcaactaacttacctgttgaaattcggacaccccaacaacttgttatatctattccaaaggaatgcaaattg

SEQ ID NO: 25067 - DNA, 1145 bp, Heterodera glycines
cccagcaatctccttcctcccaagttaccgttacccaaaactctcaaatgcaaaattctgagcaggaaatcaggattttggaacccgaaaccccctcccgtattgttaaatatcaaattgcccaatcattcccctttaccattgcagctaaagttagccaagggcttggtcacgccgaaaaatggccaaatttccttatttctgacccaattcaaggcaagtatctgttaaatggtgattgtatcttcttctcttcatttgttgtcgttcctccctctcatccaattatctcttcccccctttcgactattcccactctaaaagccttccataaaggcatcaatccccaactttatggctgtcaatatccccttcatctcgtccaaggaattgccgttgggcataaaattttcaaaacatctcagggtaaaaacataattttcaccctggtgaccggagaaggacttattacccccaatttcattccgacaccccatctcaatcatcccctcataaaaggtgtgagacttaatatttatgtcaaacaaattgccctggggacccaaatttctgagttttacacctttccccaaaacttcccaacaaacaaccttccagcatcgtcaggtgacaacaacttcgccatttcgatggactccacatcaccgcccaggtacatctttcctttcaatccctccctcacaaaaaatgacaatattaactcttttaaagccatttccgtagccttaaaagcacagcccattttttgtcctcctcacaccaaaccacctctgtttatacaaaattaaaattggtcccccataatccaaaaaatgaagagatctgctcatccgtcaatccctcaaacccttcctgttcctcttctaatgcctcccaagcgatacgaatccaaaaagtatttccatatttcttcacccactctctctcttcattatctgaattcataaagttcaacaatacctggaaacccgactccctcctgattggctccgtcaacaaaaagatttgtgctcaaggcactgttaaaaccgtaaaactcactgaccctcaatcttctctgttgaaatcacagttaatttatccgagacagaaggtcacagctttgatttggaggacctgatcct

SEQ ID NO: 25068 - DNA, 1619 bp, Heterodera glycines
agatattttttaattaatcggtgcaaaactgattataaatgtttttatatttaaaacttcaaattttatatttaatttttaatttttactgcaggaagaggccatccaaattctggacgacctgtacatggcgctggaggaggacggagttgggcagcagcggttgcgcgactgttgtagcagtgcgacgagcaacggcagtcagcaccaactggtcgggagcagtgcagcgtcgaccgtttccaccggcgcaaatgccatcaacgccggcactagcaaaaacgacgacagcagcgccgtcgtcggcactgtgcccaccaccgtttccgtcagctgtgccggtgacgtcatcgtttccacaacggcggcaccatctgtgaaaagtgtccgcggtgttgctgcagcggcacagcaacagaagaaaggtttgctggataaacctcctctcccctttttcatttttttttcactcgcaaaaagtcaccaaaatttggcattaaaattttttgccaaccttaattaaaatattacttttttaaagttattgccgaacactcgcgagaaccatcctcctcagttatgaccattgcttcaacttcatcctcgtcgtcctcagaagtgaccacgaaacgaaataaagtgggatcggtcactgcttaaataaagacggtttagacaaattttcattttggaaataagcgtgggcaaggagttcgtaaaattgcataaaattgtttatttaaacgcatattttcacaaatttggcataccccacaggtgccgttctccaccaaacagtttgaggcccctcaaccgccgtccgctgctgaggctgccacccatcagcaaaagcgccactcaaaacctgcacaaattccgcctgatgtgaggaacggggacctttacttttatatgccttttaccaatatttttgtaaaaaaagccataataattttaatcgcgtatctttttaatctaaaagaattattttagcaacggtcggaagagcccatccaaattcacattccggacgacgaattgctgcgcatggcgttggaggtagacgaaatggcacaacaacagcaacagaggaggcggcacacgaccagcaacggcagtcggttgagcagcagcacgaggagcagcagcatgtccagcagcaacagtgccgccaattacaacaacacaaaaagcagcgaggacaaaaagggcgtggtgacgaacatacgcggcaatggcattctccccaccaccgtgtccatcaatagcacaaccaccgtctcggtgcaacaaagtacggttttgtccgccatgccgaacggcgcgggtggtggtgaactgctccaaaaacaacaacaaccacaagcagccattaatgccaatgacaatagccacggtgacagtagtaacacatcggcggcatctaccgtagaccaccactcctcctcctccgctcgtgccaatgattccctcaccaaaaatcatataccaattaatgcaattacatcctctaaaagaagccccacatctgtcgacgaaaacgacgatgagttccaacaacaaaatattattttttccgacaacagggtcaatttcttaccaccgtcgtcgtcacaagt

SEQ ID NO: 25069 - DNA, 1022 bp, Heterodera glycines
tcaattagcgtgattcattgggcggtgtaattactttttaaagtaaagtttaattaatgtttataaatttgtttttgcaatattactataagatgttgaatatataaaagttatgcacgaataattgtattaataaatttatttttatttcttttggtcgcagtcaaatattctcttggctttaactagtagcagtgataattagttaaatttattcattgaaagcattaactgtagcaaacctatttttccgcctaacagtcctaatggagtgctttgctcatattaatttattacctaaaccataaaagctaatatcagtgcatcgctgaacataaaaaatgagcatttattgaataaaatttgttatcaaattctgttgaaaattatggttattgtgtttattttaacctatctatattttatactatgcagctatttgagtttaattggttggttaaattaatttaattaaatctttaatttgactgattggacaaattatcgttgatcactcatttttgatgagctaaaatgagatccgtaaatcatttttatttatagcgctgagtattgaatttttaaatttttcatctttttgatctgttattattttataaattgctgcacttctcattaattatttattttttcaagtaatttaaaattttgtctcattttatttcgttataagttttcttgagtcaaatataattaaaaatgtaaatgaacattgaaatttgttttttctttcttgtgaaagattaatggtcagatttataaatagaattcttatatttttaatatttcggcattaattttttgtctttttaaaaataaatttaataggatttcttttttattaagcttagttttatgtgaaattaatattttttgttaattaaaatcattgccctggtaatttggttttatttaaatctttaatcaataaattttgtattgaatgaaaatttttataatttgttcagcctttattaataaaaatcaataaattaatttat

SEQ ID NO: 25070 - DNA, 918 bp, Heterodera glycines
ttgtagggctcaaccgtatatagtaatgcgttttcggggaaaacctcatgttgaaggctgtagaaaaaagagatagccatttttttgagaatatctattcttagttatggagccattttccaaccgaccatttgtagggctcaaccgtatataggtaatgcgttttcggggaaaacctcatgtggaaggctgtagaaaaaagagatagccatttttctgagaatatctattcttagttatggagccattttccaaccgaccatttgttgggctcaaccgtatatagtaatgcgttttcggggaaaacctcatgttgaaggctgtagaaaaaagagatagccatttttctgagaatatctattcttagttatggagccattttccaaccgaccatttgtagggctcaaccgtatatagtaatgcgttttcggggaaaacctcatgttgaaggctgtagaaaaaagagatagccatttttctgagaatatctattcttagttatggagccattttccaaccgaccatttgtagggctcaaccgtatataggtaatgcgttttcggggaaaacctcatgttgaaggctgtagaaaaaagagatagccatttttctgagaatatctattcttagttatggagccattttccaaccgaccatttgtagggctcaaccgtatatagtaatgcgttttcggggaaaacctcatgttgaaggttgtagaaaaaagagatagccatttttctgagaatatctattcttagttatggagccattttccaaccgaccatttgtagggctcaaccgtatatagtaatgcgttttcggggaaaacctcatgatgaaggttgtagaaaaaagagatagccatttttctgagagaagctattcttagttatggagccattttccaaccgacca

SEQ ID NO: 25071 - DNA, 1388 bp, Heterodera glycines
  unsure (1)..(1388): unsure at all n locations
gggcgaatcaatcgccgccggcgcaccggaaagcggtgacagcgacggcaccgctgatcagcccgcccatttgctttgggtttgcgcttttcctcgccggagggggcggggagggcttcttccgtctcccccatcaattataaccgcaatatcctaaaccaccgctttccccagcccctccccccaattatccatcacttatatctcctctggttatacccacccttcaccccgccccccaccaccaaacaattggttgtcttcgtcatcaaaaagcatcgcaagcgagcaaaactgcctcttcccgtctttacattgcaaatgcgtctccaatacaataataaaaaaatataatccggaaaaaaatcgggaattggattctttttttgaaattttaatttaattcttttaaaagcaaaagtcaaacattcaagcgacaaattaaaccaataatattctcattttataaaaatttaaaacaaattttctattttcaaataatccaatcaatactttttttaatgatcaaatctcagacatccatttttactagtgcacttcttcccattttttgagaaaattcacgagaactgggaacgaggaagaaaaagcggatggtattctcgaacgggaatttcttaactgtctataaatggcaagggattgtccttgaaaactgacttttctgttaaaattgttggtccttgccttgcaaagattgttaacatttcctcaaatcactgaatatattttaagataatgttaaaacataatagaattgtgtttttattatacttaagtttaattaaaatttcttttttctttttaaattaataatcagggctgtcaaaaatatgcaaatgcatattttttcctggattatacgtagtctaattagtaggatggtatttgcgtatgaaagtcgggacttttatttgcatatttttgcatattttgggttttttctgcatatttcatgcatatttaaccattttttgtacatattttcagctttttttttgcctattttgccatttttcgtcaaatatttccgatttgaatatcccttacaaattagggaaaaaattttgattatgcctaaaattaaatccaaatattaatggatgcgcgagtgggtcaacagtgagcttcactgccgaaaagcttgagaaatttttgatttgaaattgcaaaaacaaccgataaaatttatgatgaataaaattttttaattaatttgcacccctaattttcgacttttttgtgcatatttggtgcatattttgcgatttttgtgcatatttggtgcatatttcacgactttatttgcatatttacgcgctatatattggcctatttttgtgcatatttttgacagccctgnttaa

SEQ ID NO: 25072 - DNA, 1877 bp, Heterodera glycines
atacatattaaaggccagaaaatggtttattttttggcaatttaatggcaaatgttaaccaaatcgggcgatggatggcaccgaaatttgctttcctttttttttactaattaatagggttgtaaattatatggactaaaaaacgcgaaatatggacattaaatatggactaaaaaagcccgaaatatggactaaaaaggacaaaaatggccaaatatggaccaaaatatggataaaaaatgccaaaatatatgttgtaaacccccaaaaatcccaaaaaaggtgtgcatatttaatatttgcttaaataaacctaaaaagtacaataaacaaccaaaaaatggggtttaaaacttaaaaatgcatattttttattgttgttcgttgtatcaaaaacacctccaagtttgccaaatttcgaaaaaattctcattaaaaaaaagaaatgttcgcaaaaaaatgacgaaaatatttattgaaaatgccaaaatgacgacgaaaactcaaatttttcgtgttttgtggggtgtaatttttaaaaatttccaaaaagttgatctttaggggtgtatttttcgttttttttttcatttttcttgtgaaaatttccaaaaaatggccaaaatatggactaaaaacccaaaaatggcgaaatatggatttattcccgaaaacccccaaaatatggatttatatggactaaaaccttcaccaaatcaaaaaattttaacgcagaaatgctatttttaagcccctttcttcatagcatatgcgcagaaaaaatatgttaatccatataatttacaaccctactaattaagcaagcaatgaaaaggattaaattaaatttaattaacattttttttctataccaaataatcaaatcgagtgaaatttttgttcagcggagggacgccacaggaaacaacggcatcggcaacggaagaattaagctttggagaaagtgaaaaagtggacaaaatggggagcagaagcagaaaaagaaaaattgggcaaaaggaggccaattttatggccatttcgcaacaaattttggccgattgatttagcggcgaacatttttttgctcgaaatttcagtgtcagtcagtcaaatgaggaaaatgccatggccatcgaatggattaatcacctcattcgataggacatttcattcattcccttccaaaatcaattcaatttctgctgatcagagagcaaattggcgaaagcatcttttaaattaatttatatttatcgtcggtgacgaggaatgctttaataatgtgttttttgttgcagatgaaaatttgtagacaatcacgacgagattagcgacattaaaatgtgttgggttgcatgaatgggaggagaagactaatgaaagaacggacacacactgaactgatcagaggtgaattaaatgagaaacggcggagagcggtgatcagaggagggcactcatttgcatttgattctcgaagtcagtcgagtcgagaagggaatttggacacctaaaacaaaaagcggaaaattggaagaaatctcgactcgaaaaagctcaacaaaaagtgcacagaaaatgggggaggggggaaactaacggaagcgacgattagtgttctaattactcaaatttgaataaatttgaacagtcattggcgtgaacagagaaagaaaggcccacacaaagcgaaagaagtgcaaaagtaacagaacggtgaaatggacaagcaaatgagtttaataattgtaagaatactgaatcgcaatatttgaggccgaattattcaattttttcaggatggagagaaaaaggacacttttgggggtaaattttggagtttttcgtgagttgagcgaccatcgcagagaaag

SEQ ID NO: 25073 - DNA, 1121 bp, Heterodera glycines
attatggggagcaaaaatccaacccagatttaaagtacaggctataggggaagctattcccgaaaggatccggtctccccataaatctgggcgctcgggttcggggggactgccccgaaaccaaaaaaaatcgattttttttcaagtgtccgttgggggtactcaaacaattatggggagcaaaaatccaacgcagaattaaagtacagactatagggaagctatttcccgaaggatttcggtctccccataaatctgggcgcatcggttcagggggactgccccgaaaacccaaaaaaaaattttttggataaaaattatttaaatgaactgactagataatatttaaaataggttatttctcttctttcagtatccctgcaaagtttggtgcgcttctgatcagtttctgaaaaaaaagttaagcctaaactttttggcctgtttaaaaaggaattaaaaatttttaaaaattttattcatctccctttttgatagaaaaagcatcagagtgcctaaactaacatgtaaataaaatttggtgcgtttcagaaccctttctgaaaaaatatttaagaattaattttgcaaaaaataaataaaaacgaaagactcagattttcgaaaatttttttgagccagctagctcggcgctcatttcagtgtaagttagtcctttaccggggagtatccctgcaaagtttggtacgcttctgctcaattagcaaaaaatatgagtgatcgaattttcactaaaaaagttaagcctacattttttggcatatttaaaaagcaattaaaaaatttttaaaatttaataattttcctgcaccgaaggtactcactcggcctcttcgcggcctcgtggtgggccttcgccccccccccccccccgccctcaaaattttgaaaaataaataaaataataggagactcagaattttgaaaattttttataaaaactgatgacgagctaatgtgataaaacgggttaattcttttcctttcggtatccctgcgaagtttggggcgcttctgataagtttctgaaaaaaaagataagcctaaactttttggcctgtttaaaaaggaattaaaaatttttaaaaatttattcatct

SEQ ID NO: 25074 - DNA, 851 bp, Heterodera glycines
agttgagggcgcacaacggcgcggaacggatgcaacagctcgagcaagtttcaaggcggaccggggaacacatggagatgagcatccaatgcttgaaggcatggatggcattgctttaaaaaaaatcaccttattgttttagaaggagctggccgatcggcacgttctgatcagttcgcagaatgagaaaatttctcagctggataatgccattgccaagcagcaacaactgcggcatctgtttttgtacgagaacggtggtcaaaatgagagagttgttggagaagcagagaagacgagagagtgcatggctggcgaagacagtggaggagcagagaagcagacgcaacaacaacagcacaatgaattggatcggacacggcacgagatggacagactgttggagagagtgcgcgagttggagagggaaaagcgacagagacaacaacggcaacaacacgtgggcggaatgacaacagcagaaaccgtagacactggagatgttggaaaaatgccgtcggaggacaccgcatcaaatggcattgacgagcaaacggatgctttaaagcatcggtatgacgagaggcgtcacctgggaaaattctttgaaattttggccaattccaaaggaggcaactgctctcgacccattaaattgaaatctgtccaaataaaattaaaatattttaaatgttttaattatgcttaagcattcacgagttggaggaagcacttcgggagtccgtcggcatcacatcggagcgggaaaaggcgttggcggagcagaaaaaagtcaaccaaaaattgtctgatcaggtgtgacacgggtgcacacattctccacccccccc

SEQ ID NO: 25075 - DNA, 1439 bp, Heterodera glycines
  unsure (1)..(1439): unsure at all n locations
cgactttttcactttgatgcccacacccatcggtttcattttttgtttggccggctccatctgtcccatttcaatgcaagtgatgccgagggaccaaatgtccgctaaaattttaaaattaaacaaattaaagggcatgtgcaagcagttgtgcttcaaccagtggtggttatctttatctgtagaaatctgggagggttcttctggcgcaaacagaggatttcggttatgggacgatctaccgacaattctcgccctatttccggatttttttttgcatttaatagaaaaccttttcatatcattttaaaaaaaaaaacacncccctttcaataanaanntnnttaaatnaccttntcaaacaaccataattacttnacctnntcaaatnaccacnaanatnntnntaaacccnntcaataataaaatnaccacnaantcccattttcactaccaacctccntcaaactaccatnaactatcttcttattnacccnnttcatttaactacatccaattttnccncatattcacataaaaattttntttttttcttctatttatntcataatnannnatacnttttcttataaaagaataaaattaatttataattagtttattttaaagaattttaaaaaatgtttaaattggctcaaaaattaccacaattgattatcgagaaaaattattttatggaggtgtttttggttaattctttgttattttcgtaaaaattatttgtctctcgaaattttttttgtcgagttttgactacctttgtaaaaagtggttttaaaaatacttaacattaagataaattttttattttggtatcagaagaaagagcacacttcaatctataagaacttatttttttatatttttaacttacaattttccatgttgaaaggctcatggtaaatatggctaccatgggtatgatgatggtagcttttctaaccaccaactcccgtcaaatgaccacgaactacattcttattgacagggtaaaaatgagggccatggtcatggttaaataaccacaaacttcgtggtcatttgaccaaagttcgtggaatctcttgttgaccgaggattatcaccaacttcatggttatttaaccattaccaccttcttattgaccgggcccggaggggaaatttggaagtgaaacggaacatggcaaagggccgggggagggggcggagtcaaagcaatgccaaagggacggagagagggcatgacgagagagtgggcggagaggagagggctagacagaaattggggtggacagatcagtgccccgaggggactaagggggggggggaagggaaacagtaagagggatcaatatgggggtgacagggcagcaaaagctttcaacaaattttcggatgggtaattttgccaatttcttatcttccctgaccaagtg

SEQ ID NO: 25076 - DNA, 269 bp, Heterodera glycines
tttttttttttttttttttttttttttttttcctcccccccccccccccccccccccccccccccccccccccccccccccgcccctccccccctccccccccccccccccccccccccccccccccccccccccccccccccccccccccccccccccccccccgcccccccccccccccccccccccccccccccccccccccccccccccccccctaccaaccccaacgcgcccccccccccccccctccccctcccccccccccc

SEQ ID NO: 25077 - DNA, 2030 bp, Heterodera glycines
tcccatgctttcttctgactctaaaagttcaccatcaacccggttatttaacgaaacatttcgattttgtgtgttagcggtgttattcggcctgcttaaattccctacaactccgttttgctgttgctgtaatgccgccgcatctcgagctcgttgtctggtgaatggtggagagcggttaatcatctttttaaaacaacacgagttttattggagaatcttgaagagcacaacacgagtgctttattggagaatcttgaagagcacaacacgagtgctttattggagaatcttgaagagcacaacacgagtgctttattggagaatcttgaagagcacaacacgagtgctttataattcggtgggatgcatgaagagtccaacacgaggacagaaaaatgataatgtcgatatatgataatgtcgataaaatccaaaatccaacacgaggattatcgcaacttatatggccgatgtaaaagttttccgtttagtcgtcactaagcaagccaaccttttgttgcaggagcgccaagttgaaaaagaataaagtttgcgtccacttttcccaattcaaatgtcaaaacggtgattgtcaacagttctctgcgatctgtctttacaaaacaaaacaaaacaaaacacaaataaatttataccaaacaaaataaaatagcgacgacaaacaaaataaaataatccagcacaatttctctccaaaattaaatcataaaacaacaaccaaaaacatcacaaaatatattgagtctcttaaaaatatacgaaacgccacagaaattaataatttaaaattgaaatgaagtcaattagcacactgcaaaaaatatgcacgaaaaatgaccaaaatatgcacataaaattgccaaatatgcacaaaaatcgcaaaatatgcacaaaaaacttgaaaattaggggtgcaaaataatttaaaaaattttattcctcataaattttatcggttgtttttgtaattgataatcaaaaaatttctcaaggttttcggaagtgaagctcactcttgacccactcgcgcatcatccattcagagttggatttaattttaggcataatcaaaatttttcctaagggattttcaaatcggaaaatatatacaaaaaatggcaaaatatgcaaaaaatcagaaaatatgtacaaaaaatggcaaaatatgcaaacaaaagtcccgatttttatacgcaaacacaaaaaagaaagtgtttttcctactatttagagcatggagaagccaggaaaaaatgcatttgcatgttttttgcagccctgaaaatcacaaattcttatcaaaaaaatttcgggtccgctttgcagggtttggatacacaattgttgtggatagctttgttgtataagccttatttttaaatacgcattttgtaaatgtgagacaatgtctcccgtgttgaatgttgttttaggggtataaaaggaaaataatttcatgattatctcccattgttgctctcaaaaagttggacaattactgcactaatgtttacttgtttaatgcatattcaggcacttttacagtttaacggattcgatgaaaaaccaaaggtgggacccttttaatgtacaattttttaaaattaggtatgtcaaaataaatcacatgtccttgatcagtgaaatggaaatatacaacatttgaagaagctcgacacttttggcgcaaaacgctgttctgcgttcacttaaaatttcgtaaataacactggagaaaattttggcacggagcaaaaaaaaaaagagaaagtttttgggtgtgccctccctgaaaatgttttctgaatatgggccgtgtgattggcaacatgtcgaatgacttttggtttttgtatggcatttaattttcatgtgttaaaaataattacaaaataataaattaaaaagtgaacagttaaagcgggaataatgttaattaattagtaattaattaggcagtgtgtaattaattatgtttacgtatgtgcattattatttattatttt

SEQ ID NO: 25078 - DNA, 1025 bp, Heterodera glycines
  unsure (1)..(1025): unsure at all n locations
gaagggttgatcaatttgacaggaatagagccttaaaaatagagaaaaatcaggagaattttatgggatttatttgggatttctatcttaaaaagaaaacaagttattccagaatttctgaaaattttcgatttttcagaaaaaaattcatgcattttacgttatttttaatgattttaataatttaaaatattttattgagttaataaataaaaaattatatttaaattaatttttttttgatgaataaattttataagtttaaattaatttttttttaattgatagaatttcatgtatttttttaattaaatttgttaaaaaatattttcattttaatttaatgaatttactaatcactgttgtatcaatttatatttaaagatttgttgtaaattaataataaaagaatttatgtaaaaaataataattatcttttaataaagaatttcatattttttttaattgtttataaaaattaatttcatattaatttaaatattcaattattgtacatttcaaaattctctttttaattaataaaaggaataattaatttattttttaaaatttataataaattgcattcaatttttgtacctcttctaatcaatcacagttgtaccatttctaaacacttttgtacctcttctaacaattttcccaaagcgcgaagcgctttaccaggggcgcaaaaactgactttggtgacagtctcagtgttacgaaaatttttgcttttgctcttagggcttagtgaaccccaaaaggcacaccccccaactgtggcctacaactttgccagcaaaaatttaaaaaacgggcgcgaagcgcccgtctgaggccgcgaagcggccgaaaaggcccaactnaattttaaaaaccgggcgcgaagcgcccgtctgagctcacaaatnttaaaaaacggccgcgaagcgcccgtcagagtaaacaacattttgaaaaccgggcgcgagcgccccgctgaaggcgcgaagcggccgaaaaggcccactaaatttaaa

SEQ ID NO: 25079 - DNA, 890 bp, Heterodera glycines
  unsure (1)..(890): unsure at all n locations
aaacaaaaagattaaaaaaagtattttctgtaaaaaatttatcaaaaaagaattccttttaattatatcacaaaacaaactaattgaaattccacttatattcttaatttgtagttttgtcgagaataagcatttaaccgactttgttttttacattttaaaaagagaaactttaaaagttgacctttaatcagtaatcaccaataataaatggttataaaaattctatttaaaaacataagagaaaaacaaacacaaataaaaagaagcaaaatatagttaaagaagagaaattagcacgaataaaagaatgttaaaagaagtaaacgaagaagaaaatgagaaaatgaaaaaacaaagttaataattttttttgaatcattagatacaagcaatagttttcaatttatgagttttcaaaattctaaaaaatttcctcagatagcggaatttaagaaaagcgctgcactgaccaaaaatgccattatcaatcattccattgcacaaaaaattaaataaatttcacacttttccttgccaaaatgacttcaatttccactgtcaaactgttgtttatgttgtaaaatgcgttatgctcatggtttgtgccccaaaaaacctataaaatacgaattaataagaaaacaacgaagtccaagaaagtcacaaaagatcgctcaaaaggtaacctcaaattaaattattttacataatttaacaattgatgagatttggaatatatttctccagtcacaaagttcgaatttaaaatagaacgtatttggaataatttttattagagatcgacattttgaaaaaagccaggacctggacctggatttcctgtacaanaatccaggaaaatccaggtccaggaaaatccaggtttc

SEQ ID NO: 25080 - DNA, 1706 bp, Heterodera glycines
ttccccaaagaattgagtaggaattcctccgatagtctcttcttcacttttgccattcccaacaacaaatcggcgccattgaatgtgactttgagcactgaggccaactcgggaatagtggtgaatgggcgagagtatttaacacttaaatccccaggggtaattaattaattgccttttgcgtcagttgtcggcccatctctgtgccatttccccgcgtagtttctcctcctccgccgattggtctttgccctccaatggcattttggcggccaccgcccgttccgatcagttccaatccgtcctcctccgtcccgcgtcactccctctctccgatcagtgccctcccacaaatcgttcctccgccgatcaatccgctcttctgctgctgctcgaagtgcgttcgttggtcggcggcagtcgcggcactttggcggtccgaaagaatgacgcggcggacggagcgatggcattttccgcggagggaatgccaagcgaattggaagagcaaagcgcggaatggtcgctcattaaggggcagcagccgcttctcctcccaatccatggcaattgttccgtcgaagactgctcgaatttagtgcgcttcagtgcccacttggccataaggttttggccgaacatttgcaaaacaatcggccgaaacgatggacaatttaggcaagggtcggtggaattggccttgatacaacagtgtgacaatatcagcaacaacggatcattgaaggaaacccaaaagttctttctgttggacaatttccttccgggcgaatatctgcgatttatggacattcatttcggcgacaatagcacggcaaatggcacaattctgcgcgggaatcactctgaacatccattggtccatttgggggggggaaagggactgaaaatgccatccgacaaattgctacaggaactttcgtactgttctctgtccgctgagctcaatgagtccaattcctcttcttacggcaacattcaactgatcatctcttcctcttcgtctcagccctctctcgtggcactttctcagcttcggactttcaacgcgcggcatttaacgcagccgggcaaagggccgtccatcggttggcacttttaattggccaattaattggttttcatcaatttaatcccattcccctcatttgtcaggtcatttcgccctctttgttctccttttggtcatttccctcattttcttcggttttttggctgtttttctgtcgcgtcactttttccttaaacagcgccgcgttcacaaagaaaatgaagagcaacagcagcagaaggaaggcgcccattttgagatggaccaaatgcgtgaaaatcggccgacgtcgacaatttcgaaaagggagggagcggtggcggaagtgaaaatcaacgcgagtgcgctggaggaaagagcgatcggtggaagtaatgggggcggatggatgtgatacggtaggggaaatgggaatgacagagtacggtaataacaggaagaaaaacgggcatttgaagtggcattaaaagttaaattgttttctaagtttttctttactttttttcctttgaaatggaatttgttaccgtactagtatacagtacacatttcatcgttttgtgcgcaaaatgtacaacaatttgactgattttgatcttctcagctgctgtttgtttggtctctttcctatcgcatt

SEQ ID NO: 25081 - DNA, 1521 bp, Heterodera glycines
  unsure (1)..(1521): unsure at all n locations
cgattacctaatatctaaaacagtaaaaataactattttgaagcaattttgcaaaatgttttggtttttgaccccaaaatctgattttttgagccctacgttctcatttttaaaaatttgcgatccgaacccgaaatgaaaaaattatgtgccctaaaaaatcgaaattttgattgtattttcacttacaaaatttttcatgtttcacaggtcaaaacatttcatttaaataaataactggactgtgctgcgctgcgaatactatccttgaatttggtacattaatgggattaatttgaatcgaagatcccaaatgggtaaactgtggcttgtgataaagaacttcgcattaatttttaaaacaattatttttaagtcaaaaataatttataaattttttttataaattgctgcccgttctttcataaattgtttcatagtttcccaatttgatttaatgggcaaataatattttttaaataaaacgacttcacttgatatttaatataagctcttcgaattaacttcattctgacataattgttaagaagcatataaattcaagtaaaatttagctttttcattatcttatcatataataaattgttttgattattatttttgatcaatgtttttgaatatatgtatctagaaaccatttaaaattcttagaagatttttgcttcactgtgtaaaattagaaattttcttatattggaataatataaagaataaaattaaagtaaatcaattttttcttatgtgcaaatgcttcaaaatcaaataaatttgccatatatcatttctgttttttaattttgcaattaataggttttatcgtgttcatatggttgaaaattttttcccatttatcgtgagaaaaacaattacttgtttccgatactattttatttacttaaagtttatttatttgttttatttgtcattctaaattactattcatttaattggacaaaaattgctacatttaaaatgatttatataataaaatttataaagacaaaaatgaatttaaatattattaatttatcttttacattgttgttccaattaatatatattttactatatatgctcgaatgcattgtttcttttcttacatcatgcgccacaataatttataaatatgatttttgtagttaatatttatttcatttaaaatattttccacgtatataggttaattttatttttttgtttaattactacttttgttgatattttaagtataatttaaccaaggccgagaacaaactttttttaaattaagcaactcaaattttttttatttccatgcaactaattttattaatatttgttttgaaaattattacatagttaaaagttcaagatttaaaaatttttgtatttgtttgttcaattaaatttaaagatttagataaacttgatttaattttggaataatgattttgagaaataaagcccattanaatagagcctcatttnttgagtgggttttactcgggactcattttatgt

SEQ ID NO: 25082 - DNA, 922 bp, Heterodera glycines
cccccccccagtgcgtttccgaatccaatcatcccccccctgctcttccctcttcattttctcgtcgcgttcagtcgcccctcttccaatctcattcatgataatttcttccttacatttcaacaaatttgtttcttccgggaagaacaacctgctgttgccccccgccccccgagggtcaagtcaattttcaaaacggaacccctcgggcggcgggggagctatttttggattgaacttcgatgctttcttttaattcttttgaacattcgtttccttttcttaccaataattaaaaatgtttctgatttttcttcgatttagagaaataattaattaatgtgcgcaaacataattaggagaagaccaaagaaattacaatagtaatgaattgataatttgttaagtgaaatttgcacatcttcaaaatgtttctttcttttttcttccttttgccattttcaccgttttcaaaagtttcctccgccgttttattatccgagttggaaatccctcagagtttcgtgcagattcttcggaagggccaatgtttttggcttttcccctaagtgaaaagtgacattaattaaaataaaattaattaattattaaaaagggcggggaatttcataaacactataaaaggtgttattctcttctcttttatttgatttacatgggaattcgtcgttgccaaagtgtccattctccgccgtcctttggtaaatcggacgcgttaagccaagttgtctacaaggaacagaaaagtatgaccgatgataaaaagcctaattatgcattaattgcctaattattgccccagggcgaaggtcgaagtttgtctcgacgattttgagaaggtcgtggtctttgaaggggaagtgccgaaatgggtgacatcatctgaaagtgccactgaaag

SEQ ID NO: 25083 - DNA, 1381 bp, Heterodera glycines
gggggttattttttggttttattgcattttttgttgagaaattttccaaaaaaaggtggaaatataaaaaaatagggacaaaacgccaaaaataatgaatttttcattattttagtgacgaagctccaatggtgacatgaaatttgggcatcagagtaagggattcaaaaaaaaataatacaaaataaataggtaaaatgctaaataaatcgttaaaatctagtaaattttaagaacccttgtgcttaaaaaaaaatttatgttttcttaaaaaacggtaaataaataaaataaataggggagcaaaatagaatttagtgctaatttggattttggtgatgaatggttttggcatctttcatttgtgcttttatatgccatggtttctctgcccatctctgctgttcccattttgtttctcttctctcagattaattgccattgattaatctgtccatttgattttccttgggttaatttgagtggcttaatgccctcctctgccagtgaatgggaacggacggcattttctttgctcgcacaacggcactttgggaaaagcaacctaatcctcaaccaaaaagtgaaaacgacccccctacccctgaaacgaaaaatcaaaatttttcaagaaaaaacgtgcaattttttaaattttggaaaattttgtttttttcaagaatttttttgtaagaaaaatgaaccaaatgaaaaaatgggtggtttttgtgacctctttttatttttcattaattttttgttaaaaatttggagcatggtaaaaaatttttcaaaccgtttaagcgtttgtataaaaattacaaaattcgcccgaggggttaaatccaacatataaaatgaaatttgtcgatggttttgcgccaccaaacctttgtgcaggtggtcgtttttccggcaccctgcagaccgacaaacatcaccacatttggccgccctttgaccggttggaacggtgtgacgccagggtcaactgaaacatggacggatgaatgaaaagatattgtaaaaaaacagacgtttcaaaacacttttctttcaaaaaaaatttgttagaaaaaaaaattcatttttcggaagggaaatgatgcgggaaggaacgtagtgtaacccaaatttatggagtaaaattgtttcgcagacagaccaagaattgagagcccgaggctttaaaaaaacggaaaacaggactttacttgtaacacaagacctggcttattgttagtgaaaaaatggtaaaaaatagaaaaattcccatttttcaatttgaaaaaaaggaaaatttcgttttgaaaaatgaaccgattccttgaaaaagtggcaagaaattaatgaaaaatttaaaaaattatgctcatgggaa

SEQ ID NO: 25084 - DNA, 1418 bp, Heterodera glycines
ctccaaaagtccgtcgtaatgagtgggcttctgaaagccgccctcttccctggccgtcccccaagggttcgccccactcccccaactcaaaaggttcagcacaatgattccctcgcattgggccaattccaccggccttccgtccacttccaattcaattcgtttccataaatccttacagtttcgttcgaaagccttctgaagtccgatcttcacatattgagtctgacattggaaaaggcacaaaattgtcattcgtccgtcttcgaaagatttcgtcactttgttgaaaaggcgtgagctgaacttctccgggttggcgtctcttttgttgtggaagcgaagacaaacgtcagcatcaatgccaatgccgaaataattgttcctaaagtgccgttggccatcctcgctgaggtcatggcagttcgtacaatgtatacatttcgtacaatggagtttcgtacaataggcagtttttataaaggcttagaataagcataagccttcggcttaagcttaggcttgcttgggcttaggctttattttgtaaaaatttttattgtacgaactgctattgaccctcttggctggaccagcactcacatgattatcatgctggtctggtcctccgggttgctcatcacttgcgcttcgttctgtccctcgtccatccccgcggccgaaggctgtgaccgttcctcttcgtgaaaaacgatggcccaccggtccaggcggacctcttccgcctcgatcacttcctttaggatgtccgccgcactctcttcccccgtgtagccgcctccccacctaagcacccgtgccaaatcgttgccggtgccgagcggcaaaacggcgcacggaggtgagaaacaagcggcatcctgaagcatgacaaaggttgaaacagcaaaggagttggtcaattggccaagctgtacctgttttgctatgtcaagacattgcagcacccacccaacggtgccgtcgcccccagcagccaaaatgcgatacttggagatgttgcggaacacgtaaagtccgaccagaggaccgcctttgagaacgtcgaacacttggaaagggttgagcaagcgacgaaaggctgacaaaagttcggtgccttggcacccgccacttttgacgttgaccagcaccagcaaaggctccacgtcggcagggatcatgtgctgctgaacgtttggcagacacaaaactctgaagttcaattggacaatttttgaagtgatcggaatgaatgatcagaatgagtgatcaacctttgtttattccttctttttttactttatttgttctgccatttccctccccaataaaatgccttacacttacatcagcttcttctcctcatacatcgcgttttggagcttaagtaccgctgcagtggctgcctttggcgt

SEQ ID NO: 25085 - DNA, 1609 bp, Heterodera glycines
ttatttaattatttccactttaaaattatccagagaaagtgggtggcccaaacaaacacgtggagattgatgaatcgaaatttggcaaaataaaattttggaggggtcatcgagtagagggcgtttgggtgttcggagggattgaaagagagaccgggcgtgtcttcatgttgaaaaaggtggaaatgggtccaaatattaaatgtggaaaattttaaacacagaaataaatgcggaaaccttagtgccattgatcaaaaaatggattttgcctggcactacaattatttctaactcttggctcgcatatcaaagtctttctatggaaggatttcagaccatgacttgttttgcactgtacaataattatttttagaatatattttttgagtcttaataattggattaccaatgctgttcagttcaaagtgatttattaatttattaaatgaatatattttgactaaaagtgtcattacatcataaaaataattataatttaaagaaaattttctttcggttaatttttacgtttttcaattttacattgattggtgaaataaaattattctattttaaaataagccttatgttcatttttaccgcggcataatttctaaatgcgttatttttaaaaaataaatattttaatttgttttctgtgatttttgattaattcaatttttaacaatttaataactctttattattaatgatttcaaaattctatgaatctctaaattccagatctggtattttttgctttttacatataaaattattttctttttttcttttgactgtccttatattttaaagttttgcgacacttttagaaatattatttgtttttattttccttttaattctttaataaaaaaagtaactcaataattatttaatcattctgctttataattatttatttttcgtttgtgtgtcaaaaaatatatattttaactgggcattttaaaattgtttctgcaaaatattttaaaagtttgttattattatttatgacatctttttcttacattttaacaaataatttaaaaaatgaatatttttcttgcaggtataatagtgattgtgcttgtggaataactttggtacaattaggtttatatttaaacaatattatagctcaaagcagatgattgctagtgtatatatatatatatatatatatatatatattttagattatttaaaagtttctatttcatctttttttcggaataatgtataaaaattaaatcatctaataaggtattgtattcttttattgctttaaatttaatggcaaggatttaagggtaatctttttttatcatgaaaagagggtactttaaattcaatgtactttaaactcttgcgttcaaaatgctctatcaaaccagatacattgtataagtactttatattttattataaaacatattgaataataataggtaggcagtattacataaaaaattatttcttttttataattttttacattttgtttaaaaagtggttgcaatttatggacttattttgaactaataaattagaaccctttaatttaaattcttgattatttttttaaaataatattttattttat

SEQ ID NO: 25086 - DNA, 1538 bp, Heterodera glycines
ctggtcatagatttgttgttgctgtttgttgtaatttgtgcgggtgctagacgccgccaagccgagagagttttttgtccatcaattttcaaatatgagaattgaggagcggtgtggggtaagattgtgtttacacaggatatgcatgtaggcgtataatattactacatatgtacaaataatgctcacgggtttagcactttcgcttcctaaaaacacattttttaagtgcaaattccgcatttgcataaaatgggacattttttgcgaaggaaattctttttttagacggaatcataattgatgaaaatgattacttatgtatatattcgacttactttagcaaaccacacaactttcatcaaccatttttgatttttgcagaggagtcagattttttatttttggaaatttgtcgagtaatatctatcaatcatcaccatcacctattcttgcctttttatttgcccaaatattgcataattagtggagcaattgtaaaattattttattaccaaactccaacaacactcagcaaaagtcattcaaatccgatgggacaacgtccgtcaatgcagcagagcgaagtcgcggtaagcaccggaaacgagacaaatgctaaattttttgtaatccgggatttagcgagtctataacggcaaaattaattaggtatctgtcaaaaataggattaaaaaatattttatgatttaaaatttttttttggcaatttcctttttctattggtacctcaaagtttaaatttgcttagaacataaaatggaggaaaccgtttttggcggttgttgtaaaattgccattcttttattttatagcggcgtcctcgtgccggttctgaacttggcagcagcgcacaaaccacgggcagcagcagtgcaacggcacacattcacaaccatcggagagcgaatggaacgcgcagcagacagccgcagaatgacacggtttaatttcacatttcttggtacatttgtgtacaaaattatagcgtttggctagaaaatttcaaatcgggttaagtacatatttgggcgctatttacaaagctttacattttgaaattttttttacttttttggtcaattttttttttttgtttattttgatgtagaacttaatattcattattatatgtaaataaacaaaaacaaaaaaaagtgaaaaaatttttaaaatgtaccgctttgtaaatagcgcccatgtttgtattaatatttaaacggttcgatgatgaccagacattttcagcacgtacaaattccaatttttaccaaatcctaaaaaaactaagaaatgcacaagtttgtgttatcatttaaaacaccacgaataaaagccattttccttaatttataatttttttttagagctcgccttcttccgcttcgtccgcgtccccggcgtccgcgcattcttcgcgttcattcaccgaagaggccgcagaaggggtcactggtggaggtgccgagaaaatggaccgcttcttcaatcaagaagggctttgggacggtcccaaa

SEQ ID NO: 25087 - DNA, 1458 bp, Heterodera glycines
gctgccggtgaggacgcgtctacagtatgtacaatggcgaaaagtactgtggatgggtaaaaaagttatttgtcctcacgcggcggatgccccagcggaggagaagcacaaattgtggacgaaatcgatcggcagctgaggagtaattaatcgtcaaattataggaaaaaacccgttttatggaaaataattaaaagaataatttttgcgggaaatttttatgagaaaatacttaatttaaaatgcgcaaattaccttattaagcctttatgaaaatgaagatcacttatgaggacgagtgtccgtacaatttgggcttcgcccgtgccatgttcgacttggccgctgctgctgctggccatgcgggcaccggcacagaatggcacaatttgaaaagtcaatttgagcaggaaagccaagcaatcaaagcaattggccagggattgaacattgaagttacggatgtgcattttggacacccaagcaaaggcaaaaaaataatgattttaaataaatatttattttgaaaatttaaaagatcattttcaaggaaattccgcgcaccaaaatgtgccgagtccgagccatgtgattaccaaccctggccaacaaagttcggttggccatggaaaggaagacgaaccgttgtcatccgatttcgacctttgagggcatagaaaaaaggaattaattagaaggaaaattcatagtacagaaaacattttgttgattatttatgaagaatatttatttgttttgaataattataatattaaaaattgtctagcataaatattcacaatatttttaattttcaataaaaaatatgacgagaaaaatctatttaagcaattttacccgtttttaatttaaaaccttttaatatttaaaatccgattttttcataaaattcgctaataataatagaattctccttttttataattcatttaaaaggatcaaaaaaattctttacattttcctataaatataagtatttcttttaccacgtatcatttaattcttatcaagataaattcgttaattttttattaaaatattttagacaattttttaaaaaaatgtttgccaaatttatgttatttttattctgctatataattggcaaaaaattttcattatgcgaacaaattttgtcgccagcaatacaagattattcggaatgcggagtttcgaattttgacccattcaacgaacgaagcgcggaggacacggaaattagtcatgcaattaagcggggaatcaattatcattagatattgaaataatgaatgcatattttaatttaatatttaattgtttgttaattaggtcgtaataggacacccgttgatgatgaccgggcattgccatggatggccacattgcaaatcctcaatggtctttttaataaaagcataaataattaggagaaataaaaaatccaaaattaaataa

SEQ ID NO: 25088 - DNA, 1856 bp, Heterodera glycines
ggcaaagatcaaaggtccacgggagggaagccacacagaagggaaattacgtaattatgggggggggggtgggaatgatggggacatcagcagaagaagaaagtgtctttatgggatggcattgggatggaagagtggtcatggcacagcgcgcagagagagagagagagagagagagtgccaacagcgcagcatcgacccgcaatatttgcccgtttctgtcccccatagatttccattgcccgtacagttagttctcttcccccttccctgacatactgtataaaatgttacaataaggggtaccatggtccattaaaattgctttaccattgcaagggatcgtttattactgtataaacaccgtaatgagtgaattataattgactcttctgaaaaaactcaacaacatttaatttaattactttggttaattaccgatcattttcaataccgtattctcggctttaaatacgcttttacattacggaacacttaacactgatagaacaacatatatactttttcctataaatgcgttttccctcatccattaacgctaatttcccaaaattaaataaatgagccagctacagaaattttaggtatcacttattattactcacaatttccatcctttcaatgcgttgccaattcttccaccatttcttcagaatctcgtgcgaccgcttcagcccatcttggcacggctgtgccgcaccttcgcctccgccaatggcacttctgctgccccaatttcgctggtcggcatcaaagcaaattgtggcttcaccgccatccttttggccgtacaccaaacggaggccagcagagaggaggaactgcagctgatgaggccacacctggacatgttggccaaccttttgagcatttttgtcagttttttaaatttttggggaggggcgggggtaaatgaggtcaatcagaaattctgatcagatccgatcatctttgtctttttcatccaaatccgtttgggatgcttaaaagcgatttttcagcacaacattgaggagcagcgacggcttgctcaccaaatgcaattgttcctttgcatgactcagaatgtgttctccagtcttcgtaagtctcgggacaaaagggcggcaaatggaggacaaaggccaattttgaaagcttttcttgggctggcattaaattagcgcctttttcaattttttgcctctctctttttctccgtttttctctctctctctcttttccttcaatcttacactatctttctccgtttctctttctctctcttcctcaattttccgtgaaattaattagtgatcacattctttctctctttgatcacgttctttgttcttgcactctgatcactcaaattattccgtcgtcttttttgatcatttttttctatcggaagggcggcaacaaaagtggcccccaaatttgtgaatttgtaaaataaataatccagttactattatttagaggacatgaatcaattggtgcgcaacatcaccaaagaggccaaggcattggtccatgccgaaatgtgagggggggggggaatggggaaatgccgcggggggaataaatgatggaaaaatggaagacggtaatttatgattctcgtttgatgaaaatttcccaaaatcttacaattataatattatattaatacataatattggtataattccaatgcttccaatcattgtttttccttttgcttttccttcaaaattttgtccatacaaatccttctgtctgattgatccttaaactcatcttttagttgttcactttttctgttggacaaagaacactccgagttggtcagttgattgattaattatttaatt

SEQ ID NO: 25089 - DNA, 1205 bp, Heterodera glycines
gtaatactgtgctttgtcccccccccccttttcgaaaattttttatgatttcaaaagtctaaaacattttcccaatggttttcggggtcattgatcatgcatccggcacccatttcgactaattcggaatcccggcttcgaattcgacaaaaagtcgaaaattcaaaattttcgaatttcctctttttagtctaaaaatttccaaaaaattgcgttaagttgaaaaaaaaaactttttttgaattattctggtctaacttttttgaaccttaacgaaatttttcagaattcggcaggattaatgtaaaatccgcccatttcagattatgaaatatgcaaaatgaagcagtgttattaaatggctctgataaaggaggagcctcatttgaatttgatgacggatcagcgtcatcggacacaactgatgccattgatgatgaatttgttgtccccaattcgaccgatgaaagtgatgaaacttgtgacaccttttccgaatttaacgaagcgcacacttcgtcaagaaaacaaaagaaaggaaaagccaaaagaagggaaaaacggtcaaaggcgttaaggacgacggggaagaggcttattatatgcaacggattaggtaatgaataataccaaagaagcacttggccaatcccaatttcagagagcatcgttcactccaagaattggccaaattgaagggcgaaccttttgatgacccaaatgacttccaaacactgtgcaatgactgcccatttcaaattccatttggaacagactttacaggttataaaagaatgatcgattgtactagtttaaatttggagtcatttgtttgatttttttgttgtttaaaacaaacgatttttataggtaccaaaaaacaagcgttcgatggctctacgaattgcattttcaatacgtcggagggtaatggatgagcaaattacgtttgccttcccattggcacttttcagcgttttggccgatttcaatcactttccatctggggatagttttgattttatggtaaaattagtctgtgttttcggctaatttcttttttctcctccccctaaaaaaagtctcccattttgactccttttgcgagttttcttacaataacacttttacagattcttttctgtgacattacaagtgaacagcgtcaactctagcttcagtacatcgagtccaaggcctgtgat

SEQ ID NO: 25090 - DNA, 1039 bp, Heterodera glycines
  unsure (1)..(1039): unsure at all n locations
cagtatacnttttaaacacaatggctgctgaataatnaggctcattattggctttttcacttcccattgcttttcattttatagctttgagcggcgaatgtaatttatagggcttccacttgctttttaggtaacaaaatataaaataaaaaaaattaatctaaaaattaaattttttatattacaattgtaataaaactattaaatattttaaagttatttttaataggacaacttttaaatgaaaacattgccaagaaaaaataaataaagttttggagaaaattttttgagaaagtttttcatttcttaggggataaatttgttgaaattttctcggtcattctcaggtaaatttttcatttttatactttttttgttaaattttttccgaaaagaaaaaggccccaaaaattgcgaaataggcacaaaaaaaagaatgaataattcgaaaattttccttttattttcaaataaataaaaaatgtcagtttttgattccctccaaaatattttttagagtttcaaattatgctttgataaaccatgatcatgaatctcctggattactgtagctccattgtatcccattcttccccatttcaatacagtatgcaacagtaacgcctttattccgggaaagaaaatcacacaattcttaggctttctctacccgataggtctcgggaacagatactgcccggggggagaggcccgatgtgatcatattatcatccatcatgttcaatcataactgatcaattagtgttgtagtaaattggttttccaatttttcagagttgacgatccaatttccaatttcctggcaattattttgtcagtcacttttgggtttgcttcttttatttcaaaatattgcttcatctttttcagtttgtcatcattggtatggtgttcttaaacaaaaattacaaattaatttcactaaaattatattctttcttttacttttaatgaaatttggcattaattcttttttccattttaaaaatgtttcttgagaaatgcccaattcctt

SEQ ID NO: 25091 - DNA, 1079 bp, Heterodera glycines
  unsure (1)..(1079): unsure at all n locations
aaatcgattttttcaagtgtccgttntggggtactcaaacaattatgggggagcaaaaatccaacgcagaattaaagtacaggctatagggaagctattcccgaaggattcggtctccccataaatctgggcgcatcggttcggggggactgccccgaaaacaaaaaaatcgattttttcaagtgtccgtttggggtactcaaacaattatggggagcaaaaatccaacgcagaattaaagtacaggctatagggaagctattcccgaaggattcggtctccccataaatctgggcgcatcggttcggggggactgccccgaaaacaaaaaaatcgattttttcaagtgtccgtttggggtactcaaacaattatggggagcaaaaatccaacgcagaattaaagtacaggctatagggaagctattccggaaggattcggtctccccataaatctgggcgcatcggttcggggggactgccccgaaaacaaaaaaatcgattttttcaagtgtccgtttggggtactcaaacaattatggggagcaaaaatccaacgcagaattaaagtacaggctatagggaagctattccggaaggattcggtctccccataaatctgggcgcatcggctcggggggactgcccccaaaacaaaaaaaacgatttttttcagtgtccgtttggggtactcaaacaattatggggaggaaaaatccaacgcaaaataaagtacaggttatagggaagctattccggaaggattcgggcttccccataaatctgggcggcatcggctcggggggactgcccccgaaaaaaaaaaattgatttttttcaggggccgtttgggggactcaaacaattatggggaggaaaaaccaaccccgaaataaaggaaagggtatagggaagtttttcccgaaagatttgtctccccctaaatctgggggattcggttcggggggattgccccaaaaaaaaaaaaaaaatgaatttttttaaggggtccggtttgggggactccaaaaaattatgggggaggaaaaaatccaacccaaaaattaaaagaaaagggtt

SEQ ID NO: 25092 - DNA, 1898 bp, Heterodera glycines
tttccctgaaattgagagggattttaaaggaaaatttaataataaaattattaatggcctaattgtaagtaccgcgttaatctgctggatacacatgtccgcatcacacctaaacaccgaatttaaacaagattagcaattttaccttcaccatgaaggatgtttggaaaatttcttgcgccatgcttttgagaaatcggccgggtcatttttgccaaccaaatgtttgtctaacaactgaaaatgcaaaattaaaacagaattttaatttgaaggctctaagaatttgtctaatttccgagcttcgaccactaccacctcggaacactaacattcaaatgacagcaatgagaagaaagggccgaatgatagttttggtcaaaggtctccaaactccacacactaaggtccgtccgtttcattttcctcatgccttccatctcatgactttggcacgacctctttgtccctttgctcatccgcctttcttcaacatttttttgccgttgttcggattgaacgaaaagaatttggcattcgtttgcctccgcaaaagtaatgggttcatggcactcagaaccacagttggaaacaaatcgtcggaaataggcgtgggaatttattttgtgggttggatttggcgaaaatgccaaagaattatgcacgtaaatggaaaagcaaatttaaaaataaattttgaaaatagaattggacaacaaattaaaaaacggatttttgggatgccaaattttggcaattcaatcaatccaaagcatttgtagaattttgctattattagtcactacgtttgcgctttcctttagtcccttattttaacattttgtgtattattttggtgcttatttccaagaataagtaatggtctgagcagttttttttagaaaaacaatattttaaatcggtaacggtgataagtaaaattaaagcccggactcttctgtaagttggtaatttgctcattttcccaaatcacctttttgaaattggcgctgtttttgcgccttcggcagtccgttggcgttccgtttccctccaatgaatggaccttcatcatccctttcctttttctctctctctctggtgtgaatctgaaaaatgtaacatattattgggctgacaattttggagaatggattagtgagtcaatcggaaggcggaaacaattcctgacgccttttgtttggttgggcaaataaataagggcataaaatggggtggcggggggaggtcaagcgaataaattggggaaaagccgattttgggaattgggcggcgaatttgcaagaaaaagcaacagcaaagagaacttacagcagcaaaaggtactcaaaattggccactaattataaggaaaagttgcgcaaattgcttcagacggattcacttcacagaaaataattcagagaaaggggcgacccatcggacgaccatttccaaatttgaagcttcaaatggtgcgcagcgcaaatatcccacttttctgtgcttcacagcttccgcattgaatgaatttgctgttggattttgttgctgctatggaaaaatgggcagaagcattgatttttttgattttttcattttggtggatttctttttttctgatcgattatcaaaaatatttgcattttttgggtctctaaaaatgtttaaatgaattgttttgtttctgtttttgcttatgcgtctttcttttaccaaatgggtttaccattgctcttctcgatgttcgccaacaattcttttgctttccgctgggaatgctttttattttttgcaaggataggcggctcaaacatcggatgcatgggttttggaggtttttgtgaagaatcagcagcaatggagctgattgtgaggggagggggggggggaggagg

SEQ ID NO: 25093 - DNA, 914 bp, Heterodera glycines
gttttgaccgggaaactcccgggttttttcccggttttcccagccagaaattcccgggttttcaacccgaaaagtcccggtcccggtttagctcaaaaaattttttactttttgtaatttttgctaaattttaataaaattatgataattggaggggatgtaaagctatcgctcaataccaagattgattaattctaccaagttttgagctaaattatgatatattatttggcaaataaaattaaaattaaatttaaatatttcaatcattgatactttttgtaacttcgcccaaattgatatttttgaaatttcggctcacaacgattcttgtttgtgttacactatctgtattcatttttctcttgggtgtgatgccagaaggaacggagtgtgtgagaaagtgggataaaggacctgaaagaaccgctaaaaggggcgcctgtagctcagttggttggagcacggcacgggttactggggtcgtgggttcgagtcccaccgggcgagttaccttttattttctacatgggttcttttccgtttgacaactcactagttttttaactttttgcaataaatactatgcaataaaagttttcgaaacaaaaaaaaaatttcaattataattcagtgtcatggaatgcagacattacatataaattaaaatattaattttgattttatccaaaaattctaaaaaaattataattgttgtggcaaaatttgttagcatcataaaaataaaactttatacatgtaagtaatatactctcacaagtttacttaatcaagaaatattttcaaccgaaaaatttttctaatatttatgttatgaaaaaaaatgctaatggtgcagtaatttcacttaaaagttgacgaacaccgacccgaccgatttggtccaccctaac

SEQ ID NO: 25094 - DNA, 473 bp, Heterodera glycines
agaaaaatgggaagaaaaaaaaagaaacgaacaacaggagaaaagagaaataattggaaaatttaataagataaaagagaaaattaagcaaaaagaaataaaatattcgaaaagagaatggggaaaaattgaaagaaaaatagcgaaaaaattggacacaaatcgccgatatatttatgaatggatcaaagaattgggattaaatcaaaagaattgctacaaaacgattagtgatgagcaaaaatttgaaattattcaaaaattcattaaaatgacaaatgaatataagtaaaaaggaagaaaatattcgaataaacaatggcaacaaaattatgccgaaatttgtaagaaaatcggagttaaaccattcaataattagttaaaatggaggaaacaatttggaatgaggaaatttttaacggaagaagaaaaaattggaaaaatgaaaatttattggcaattaaaaaaagaaa

SEQ ID NO: 25095 - DNA, 2802 bp, Heterodera glycines
  unsure (1)..(2802): unsure at all n locations
caactgaaatttaattaantcgaaaactattgaaaagatactaattcgaatgaaggaatgttttgggtacaagaggacggtctcgcacccgaagttaatggtagagcgcgactcaattgctttcttcattccgtttttcagggttttggctcagcgacaaggcaggaaaaatgagagagttgaaaagcggaatgccacaacttgacccgtgctgttttccattgctgtatcctaaaggcactgcaggatggcgttggtttatgaagaaggcaggggtgcaggggcgttcggtatataagcaaccatttgttttgtacattttttagtcatttcatctgttaagtgtgccgccgttaagcctgctgaaatgcccgcaacaacaacttgcatcccaaatgacaatgctgacacggtcgaagaacggcaaattgacgaaagagagacccaatttgacctagagactgatatggacagtgagcaggggcgtcattcgaaagtgacgtatgaagttctttattttatgtgtaattttatctgtttttgttaagccaatgattgctccaattgacagtgttttggaacccgtttttggcgtccctccgaagaaacgagaacttggcgtgcggaagcccggacctttggaaaatatttccgagagacaattttaccgctaccgttttgcaatgcgagaaaacagcaggggcgcctttcattggctttggtttgcccgtcgtttggctgaatattttgtcaacgctgttcttaatcgaattgagcgcaatgagatggagcatatcaaggcaatccagcaacggaagaactaccgccaaactcttgctcgagattacatcaaagccattgagcaaggactccagcagcaggggcgcaatgccaaattaggcaatacgtgtaggatccactgtattttgtaaatacttaggaattttaaaaagacacccaataagtaaaagtggtgtttataaattcggttttattcttaaagattaatgaagcaatatctgatgataatgtttcatcatccttacgaattaatgaagtattatcttgccattaaataagagcacatattaaatcattgatttaataataatacaccctatcattttcaataattataatgcttgatgacattaataaaaaatcaataaaacaaaaaaattaccaaaaaataaaacaaaacagagaaaagatttataggaaaataaaacaacgttgtcagagatgaattaaaaaatataaattggttggtttaaaaatatctctttttaaaaaacgttgaggtaaaaaagattctgaaggttctagaacaacatctttaattaagagttgaagaggatattggttatatttaaaatctcttaaaaaacttatgatattctttttttaaaatataaaaaaatattaaaagaaagaataattgttagaatttataaaagaaacaatggatataacaccgaattatctaaatatgtttttgaattagacccttttaattatgaaaaatcattaaaagaggtatgagaccagatatctgaaaatttaattcctggtgtaagtggtgggctacaaatagatatagatggtgaagatattcttagaaaatacaaaattattgagtaaaaataaattaaattatataagctaattaatgaatcctcaaaattttcaaaaaccaaaatcaatttttttaaattttatttgaaaaaattttatgtaaaaattcgcaaattcccattacgaattaaacatacttttagtatctttcatcggtttaatagtgctcaatcagcatgtaaaaaattgaattaggcttggatcaaacgagaaaaaaaattcancaggcatactcnccgttacaggactaacttaacctgaaaacatttcaacgcttattagtnttatttaaaatttttttttaaatttttagttttccattatctttttattgcaaaattaatgcttaaatattttntaagaaaggtgctctgaaatacaccaaactttgcagcgtaacagctgagaacaatgcttatttataattaattttccagcccatatggtttcattacaaaattttttggattttcaaattttctatttttttgctttttttaaatcagtgaataaaattgtttgccgccaaagatgatcaaagtttcgaaaaatttataaaatgacaaaattttaaaaatataaaatatatgataaactcattaaactttttaaaatgaacagcaaccaattctctattaaatagaatcataaagataaattaaaataactgaaatatgttaggtggaataacattttgaaaaaaattcaaaaaaattcatcatctgtcgaacggatccgaacccatgacaaatggtcattaaaaattaagaggataaattaattaaattaacaattcccacactccgcttccttcttctggcatcacactcgagctaacctgaatttgttaaaaaagaccgatttttaattgcctttttttactattttatcttttttttattctaaaatttttctttgcgaataaatcctgacaaaaatgtaaaaatattgattattaaatcaataccaattgagatttataaaaaatttattcctatgcctattgtttggcaattgattcacataaaaattataaatgcataattttcctatatattatattttattttaaaaaatataaaatgaaaattgtacaattctctatttttctatttattcttgtcatctttgacataattaaactatcggaacaaagaggagcaggta

SEQ ID NO: 25096 - DNA, 1093 bp, Heterodera glycines
agaaaataggcacttaactcgaaaagtagcttaacaacagcccaaaaaaacatgtttttcgtgcgtttcaggccacggggagctcaggaaaaaatagacttttgcctaaaaatattagccctatttgccaccgaaatgtttgtccactaaaacattgaaacgtggcgaaagaagtgccaatttgaggccgagttgaggacgacgaaaaagggggcaaaatgtccatccaaatgtcgttgcaaatccaactgaaatccggggaaaaaaataattgagcggtcttaaattcttaatttttaaccctaaaatttctcacattttcctcaaaatttgtttcagaatcgacccaaaaaatttcgaaaaaatacaccccaaaaaatcgacccttaaatcccaaaaatttcgaaatgacttcatttgtaactgcaatcaatgaataaaattgcttgccttaatttgaaattatcttcatataaaaaagattttatttaaaaaaattatacccttaaattttgaacttttttggccttatttacagccttattttcgactttttcgcccttcaaaatcatggacggacgttccataaaaaattttaaatttaactaatttactgaaaatttccccaaaatttacccactcgaaaatgtgcctattagttttgtctccgattatttacccaggcggcagatttatttcagctatttaatattctcggataggatccatcccgaagtgcatcaaattgtcactttaattgttttcccccgggcaaaattcgcaattaattaaacaactatttgacactaattagtttttacatccctcgcacaacaaacatatgttatctctataagcaactgaataacgcattctctccgtccatgtgaccatttaaaaaaatattttaccaatttatttactttgtttttcattttaattgaagcaaattaaacctaatcaagaaattaatggacttttcatttattgggtgttatccaaaaaagtatacatcataaattaactatgctttttatattcgattcagatttttttaatacgaatttccgccggtggtgccttttatcaccgc

SEQ ID NO: 25097 - DNA, 1037 bp, Heterodera glycines
atcggtttcggggggactggccccgaaaaacaaaaaaatctattttttcaagtgtccgtttgggggactcaaacatttatggggagcaaaaatccaccgcagaataaagttcagactataggaaagctatcccgaaaggattcggtctccccataaatctgggcgcatcggttcggggggactgccccagaaaacaaaaaaaatcgattttttcaagtgtccgtttggggtactcaaacaattatggggagcaaaaatccaacgcagaattaaagtacaggctatagggaagctattcccgaaggattcggtctccccataaatctgggcgcatcggttcggggggactgccccgaaaacaaaaaaatcgattttttcaagtgtccgtttggggtactcaaacaattatggggagcaaaaatccaacgcagaattaaagtacaggctatagggaagctattcccgaaggattcggtctccccataaatctgggcgcatcggttcggggggactgccccgaaaacaaaaaaatcgattttttcaagtgtccgtttggggtactcaaacaattatggggagcaaaaatccaacgcagaattaaagtacagactatagggaagctattcccgaaggattcggtctccccataaatctgggcgcatcggttcggggggactgccccgaaaacaaaaaaatcgattttttcaagtgtccgtttggggtactcaaacaattatggggagcaaaaatccaacgcagaattaaagtacaggctatagggaagctattccggaaggattcggtctccccataaatctgggcgcatcggttcggggggactgccccgaaaacaaaaaaatcgattttttcaagtgtccgtttggggtactcaaacaattatggggagcaaaaatccaacgcagaattaaagtacagactatagggaagctattcccgaaggattcggtctccccataaatctgggcgcatcggttcagggggactgccccgaaaacaaaaaaatcgattttttcaag

SEQ ID NO: 25098 - DNA, 1143 bp, Heterodera glycines
aaatgcatttgcatgcccacgaccaaacgcagcagctaaaccagcagaaagtgccggacagaccgtcgcttctgttttggggggaggagtcaccgtccgccggggccgacgccgtttcgtccgtcccttttcaccactccgatggcattttagccgcttctcttcccgaaacagcgaacgaagcgacacatttccacgttttcagtgccaaccaatgaccgaatcgtaaaacgaccaatttttcggtgttctttcctttggggcggaccaacaaaaagccacacattccatggcatttaggtgcttaaaagtgccaccttccccttttgccggtctctccccccatttcctctgattggtccctcatgtgattgatcgtctcctcaatttcacattgcctcaacatttccatgtgaatttccgattcattttcttagtcaggaagtttcacaatttctttttttggccacaactccgcgaccaacaaaaacctgtgaaatcgaaatttctttacgcactttgtctcacattgaactgcctcgaacccatttacttattttgatgactttattattttattgaaacagcagaaatgataaatttataaatataaatagccgtaaattgtatcaacaaattcgaccccccccccgcaaattcatttgcacgacaaatgcaagcagttcttctgttcagtggctatcattggcgaaaattctctcagtcttttgccacagcgcgcgcattgaaaattaatggtgtaaaggcgcgcaagtgagctgaaaaagagttgaaacactttgaagctgacgtttgggttgttcgccagaaatttggtcacctgaaaaacaaacaaaaataaaataataattgaagtgaaagttcggcactgaccacattgccaaacgcagtgaatttgtgataaagttcgtatctgctcggcacgctaagatcgacctgtaaaaatgaaaggaattcaaaaagtatgttttttcactttaatagtgccattgcgtgccctatttatctcttttttgtcattctttgcctgttttttggtgccaaaccgcggcatttggctgaagtgacattcctcgtggggcgccacaaaatgaacgtattcaatgagtccgttgttcacca

SEQ ID NO: 25099 - DNA, 2181 bp, Heterodera glycines
  unsure (1)..(2181): unsure at all n locations
aagcagagacctaaaaagaatctgaaaaaagcaatatttctatgttcgtaaantttgcgaattttggaaatagggaatttcgaatcaaattaaaatattttgagcatgatcctaaatttcaatagttggaagcatggtttgtaataccatattatggtattatttagaatgaatgatttttgtaaatttcccagcagatgaaagatctaaccattgtgccaatcccactgccatagtttaccttcttgcgtttggcgtttccgcttccaatcacaaagtgccttattcaagaccgatttttttgcctccgtttcttcaacttctccaagatattgaagagctcgatttctgtaaaattgtttgtcctcaatcgctttttcattgcttctttgagttgttgctgtttgatggcttcttcttgtgcttcttctttttgactcctttcttctttgagttgttttgcctggtgttaaatttggaaagtcttgaaaaaatttaattaattgtaagcttaattggtcaatattttggagcaccttagccctgacatcttttgaaaatccttccgcttttctttctgcatgaaattttgcttcattactgagcaaaaatttcttccgttttctttctacttataactttttcctcttcatagcactttttcacatttttcggagagatttcgctggaattcaaagatggcattttgtaatttagaagttttttttaatgaaaattaaataaatttactaaaaaaagaacagattggagcaattttttaataataaagattattatcgcaaactaattaatttgaattgaccaaaaaatggttcgcatataataaaagagaaacattgatttgggaaaggaaaatgaagaaattcatttcatttgggtgttgtcataattaaatgacgaggattatgtgcctgtgtcattcaccgatggcaaattatcattcaaatttttcaaaaaaatgatttcttgctcaaatatgcaattattgctttaaataatttttaatttcattatattatttgaactttgtatcttttcattgtcagatgaaaatgtgcgcactttcaagggttaggcatttaagtcatgagcttaccacaaagttgaaatgattttgtaaatgtcaaaatgtaaaactttgcaaaaaaataaaacaacgatctgcttaaaattcaaaatttttcaatcacttataaattttttgaaaatatccatttttaaagcatgaaaaatcaaatcatggcagtgccgagggaattttcaacttgtaaaaaggtgcgattttatgaaatttatatgagattttgcagactgattgtcattgtattaacgtatttttcaagtcattctgactactaaaaacaatttaaaaaatcaatttttcataatatgatttaaattcccaaccctgccggtcgcgacattggtttttgttgcaactcgggttaggaactcggaattggttttctaatggatgattagtgcacccgaaacacaccggaattgcaaaccaaaaggacgaccccacctaatttatttttttcatgattttcaaaaaaaaatttgaaatgaataggaaacaaattttgtaaagggcatacattattacggagacccattatttctaagaagggaaaacttttcaaaaaatcaattaatgtgggtgaatttattaataaaaaattagagaccgggcaagagggtcggtcgaacggtttcggttaaaaaccgaaaccgaaaaaaaccgaaaaactcaaaaaattctcggtcgaacggtttcggttaaaaaaccgaaaaaaaccgaaccgaaaaaaaccgaagaaaaattttcggtataccgtttcggtttcggtttttttttgaatttttatattttttccaaaaaaagcaataaaacatttttattaacagaaaaagctaaagatcacctctgaactaaattgtaaagctattgaagctctattgaatggtgtactaaagtttggaaaatgatagaaaaggcagtcaaaaaacatgtgtttgctccttgattctaaaaaaaccacaaagatttagcgatttggtgccctttttgacgttttttttccgaaaaattccaaaattcaaaaaaatcggaaaaatacacccctaagaaatgatctaaaaaaattcagagaatat

SEQ ID NO: 25100 - DNA, 2290 bp, Heterodera glycines
  unsure (1)..(2290): unsure at all n locations
tcctccgctgtcgcatgagtctgatgagtttgttcatgaacatcggcgcagttcaagttagccgtttcttttttaaagcttgttaccattaaactgtttctagggcctaattgccatgccaattcctcccagggaaaatgcgccgcagaatcagcaccatccatagccacgaactgagccaatttcggacttgcccattgaattggtggccttaaactctcaaaatttgatttgtccttgtagcttattcacaagctcatccactgaatataccttcttggttcgggtgccaataaatttccgctagttcgaatatatttgttaaattacatcgtcctttaatattggtgaacatgctctcatttatcagctcatctggaaattttttgaaactgctgagtaaaccgaaattattcgttcatttatgctcgttatgtgaaatcgcaaatgacacgtcaggggagccgggggcaatactttagatggtgggccctcttttttgaaaaaatttctttttgttctaaaaagtcgcaaacatgtttatgtgggttttcagggtcggagaacccgaatacaacattcattttgaccaatttcgaatccctgacccgaattcgaacaaaaagtcgaacaaaattttcaattcaaagttctcactctggtttctaattgatcaaaataagctaaatttaatcaaaaagcattgcaacatcataaaatggtcaatatgtatagatacgaacataacaatgaattttgaattttctactttttgttcaaatgggattcgaaattggtcaaagaatgctggattcgagttccccgacccaggaaacccaaatatacatttcacgactttttagaacaaaaattttttgcaaaaaatggggtccaccatctatagtattaccgagttctataataaattgaattcgggtccgggattagaaggtcgaaatggttattatattcgtgatcagcgaccccgaaaatcacatttcgtcaaattgtcgagcaatttttaatgaaaacaaatggccgaataactatcaattcttctaatttttttaaaacaagattgacgggaagcgtttgatttagtcggaacagaacgaaaacgaatcaatcattcattccgttcgcatttttcgccctttcccatttcatcagtttgtaatttcttttattcgtcaaaagtaattttaatcattttgttgtccaaaaactctatatttaaattcacaattattatttttaaatttaaataaaaattaataatttattcattgtccttcgtttatttgcttttgtttcagttgggttgattaaatttaaatatcattagcactcaattaatctccaatggcttgctgtggtggcaaatggttgttctgttgttgctgtcacgtgacaaaggcaaaaatcccttttcaatttctttatgacgaagacaatntaaaattaattatttataaatttaattattttctccaaatatgtattaattaggctgcgcatattatggcatggctctctttgctttgggctctttttgccggcactttgtcttttgtctttgtgccattattcagcacgttttctttggtggtatgtttttttcattgtttatacttttttattattttcatattccaaattttttagtccgtttttctcgctttggtcaccaatttgccaataattgtgttcgatttgcttgggaaacggtcccatcgcatttatttgccattccttctgattaatgtgggacttcgaattaattaaaaataacaattaatttcacttccttcagggcatttgtattcttttcggtctttcgcacattgtttatctcattttgcactcagttttcatgtttaaagtgcctcacttctttgagagtaaaatatttacttttaaaattaatcaaatttaaaagtaaaatgcaaatggttcttttttattcggcattcatttaagtgcaccaaaaaaatgaaattagagttaaagctgaggctattcaaaaattgactaatgccaatttttggagcggagggaggggaaggaaatgcaaggtttgacgaagtacgagaaagtgcaagtgatcaaattaaagcataataattctttaaaaattaaaagcaaaacaattattttaattaaatttaataatttattatatttggaatttatataattaattaaaaataatgaagcttcagcccactacgcgtataattaatataaaattttacttagttcgcgaantattttaaantagtgacctgca

SEQ ID NO: 25101 - DNA, 1185 bp, Heterodera glycines
attaccctaagagctgctgaaatgtgaaattaattctcagaaaaatggttatctctttttaggacaattttctatctcgtaaccccgatgctaatccgttccggagagcctcttcaaaattttttccattaccctaagagctgctgaaattgtgaattaattctcagaaaaatggctatctctttttaggacaattttctatctcgtaaccccgatgctaatccgttcctgagagcctcttcaaaattttttccattaccgtaagagctgcggaaattgtgaattaattctcagaaaaatggttatctctttttaggacaattttctatctcgtaaccccgatgctaatccgttccggagagcctcttcaaaattttttccattaccctaagagctgcagaaattgtgaattaattctcagaaaaatggctatctctttttaagacaattttctatctcgtaaccccgatgctaaatggttatctctttttaggacaattttctatctcgtaaccccgatgctaatccgttccggagagcctcttcaaaattttttccattaccctaagagctgcggaaattgtgaattaattctcagaaaaatggctatctctttttaagacaattttctatctcgtaaccccgatgctaaatggttatctctttttaggacaattttctatctcgtaaccccgatgctaattcgttccggagagcctcttcaaaattttttccattaccctaagagctgcggaaattgtgaattaattctcagaaaaatggctatctctttttaagacaattttctatctcgtaaccccgatgctaatctgttccggagagcctcttcaaaattttttccattaccctaagagctgcgaaattgtgaattaattctcagaaaaatggttatctctttttaggacaattttctatctcgtaaccccgatgctaatccgttcctgagagcctcttcaaaattttttccattaccgtaagagctgcggaaattgtgaattaattctcagaaaaatggctatctctttttaagacaattttctatctcgtaaccccgatgctaaatggttatctctttttaagacaattttctatctcgtaaccccgatgctaatctgttccggagagcctcttcaaaattttttccattaccctaagagctgcgaa

SEQ ID NO: 25102 - DNA, 427 bp, Heterodera glycines
cttcatattgttttaaaagtaaagggcataattatagtaggacagtcggtaattagccacaaggttattttgataaaaatttccaatttttatattttaatttatgtttttattatgtaatttttcaacaaaaaagagtagaaatcaaatccaattttttttaaaaaagctcatctcctaaatttattttcttcccaaaaaatttagatttcgaaaattattttcaaaactgaattcattttattcaggatcaggaataaggaattgaacatggacaggattttgtgcgtaattttgtccaaattagctggtgccaaattgtgcgtaggccaatagggacgaagcgaccaatgaacaaaattaattagcatttgcattaaattaaaactttggtgtcattatggatgaaatttttgccaaattgctg

SEQ ID NO: 25103 - DNA, 1841 bp, Heterodera glycines
ccttaaagaaaaatttccttttttttggggaaggaagggaagggaagtattagaaattttccaaggtcattaaccgcatttttttaattgggatttttgatgggaaaagtttgggttaatttaattatgcaattcccttcgtccggaagttcagggatcgatttctccgacaagtcgatgacctccaaccgcaccagtcgcgtcacgacggagggaaatgtgctgaatttgttgttggacgcgttcatttgggtcagcgaattgcacgcggccaatgggtcgggcagttcagtgagctgattgccttcaattttaggaaaattaagtcgggaaaaaataaaaaaattagttttgtaattcttattgttagaaatttactcaattggaaacaaaaaaaaaaaaggcaaaccagaaacatcgagcaattccaatgtcttcaaacagccaatttcgtcgggcaaattggtcagacggttgttggcgatgtacaactgtttgagcatggtgaaagtgccgatagtcgaaggcaattcgcgcaatttgttcgacgacagctccaaaattctgagcaaagaatggacctgaaatttgaaaatttggaccttatttttcatgaaccccaaattatcgaccattttaagtaaaaaatgaattaattacctcctcgacaattcccgacggcactcttttgatgccggcccctttcagttgcaaacttcgacttttcttcgactgttccaaaaggcgtcgtaaggcactcgacgagagatcatttgagccgaattttagcgcggacggcagcgctttttgaaggcgagtcgccggactatccttttttgaggaagacgaagatgacggatgaccctttgagcgatttgagtgttcattgcccataatcagcagacaacaagaacgaaaataaaggaccaataaatggattaaatatctgaaaaatgaaaaatcggacccttttgttgtcagggcaggattgggttcaggaagttttttatcgattaaggtttaaaaaaagataaaaaatgatatgaaaaaaaagtaaaataacgacagatttaaaagattatattgaaaagaaagaatctgtaatcaaaaattttgacggcagccaccaaatgtctttaaaaacattttggtacaaaaataaaaattatcttgaaatttataattattttctcatttcgcacaatcagaaaagtctgcggcgtgtcgcagtaaaacgctgttcgtacgcgtcgtagccgggaagtgcctaaaaagcacgcgatttgatgagcaaatgaatgacaaaacaattttaaaatatttagccaaccatacatgtgcaaggggtgtctcaggccaagggccgtacgattgagccaggcggtgtctcgggaccgatttttcatacgaaggtccaaaattttctcagacgacgacattttttttttgttgctattcataccaaatttttctggcgatctttttttgtattcaggcaccttttttttgcggcgcgttttttccaaaaaacttttggggaagggggtggcgggcggtccggcggtgccgataggctttgcatggatttcgctaacaagggaaccacccgaactgtaagtcggaaagtgcataggtatgtgtgatataccattcgatagagcagggtcgccttctattggaaatttttaatattacgcccccataggagggaatcaaaaagttatgaggcctcaaaaacgaaattttaggcctaagggccgatttcaagctttttttactttctattaattcccaatcttgatactagtatttattatcatttttgcttatttttactaaag

SEQ ID NO: 25104 - DNA, 1402 bp, Heterodera glycines
  unsure (1)..(1402): unsure at all n locations
cgaaaattttttattttggtgtaaaattgtttaaaaattttaacaaaatttccgaaatttgcaggagtagtctttcagagccgcntaagccaaaatcctccaaaatctttttcaatccaaaaaatttgtctaaaaaattgatcagaatggcacaaataaaatatcagaaataaaaataggaactttgagataccttttttcccatttttgttatcttacaaatataattgtcacactgtccaaacttttaacggcactttgaaaaatatttttcttttatttaaaaaatattaaaaattttaattccaccggatttgtttcaagaaaaatcaaatttttcacttacataccctaacttttttgtttttcaagaaattgagcaaatttgttttcaatacgatctatgtgactgcattatgcccttgcgacgtttcgcaaaaccaaaacttggtccatttttggatgattttgccggcctttggctgttggcggcggacatttggcgccaaatcccaaccaaaggattataatggaaaaataattagtctgagctatattaaccaatgccaattcatcgaacccagcaccatcttcctgcttgcataagacaaaaaaagcgacttaatgagccaaggcctaatgatcacaacacgtcgcctctttccaaagacagccaaaaattgcaattaatttgactaattaatattcataacgattgattggcagcagtttggatgacttaaatcacatctcttttctaaccaaaaagccataaaataattaaaagaccttgatattcatagctgaaaagaacttaagagagaaatttcttcattcatgcaaaaaataataaaatcattgagtttgagtaagtctgaaaagcttaaagtttacggtagtacagtcatggtcaaaagtgttgtcccatccttccttgaaagatattataggaaataaaattgtaattttttgttttcaaaaaaaattcctggggggttggtaaaagttttttacaaaaaattattatgtcgttcctaaagagcacaaaaatctacatatgcaagcaaattaaatattactaatgattaagaaatataagaaaattgattaaaaaacaaatatttcagagttttattaacaaaatttattaaaacaaaattcatattattcaatagcaaaaaataataaataatcgaatatcgaataagataaagaaataaaataataaatgatattttttgttttatgcaattaaaagatttatttaattattaatttattaacttaaaaaataattatgcttaataagtaataantgaaacatgttctgaagtttccctatatgaggaactttataatttcataanntataatataaataataatatataaataaattaaa

SEQ ID NO: 25105 - DNA, 1880 bp, Heterodera glycines
  unsure (1)..(1880): unsure at all n locations
gcggcactatttgatctgataaagaatgggacccccttaaaagcaggaaannnaancanccagggcccgacggaggcttatgcaggaggngangggagaaggngacncacnggngangngagacaaaaancgancaanaagcacagacacttctatttaaagtccgtttgtcatttctctttgttccaataaaataaaaatgtattcaaaaaaatttgcccaaattttgttctttctccgagtttctcttcccgttgtttcatcaacattgcgacaacaacaacaacaacaaccggaaaatacctactctgcttacctaaaaaatttgactttgtctcgacaacaatatgaaccacactattcatactctgaatatttaaggagactgtctttattcaaacgtaccaccaacaccattctcagtacaacaactgtcccattaacaactacctcgaacataaacacccatccaaaaagcgacaagttaattgatgagcatgtttctgctgttcttccaccgcttatccaaatgtgtaaggagcagcctgaggaaagcagcatttttcatcaagctatttgctgggccatcttcactctctatttaatgcttatcatcagtcttgtgctacaccaactctgttcaattttttggttgaagaatggacagcgtgcaaataacaaagattttgaacgaaaattgtcggacagagcgagcatttcggggctgctacgccagtgaccaattgccgcctccctctacactacagtaccccgcagcgctcgttgtgaaccgggacccccaccataagaagggctctcattggtgcgctatttatgcaaagggattggatgcaccagtgttctattttgacagccttgctcagccaatcccagccgctgttacgtcaacttttttgtgcaaattcccggagggactgaggaagaattcttacccctaccaatcctctttactgtctacttgtggtgcccattgcattgttttcatttaccatatgtccgtgggatattcatttgagcaatttctcactacacttagcaattgtacaagtcctgatatgtacacattagttgtatttaacaaaatattaaataaataaaaatgttttataacttgaaattgtttattcaattacgaaaaaaaacttattcgattgaaaaattaaaatagtaggaaccagggtgttgagttgtttcaataatcatcaaataaccaacatctcctttgtgatgcggattcatcaatcggtaaagttccatcccatcggcgcggaccagttgaccaaggccatgtgacgccatttctgttaccgggaattggagaagccgcggaaaatgctgccgcatcaaataaccgcctgcagtccgcttcttcatggtcagcgggtttgcgcttcccaagacataaatcagaattgcgccgaacagctctccaattttaattggctaaatattaataatatttcttatatttgtttgttttcttaccatggaataagtcacgactctcgtcgtagcggtggggccagatcgtccaaaagatagatacgccaaaaagtcggcgaaatatttggcgtcttccagttcatcttcgaacccgaactggatgaacccgaactggatgaacaattcgccacacggtaacttccttagtgcgcagagcctctcgaaatttcgagcaagattgatctaaaaattcagatttattataattttaaatattaccaactatatttaagaagtaaagatgccgcttggcccgaaaaatttcgaacatttggaagataaccactattccagacggtggacgagtagtacctagggggatttcaaattaaaaaatatttaaaaaaaatacctgg

SEQ ID NO: 25106 - DNA, 1060 bp, Heterodera glycines
  unsure (1)..(1060): unsure at all n locations
gtccatcactaagcactagggaatagttggacaggacgcagccacgccttggtttttattcttacggacaccactcgtatagtccaccactaagcactagggaatagttggacaggacgcagccacgccttggcttttattcttacggacaccactcgctagtccatcactaagcactagggaatagttggacatgacgcagccacgccttggcttttattcttacggacaccactcgctagtccatcactaagcactagggaatagttggacaggacgcagccacgccttggcttttattcttacggacaccactcgctagtccatcactaagcactagggaatagttggacaggacgcagccacgccttggcttttattcttacggacaccactcgctagtccatcactaagcactagggaatagttggacaggacgcagccacgccttggcttttattcttacggacaccactcgctagtccatcactaagcactagggaatagttggacaggacgcagccacgccttggcttttattcttacggacaccactcgctagtccatcactaagcactagggaatagttggacaggacgcagccacgccttggcttttattcttacggacaccactcgctagtccatcactaagcactagggaatagttggacaggacgcagccacgccttggcttttattcttacggacaccactcgctagtccatcactaagcactagggaatagttggacaggacgcagccacgccttggcttttattcttacggacaccactcgctagtccatcactaagcactagggaatagttggacaggacgcagccacgccttggcttttattcttacggacaccactcgctagtccatcactaagcactagggaatagttggacatgacgcagccacgccttggcttttattcttacggacaccactcgctagtccatcactaagcactagggaatagttggacatgacgcagccacgccttggctttatttctacggacaccactcgctagntcatcactaagcactagg

SEQ ID NO: 25107 - DNA, 2278 bp, Heterodera glycines
tcaaaaagcaaaagcaccaaccttagcattactttttgtcatgcaatataaacaataaataaatataattatttacaaaatttagggatcaaattcaacacggaaaaggtccaacacattctgaagaatcccggcgtggtccatgccatcgttgagaaggttggttttttataaaccactaaccatgaaatttgaggctgtattctttcacaattccgcgagttttttcacataaattttcataaaaatcatttaaattgacacaaattgtaaattttccgattattttttattgacaattttattaatcaaaaattttacagtccgctgtcaagggcactgacactgtgctcgaggttggcccaggcaccggcaatttgtccatgaaattgttggaccgtgccggccgtctgattgcctacgaattggaccctaaaatggtggcagagctgcagaaacgtgtggtcggaacgtatgcatagatttttaaatataaattattatttttttttttgcacattcatgctgactgaccattggcttggtaaatcaataggtttttggcctaaaaaggactccgaatttgggggacgggacaaaatttcgctgcaaaatcagcgatttttctcaaaattcatatgaattagtaagtttttcgaaaaattttccaaaaaatcgctaaaaaattttcaaaaaatttttcgttggaatttttatacaagaaaaaaaattttgaaatttgaaaattaaaaaacaaagtttctttggcgaaattatgtcccggcgaaattttggggtgcaccccgaatttgatgagttttttgggcggctacttaaactgaaagactaaattggtgccaattaaaggcgcgaaatttcagtttcgaaaaatctccggatttttgagtttgattttcgagtttaggtgtcgttgatgccaagtgtttatcttgagaaatcaagaaaaatgatttaagattaatatttttgcttttttaaagacccgtccaatacaaattgcgtatcattgctggcgatgtgatcaaagcagccgagtggcctccgtttgatgtgtgcgtctccaatttgccctaccaaatttcatcaccgtttatttttcgactattgctccaacggccattgcccaggtgtgtttaaaatttgaacaattttttttaattcaataattcttaaaaaaatttccacggcacgtatattatattggcacccggatcaagtcatccctcctcctcctcctccgtcgtgttgaaaaaaattgtccatttacattgcacaactttttcgcaaaaacttcgtttcacctttgacaaaaaaatcacataccccccccccccccccgctccatcgtcattcatcatgttgcaggtacgccgtgctgatgctgcagaaggaattcgccgatcgactgttggccaagccgggcagtaaggtatacacaaataaaatattaattaatccgaaatgaaattgtctcaaaaatggatgaaatttctcaaaaaaaaaaaaaaaagattgtaaacaacgcctttcggagcgcaccaattagtagaccctcaattttcaggaatgctcaaataattaaaaaatcacacaattttttaattatcaaaacaaaaaattttgtcccaaacaggtgtattgtcggctgtccgtttctgttcaattattggccaccgttgagcatctgatgcgtgtgaagcgttccgaatttgtgccacctccaaaggtggactcggccgtcattcgcattcagccgcgcaatccgccgccggccatcaattacaaggcaaacgaaaacaaaaaatggatttttttttaaaatttttgtttctaatttaaatctctaatttttagagcctggacgggatcgggatcccgcagggattgtccctagatcctggccccggggcttttttatgaaaaatttctagcatagacatttttttcggggggggggggggagacgacctcctccgcccaccttcgtttataatttttaattgtatttatttgtttttgttcccaattaggaatgggatggaatgttgcgcattgcgtttatgcgcaaaaacaaaacactgtcggcgctgttcaagcagaagcaggtggtcgatgtgttgcgcaaaaattacgcagtcgtttgcggcacgaggggaaaggtaaggggcaacaacaacaaaaaaaatgttgttggcgctaggcactttgtaaaaatattaaaaatttcatggtcattaatttctggttctgaaatttt

SEQ ID NO: 25108 - DNA, 1380 bp, Heterodera glycines
  unsure (1)..(1380): unsure at all n locations
ctgttgcctatgttttgatgcaatttgcggggggccccttaaggggagacggatgagggcagcaggcggcgattaatttttgacaatgaaaagagggaggcgggggccgggccggggaggcgggaaacctcaaaatgaacacattgcccccattcatttattgactcagtcggtggactgacggacgacggccagcagtgcagtgaggacactgattgatggttggatgatccaaatccaaattgatggtcaaaccaaaagaatttgtccaaatctacgccatatcccttattgagagcattcattgcttaaaaatcgcattatttcttcacccatttgctcgggtactgtaaggcggaagaagtgttttctcctcatataattgacatcgggaaaatccatatatttttttgaggcgccgtcgccaaaaaattggacacctccgaaacaatttgacggcagcagaattgtagcttttttttaatgactgatgatgatcgaatccaaaaatttcccgagccttaattccaagacccaattcgagaccgagactctcaattctccattggtgttcaattttccggggaccccttattttcccattatgaatttaaaatttgaatccacgatgcgcgcgatccacagggttttcttttttttgtaatccgccgcgccgcaacaatttgaatccgagaccgcgggatttttctgtcaacgctccacccctgcgcttttaccacttaatttgcgtatatgtacacagttgagcgaccttgaaattatgaatggattggtgggtgtccataaatgctttcaaaacactccccgtcctttttcaacatacaaaattcggaagggaaggaggggggaggctatgatgaaaaggctgttcaaacaagtcggcgggtttgtttcacatccaccaccaccaccaaccaatcgtcgtcagcagttccaccatttccccatatataataatattattacccacctacctacccatatatgagtatgtatggtgcggcgcggcagcagcagcaaattgttgccgtgaaattttgaaattggatatttaatgcgtgcgcatggcgcgtcccgccgggggtggttcagtgacgatgcaattttctcaacccaaccaaacactctctcatacgattaataaccatcatcaacatccatcatcttccaagtagtactcgatcaaggaaggaaggatggatgatgatgattagggcagcaacttttagtgacgaaaaatcccgaaatagttaactaaaatagtgagtaaaaatgccaaaatagtgaagaaatagtgacaaaaagtccaaaatagtgacgaatagtgacataattttcagccanaaaaataagcaaaat

SEQ ID NO: 25109 - DNA, 1195 bp, Heterodera glycines
aatttaaataaaaacaaaataaaaaagcgattttatgagcagaaaaagcgcaaatttattgaacgatttgatgaagtgaatgaattatggccaggcaaacagaaagaatttgtgaaggaattgagcatttctgaagacaaatttcgcaaatggaaaaaagaattggcgccaaaatacataaaagtcaaagtaattgaatttatttttaagcaagttaaatgtaattattcaagaaaaccacaccaatgaggacaaattagaaaagaccaagcattattttgaaataaaggaagcaaatccaaaagtgagtgacgaaataattgccaagaaattaagaattggaagaacaattctgaacagatggaaaaaggaatgttgatccacttgttcagtgatttttatttgatcatgattgtgatgaattatagaaggataatttgcaaatttacaaaaagcattttggctgaaattcaaaattgacaattttaatcactaaataaaaaaaatttcaagttttatttatttttttctgtttaaattttcactcgccgcttctccgtctccccctccgccgtcggtcaatccctgcggcattggcacttcgttaacgcaaagcggagggccaaggccaacttcgaaccgataccgtgttttcgtttattatgtcatccgggaaaatgccaacaattttttgtccgcggaagactgaattgatgtgccaagctgagccaattgagtgcatgccattgctccatatttacacaaaatgcgttgcagttcatcgactccgccacaccgagttaatccgtgcccacagggcactccattgatggacgacaaaaatgagccgttgatctgcgggaacagcttggccgcggcggacctcgcactgtttggtttggccccctgacagccgcacatcagtaccaattggagacgggatttcccagctgggatgaggaggatgccgatttgaaagcgggatgacgcgaggaagccggtttacggcataattggtggactttttgcccatcgtaatttcaatctcgaccaattagcaggaaatattaaagtgattactaagtctgatgccccgtttccgtatcgttggtcagagttggccacaaaataatttacacctcatcatcaccaggtgagagaaggaggagagcaagtcaaggcgggagaaacatca

SEQ ID NO: 25110 - DNA, 1447 bp, Heterodera glycines
tttcagcttccttttaaaaaatgtgatcgtttttctccgtcattttcatcgcttttttgccaaatgttcaacagatttattcattgacactgcaaatgttcgcatttcggagtttattatgctcaacatttggccaatgttcaaggacaccatttgtgagatgactttgaattctaccgcttttcgtcaaatgcgccaattggtcccgtcattgctcaacgattgcccagcccttcgccttgttgctttcgatgatggcatttctcacgaatttccgcctgacgacagtgccaatgcgacggatggccaagcggtggccaaatggctgttctcacctcgccatgacaatttgacgaaggcgctcagccttgaaaatttagcagtggagcaacaatggttggcaaccatggaacaaatcaaagcggtgattattacccattaattttctattttttttttgcctttaggcattttccgctgcttcttctcctgtcaatttcgtcatttctgttggcttttcgtcgtcctctccgattgattccgttgtgccatttgaactgaccaacgaattcactcaagagaaattgacactgtcaccggaattggtgaacgtttataggcttatccgttgttcaattgcagcagatgatgagggaaaatggatgaaggaaatgaatgaattggttagcggacaaaagaacaacaaaattggcattttcatcggagacgacggaatcgataatgagtgaacatttaaaaatctgctaattttctcatttcattttgttttttttttattcagtcttctcgacgatttgccggggccgagtggtgatcattgatcagaaacagcaaaaaatgaattgattggatgattttgactgatgcgattatatgtgtcctaaatattgagatcattggtatttaaatgctggagaagtatttgatttgctcatttacaaatcaattaatggtaaactgcttaacaacaaaatcaatgagaaaatggccagaagagttataagaactaatgaatcaacgattaaacgtgaaaaaacagaaaattaatttaaaagtgtaagaaaaaacgaaacaaaagacggttagagagagaagagaatagaggctgaaaaaggagaaaatgaaaaattaatatggaaatgccaaaaaatggtgaacaattaaaaaaatcatacaaatttgaggcaaaattgcgcaacttctgagcccattcatcgggcaaatgaaatggcattttgggagaataaaacaaataattccttccaagaaagcgtgaacaattaactaattccattctcacaattcttttttagcttggcgtattgccatttccgtttttgacccaaatttatgccatttctcatgagaaagtatttcccaccaaaaaatgcttttttgctcttaactttccaccgaaattcaaaaa

SEQ ID NO: 25111 - DNA, 1609 bp, Heterodera glycines
  unsure (1)..(1609): unsure at all n locations
tgaagttcatgtgatcttaatagaaaatggataaagacaatgtggttatggtgttaatttgcatacaggatctataaataaattaatattattttaattattaaaaatattttagttatataaatgataaatcgaaatttattaatgctctgataaaaaaaatcatttgataatggattcaacagaaacggaaaaattagcactttgtggaaaatattttacttacagatttgaaggtttcagacgcggtgtagaatcttaaaaaattaatattatttaaatcttttataagatttacgcgatacaaaattaaggaaatagtaaagttcatgtgatcttgatagaaaatggataatgaaaaggtggtttattgaaaaaaatggtgttaattcgagtgcaggatctataaataaattaatattattttaatcattaaaaatattttagttatataaatgataaatcgaaatttattaatgctctgataaaaaaaatcatttgataatggattcaacagaaacggaaaaattagaactttgtggaaaatatattacttacagatttgaaggtttcagacgcggtgtagaatcttaaaaaattaatattatttaaatcttttataagatttacgcgatacaaattaaggaaatagtaaagttcatgtgatcttgatagaaaatggataatgaaaaggtggtttattgaaaaaaatggtgttaattcgagtgcaggttactacaatgtacgagtactttgattatcgatttttttcaatccatattttcggacccccccccgccccatacctattggatgatctttgatcccttcaaccgaaacctattggatggacgtgcgcgaggatttaattaattttaattaatttaaatgcgcgagagctgcgcgactttttccgataaattgtggaaaatcaaaaacatggtcgcggtctcgaaccgttgagagtggaagcgaggagcttaaccacttggccacaggggcagttgaaacgtatgggataattgttgacgttatgatgaaaattccgaaaaattgtgaaaaatcaaaaacatggtagcggactcgaacctctgagagtggaagcgagaagcttaaccacttggccacagggtgagttgaaaggaactggataattgttaactaaatggtgaaaaattttcccctttgcttcaccacaagcgctgcggaggcgggcgtgtggcggtgagagagtgatggtggacgcctctgtttcgatttttcaattaattgattatatgcgcatccctttaccgttgattaaggatatttaagctcctgaacattgcctttttctaattttttcaattttgataaaattttcatcagcaacaaacatccttctcattttataataaatattaattgcttaattatattcgtttttatatattaattttcttatatgaaaaagcatattttcaaatgaaaaaatgcattttaaaattactttaaagttaatgtattanatcactttattacgctactttatattcatttttatttaattcagattttagacctaatccctgatcattttttgtagagtttcgaacaatggttcgacttt

SEQ ID NO: 25112 - DNA, 1552 bp, Heterodera glycines
  unsure (1)..(1552): unsure at all n locations
cttacgagatcagtcagtcaaggnttaggtaactgcaaaaattctgtgacaagtgacggtcttnttatgcgtcctgaaattcgatccgaaaatactgtcaaattgnatgatgttgcttatttacactaaagggtcgcgtggacgatgtcaatggagaagtcattgatccggccaccgggcttggaaagtccattctcgaggcgtacaatatcggctccgttttctccacgttgcgtgccgccatgcgtcttgctgcactgctcgacgttcatccgtcgctttgtcagtgaaagggcgagaatggttgagtcatctataccatcccactttaattgattctcaatttgactttctgtttatttttaaattgattcttactttgacttaaattatctgtttatgttttactgtattcgttgatttattaattttttgcttaaacttgatatggagaagaatgaaatacacctagtaacaggcaccgtatatttactgtatgcgctcattacctttttttagtaccttatttttgaaaaaaagaattcaatgatcagttacaacaaaacgaaagccaatgagaataatcctgcgggaaaaaatgatggagatggattggcatttatacgaaaacactttcgccacaaaaaaatattaaaaaaaaatttattcaaaattaaataaatttaccgatagtttgggtcttatttttgataaagtttatcattagagccttgaaaattcgccattttaattccctatatattttaagcgatcaatttgtgttatggacaaacatttcgttagaagaaaaccaattacaataattttttttgttctccatcgcggaaaatttctaatacgaaaagatgaaattttggtgaaattaaaaaataaaaattttttttttttttttttgtaaatgttcgggtcattttcaactccttcattatggcacagcatcgatttttgttgacggatctgctgttgtatgcgagcgaaatgaacactgacaagcccgaattttaaaatgaacggactcggggacatggaaaatggatcggacggatacattttgtcaaaatattaattttccaaatattgagcaatagcactggcgaaatttatgcacgtctaggcgggtccaggaccaggctttggaagtggatcgggatggattgtcggatccctgttttaccgtgcagcccggtcccggtggtttggcaaaaaaatacaggaccgggcggcccggtaaaagcccaccgagcctccaggcttaatttattttaccgaatgtacataaatatgtaggaaaaaaatcccgaaatatgtacaaaaaactatgtaccaaacaaataaaaattcttaaatggttattttttgggaaaaaatttctcgtaaagggtgaaacaggcacaaaatccataaaaatggcttaaaaataggcttagaatctatattaaaaattactttttaatgcctattttgcgattttttaggccctcaatcatcggaacaatgtttttcattttcagagttattctattttttaaaa

SEQ ID NO: 25113 - DNA, 1465 bp, Heterodera glycines
aaacagccaaaacggcaccgggaccccaaaaaaacaaggcgacgccagagcaaagacgaaaaaaaaaaaaacgctcgaaacgaagcaaaagcagaaaacaacacacgccgacaacacacaaaaaacaagcggcaacgccacgccgggagaacagcagcgcgccaaagacagcaagcaggacgaggggccccgacaggagaaaggaaaccaagaaacgcaaagaaagaagcccaccgtgtccttcgacgtatacaacatgcttataatcatgctaccaacaaagcagaaaaattttctttgataaatttgcgagtggtcaacattgtatgttctcacacattcccacaccgaatacccattgttcacctgttgcctgtcctgtacactcgtaaagaatttttttctgtccgttatgacccaacaatattcccagcacttcgatgcaaactctcactgactgataatgatgttcatgcaacttgtattgtttatcattctggcaaagcaattatcactggactcgcctctgttgagcatataaataaggccttttcactattgtcttcattcatcactgataacattgaataaaaaaatgcttttttcgttttttctattccaattttattctgttgtctgctcaatagcgtcaaagagaagtcctgaaccatggggggatacactgaaatcgattgacgacaatgccagagatttcaaatggcctgaccgacacgaaaagggtacatgggcagcagtcgccgcaaccggggaaggctccagggctaaagctgaaaccggtgtcaatcgagaggaaggcagtggtatggaggaggaggaggacagccatattgtaagagcggaagcgttgagtgaacgtgaaggcggtgttgcagttgctgcagccaacaaagggcaaacccaaaagacgagtgatgatgataatgattatcatgatggcgcgcaccagcaagtcgtcgtaatggcacgtggaggtgaagacgcccgtgcaaaagctgaagcaagcggaggtccaagaagtgtcgttgaaacacgaattagtgataaccaacgagggggagaaagattagctttgggttcggccattattcatagacaaggaagaagaagaggaggaggaggaggaggtcgaaacagaaaaccgtcagagaggcaaagaagaacaagggcgaggacgaagaccctattgccaacgataaatttcacccccgcccccccgcaatatatggagctaaacaatcgtcaaaaaggaaattgaacaagtcacactcaacaacaatgtgcacacaatgagccctgtcagttacccatatttgttgagaaaaaaagttgaaagaaattgttttgaacctgctgatttaaccttggctttcagttttgccaatttccttctccacttatcaatttttgactcaaaatgaaaaacttattaaactattgataatta

SEQ ID NO: 25114 - DNA, 1554 bp, Heterodera glycines
  unsure (1)..(1554): unsure at all n locations
caagaggtgttgaaaaatagaccatagatgggctctaatccagtaatacggtatttcccccaattttcgtttttccagattcgccaaaaagtttacgaggcaaaagagcccgagaaaattttgactgaaacgcatgccaacaaaacggctgcttcggagttgcaggcaaaggccgagaaagccagccaaagggcagcgtcaatccacagtaaaatgatgaacattgattatataaaaattgaaaataaaacactgaaattatcaccaagatgtcacggtcggcatcaaggagtcgctggacaaggcggaggaggctcagaaacaagcgcagatgacactggacgaagccaatgccagcattgaaaagacaaagtcaccatttacgggagcagctcgccccccccccaccgccgtttccgatttaaatttaaaaaattttttaaggaaaaaaatcagaaattttttttctaagaaaatttcaagaaaaaggaatatacactgggactaaaaatcttttttttccgtgcccctttggcaaagtccaggcggggccctgatcccatccggtctacaattgtgtatatgtaaattgaaaaatttatgtttcttcaggtccaccctttctttgacagaagatgaggtcaaatcattggagttacgtgttgacgaagcaaccgatcgaactcggaaactggtcaacatgactggtgaaaaagcaaccgaaaaataaaattcaatttttcttttttcattttaagaccatctcaaagcggaatacattaaaattatgtccaacacaaaggcagccggccaaagcgccgccggcgcatcggaaattgcggaccaagttgagcaaaaacacaatgctatgaaggtgagaaacaattttaaatgatattgaaaattatttaattgtctataaatcaggtgacggtccccaagattttcgacttgggttttaaggggcgggggggggggggtgggtattacaatgaaatagatcggtctgctgtttagttttatcgcatttggcatggttttttggaatcccaaaaattagttatcaaactctttcccaaattaaattttttttttctttatttttaatttatgaaactcctaatgcctattataattaattttttaatttcagtccacctatgacaaagtgttagctttattggaagagaaagaaggcggaaatgaggagcggaaacagcgggcggaagagttgcgcaagcgcacaaccgaattgttggcaaagattaagcggagtcgggaagagaaaatttgtgagctattttttattaatttattttttgttttttaattttttagccctgattgaacgtgctgattcattagacgtggaactgaacaattttcacacctcaattgaggaactcagtgatcagattgatcaggtgaccagcgaaattgatcgacgcgttgagttccatgccacatgcgatgcctaattaagaattcccatcattttgtttccacgnattgcctattttaatttataattttaaaaaaacgaaaattaatgtt

SEQ ID NO: 25115 - DNA, 2423 bp, Heterodera glycines
  unsure (1)..(2423): unsure at all n locations
atcctattaaattattattttgtatggtttccgtaaacattaatgaaaattgtaaaaggaattaatgaaaaacaatctacaaatattccttagtgcaaaaaaccaattaaaatggatttaacgctaggagtgaaaaaataaatattcatgtaaataataaataaaaaataataattataataaatgaaaacaaaatttttaataaagcgaggaaagttagtccaaaaaaatctacatgcattttgacaaattttaataaaaatgaataattaagcaaaaaacaacattaataaagaatacaaaaagttgaacaaagaaaaattttatacaaaacgcaataacgaaaaaatataaccgttgtttctaaaaatctaataaaattctttgtttttaaatgcagttttataagtaattaattttaaaaaataacatttatttcatacaatcaatcactaatttatttctaactttgctttaattaacgacaatgttttcaatggattacgttgtttaaaagtttaacaatatatccaggaatataataaataaatcaaagaaatataacacattcaataaaaagataaaacgcattggttaaattttagcttcctggaaagcaaatattttgaaaaaataattcattttatctaattaggttcttttatatctttattattaattaaaactaaaatcaataaatacaaaatttttaaaaaaatatacccaaattttttaattttttccgggtggcgattgttgtctgcggagccggccccgaaaaaactcctttggctcaaaatatcaaaatttgatgagtttttggacagaatttgttaacaaatagtagttttacaaaaaatactttgaaatcgcataaaaaaattatcgatgttcaaaataaatgaagtcaaaaaataatgacaaccaaactatttattcatttaatattcaagatattaattactaatttttgaatattttaaatatttaatttctattttagtaaatttttaatcgcctttttaacatacagtaaaaaaaaattatattctaaaaacatttataaataataaattaaaacatcaaataaaccatttttatcaatttttatggaaatgaaattaaaccaaagcaaaattattataatcgtatcaacaatggacaaaaatgagaagagagaaagcctcagtccaaaatttcattttaaaatattataccaaatctaataaaataacatatttggtcaaatttaaacaaacaataaattaaatgattataataaaaaaataaaagatttacataattacaataatgaataaaaataaaaatgaattaatattttgcgtctatatacataacaaataatgttttttttgagaaagaatacatgtgtaaataaaaataatatatagaaaaggcaaaaaaaaaaaatcacaagaaaaaattaatcaataaattaattattatggacagaatcaataataaatatttgaaccaagttgagaaaaaaattaactattaattcctaaataaagccttacgaaataagagagaaaacagcatgcaaaaaaaaaaaaacacagagcaccaaatggaacgccaacaatgtgcgaaaaatgacaaaattaattgcaattgacaaaggaatgagcaaaaattagaataacgttttagaatttaaagaacgatttggtctctttttggagaaaaaaacgatttttaggggtacagtttctaaaagaattttttgatttttcataagaaagtttgataaatttttaaaatttgaaaatatatagaaaattgaaatatagtacatatttttgtatttggtttatttaattctaaacccgttaacaaattgattaaaattttcaatttttgctcagcaaaaaaagttaaaatgcagcgaaattaggaaaatgctctgataatcacctttattaataagatgctgatagtttttgaaaaaatccttaacaaaaatgcaataaaaatgaaaaacaaatgaccccaaaaaattgaaatatttaagtttttcgtgttaataattatttttagtagataattttaattatttatattgtttagaagtaaaattcaaagagtaaataaattgtttaccattaatgcccaatattttaaatttttgaagcagtaattcactctgaattttgtgttactgtgtatttttaataaatataggttttttgtaaattaataaaaattagatactgtactataattatattattattaaaaaggcttatnaacgtgtcacacaaaatcccaaaattagtagaataaaaatgaaaataattaaatataaaaatggtaaaaattaatttngtatagatnaaaagagaattaaaacagaaatagaaaaatttattnnatagacaaaaaaaaaatacaatcaaaaa

SEQ ID NO: 25116 - DNA, 1156 bp, Heterodera glycines
ccccacgaggccgcgaagcggccgagtgagtaccttgggcgcagaaaaattattaaggaggagggttcattatttatttatttttttacaaaattaattcataagtatttttacagaaactgctctgaaacgcaccaaaatttatttacaagttgaataaggcactctgactcttatattatcaaaaagggagatgaataaatattttaaaaatttttaattcctttttaaacatgccaaaaagtttaggcttaactttttttatataaactgatcagaagcgcaccagattttgcaagggcatcaaaaagacaaggaaaagcaccgctatgatgctaacaccagtaactcttaatttaaaaatttttattaatttttaaaacttcactattttaaatttttaatagatttttaaatgtttggattttttttggcttaccaaaacttcatcgaacctggttctttctattctctttcaaatcgccccaaatttttttttacagcttaactaggccctattaagcttatttccagaaaatctcgcatgaattctcatttttaaattttttatagatttttaaatgtttgcattttttttggcttaccaaaacttcatcgaacctggttctttctattctctttcaaatcgccccaaattttttttacagcttaactaggccctattaagcttatttccagaaaatctcgcatgaattctcatttttaaattttttatagatttttaaatgtttggattttttttggcttaccaaaacttcatcgaacctggttctttctattctctttcaaatcgccccaaattttttttacagcttaactaggccctattaagcttcagaaaatctcgcatgaattctcatttttaaattttttatagatttttaaatgtttggattttttttggcttaccaaaacttcatcgaacctggttctttctattctctttcaaatcgccccaaattttttttacagcttaacaaggccctattaaggttattttccgaaaatctcgcatgaattctcatttttaaattttttatagaattttaaaatggttggattttttttgggttaacaaaaattcatcgaaactgggtctttctattttctttcaaatcgcccccaattttttttt

SEQ ID NO: 25117 - DNA, 1464 bp, Heterodera glycines
cgcgcgaacgccgtcagaagaagcggacccctctctgcttttggtggtggcgccgcttttctgtcagattcttctaccatttgtctaaatgcatttcgtatgaaactggtggtccgttgcccacttacacgtcactgtcgtcgagggtttgcaccgaatcatcgtccattcgggcggttcggaattggttgtgagactaaacataaaatctacagactgaatacgataaaattgattgtaattgagaggggtttaaatcatagtataggtacgaggccttgtaaatttctcctcaatttctcacagtttcgtccgtccgtcggtttccattcaccgcgttccctccaatcgctggcgttgtccataaactgttagcaaagtgcgaaattcgtcgtcgtgttccttggctcgtcatcggctgctgctcgtcccacatcacttccccatccccctcttcccttcgtcccgagaagaaaaagtcaatggctctctccaaattccatgcgcatttggacaacagccgacgtgcgctgtcatcgtcagtgcagcctaagagaattaaattggaaaacgatcaattcaacacaaaattgaaccggtgaattctttgaatgattgcaacgcattttcggagtccatgaagaaatggcgagaaaaagaaagtctgtaaaatcagaatcacagctagtaaaggaaaatcgagcaaaagacaaaagaaaaaacatttatgcatcttaattcttaaataattttatcatttttacagtttggcataatgttttaattttgaaaatcttaaacaaaaacctatgtattaaaggtgcttggggcattccggatggtacggaaatatgatttcctaaaatttttggggccgcggaatgccatccctgcttggcatcatcatgtgttttcgacaaaattataaagtgcataatcgttagcatgcttaaaatgcaagtatagaacaagcgagaatttataaaaattggagaaaaatgcttgacaattgttgtagtgactgacacacataattcgatcgtcggctgtaatctgaatgccatcagcaggtgccgcctcaaaatttctcttggataaaaatgaccattgcttttgtttctattggtgagaaggatcaatcatccatgtgtctttggccagacatgtaaaaaagtaacaaaaaaaaatatgcaaaaattcggactttttgtggttttagtgttgcaacttttttataagttgttcaattgcttagcttctaaacatgtagagctttcgactaatagtaaacctaaaatttggtcaacaaagaaaaaagttatgattttggcagttttttacagtaaataccccgatgctttcactttacccgaaaaatttcacaggtggttttgaggtcgttgattacgattctgacagttatttaatgatgtccaaaccttttccccaattgaaaaaccaaat

SEQ ID NO: 25118 - DNA, 1274 bp, Heterodera glycines
aatagggatgcgatttttaggtaagaaaaatcccagaataggtacttaaataggtaaaaaaaactcaaaataggtattaaataggtacaaaaattccaaaataggtaccaaaataggtaaataaaaatttttattaacgattttttagtggaaaaaagcaaacaaagagggaaaattttggttctacatatctctttgtaaacgaaaatttaaatatattaatattttcttagataatattgacattttaaattaaaaattttgtcaataggaaaaataaataaattttgggataaatttttgagaaatttttccaattcttagggtgcatttttgaaaatttttttggtcgattcttatgggtatattttttgattttattgcatttttgttaagaattttttgaaaatccttaaaataggtaaccaaaatgccgaaataggtataaaaataggtacctaggtaatagtagaaaaatcccgaaataggtaaaaataggtattataaaagtgggtgtagaagctccaaaccaagctaaaaactcgttttttatgcttatctcaacgttacaagtgcgcaaaaattttaggtatttaactaaaaatcgcatccctagtcgtatgtctcagttttgttgccaaactgctgtttaaaatttcttttcaatttcttccacattgattcgacacgagaaattccgaaacgcttccaacgcagccatattaattaataagctggaaacataaaagagaatgcaaaatatatctttatgcgtcttttcgtgcatttgtattgctttagttgcatgaatgtgaattttgatgaaaaatgaattttcgactttttgttcgaattcgggtccggggttcgggattggtcgaaatggatgtcagattcgtgctcaacgtacctataaacccctagaaacatgtttttaagacttgaaaattttgaaaaatttttcaaaaaaggtgtgataccatctaaaccgaagcgggtcaactccgtccccccaactccgtccaaaaaaacaaaaaaggccacctccgccgcaagaaaaaattcacgaattttttacaaataaatttgagtttatcagaactttatgaatggcagacaaaaaatgagaaattttggctttattaggtcttaagctattctatttgaatctgacgcttgtacaagaactcgtacgattatgctttgtcgcttataggtggaggcggaatttttcgggttttgctgagacgggattttgtcgcgacggaattttg

SEQ ID NO: 25119 - DNA, 1962 bp, Heterodera glycines
  unsure (1)..(1962): unsure at all n locations
tttcttggtttatttttaacgcaaaagattaaattaacctttcaaacaggttattaacaaataaatattaaaattaaatttccaagaattgttatattctattttctcatatattaccttccaaatttcctttttttctaatttaaattgaaattaatttaaaaatacaaaaattcaattttctatttttactagcaattaatttcgaatataacttaaatcaaagcaataatttcactacaaaatatatttattaaatagattttcatagtttaaccatttttaatttgcatttctctttcttttctaaaatttgcaaaaaattgtttttgttttcgccaactttccactgtctcacattttcaatgggcttgctaattatgatgatcaacattgtgatcccccccattccgcgaataatttttgttgttctcttatgatcacctcttcatccatcaattctttcattcatttattcaatccccgcgtccatcaccaaactgactgattgtcttttcttcctcgtccttccccaatatcattttgttatttatcaattagcacttcattattattatgattttgattagaataatttgttcagctgaactcggacggggcagtccccccgccctcccccctcttcacgtgcgttccccgctctgacgggcagcggacgatgcattcattcgaaatggcctgatcccgtcgagcggcacgtgtgtgtgctgagtttctcgacaaccgcgggcggagaggcgggcggaggtgggacgacaaaatgtgaagaaaagaggacgacggcgaaaacgacgaccaatttggggacgggggggacagggtggctgataatgacagatactaacaaatgtgatcaaacggcgtagcagcagcagcaaggtcgacaagatgtgatgattaggtatttgaaatggaagggggggggggggggaagagggaggggtgggtggaaaaaatttaagaaaatggaattttttttgtaaaaaatttcattcatgtgtggggcggggtggggtaaatggaacgtcgtcgtcggcggggtgtgcagggcgtgacagcaccaaaacctcaacaacatcccagcagagcagagaaggagtcagtcagtcactcaaaaaattgaatcagcgcccgccccttttccactgatcagcacccaaataaaatgcaaacacacaatggagcggagctgattattttttagccaaatgataagataatacccgccgttggttgcttaaatgtgttcacaaattcagaaatttgccgttgtccgctcatttgttttgtgttgtgctgccagcgccgaccattcgtctcagcccttcccatcatttcaaattccattattcccgtgattgtccaaaatgatcggcggaatcctggaagatatctggacgagatttatcggtacaaatctctcctgatcattttcattctgttcattgtgtagtgatctgatctgacccgccaccaaaataaacctgaaaaaattgttacaaaaacccatcttcgcggggataatggcacctgggggatttcattttatttttccatttatttagacttggtggaggacatctctgatcagtacgacgattctgagcaaccaacaatcatccaccacgaaccggcaacaccaacaacaatgtttgacaactatggtccgattgagaagattgttgtggtcggcaccggcctcatgggcagtggcattgcgcaaattgcggttgagtcgggcgtcaaagtgtgcctggtgggccgtagtcaagaaaagtgtgatcagacccggctgaagatcaacacgggagtgcaaaagtcgatcaagaagcgcatggcaaatgaaactgccgaggtaaacgacggcaaacatgaaatggcatgggcaaaaatgatgcacnnagtgaaaatttgaaaatgcacttttcataaccaaaattt

SEQ ID NO: 25120 - DNA, 855 bp, Heterodera glycines
gatttttgtgtatttaaaacctattttgcgattttttgtgcctaagaaagggaatttggaagtgggtcttggcgcccagttggcggcgcccagttgagctggcgcccagttggcgtcgcccagtcggcggcgcccagtcgacccccaccggcgaaaaaggtaggaatttttaccggtcatacgcaaaaaatgaccgaaaaataatcccccagtctccatttatcccccatgattactcactcaaatttactcacaattcctcaaattgtaattttcgtttaattgccgtctttcccttcgaatcgaattgccatttcgccaattgtcctccttcaaaacctgccttttccccttttttttctccgcttgcgcagcataaacaacaaaacaatctcaacggatttgggacggacggacgatcagcgaagcacagagaaacgaacgaactgagaaaggggcaattgtcgtgtccgtccgtccgtccgtccacagacgcggctctcccccccccccccctttcttccacggcgttcgccaatttcgccgcattttttttttgttcgccgtggcgcacagattggcgcagtatttaaacgttgttttcgcttctgtgtagccattggaccatttcattttgtcctgccctcctccccttcatttccatacttactaatgaatcaaatgcgttcatttcgtaagaaaaagttgacttcgatggttaaaacgccgagcggagattgctgacgaaggaagttccttgggtgggtgttcgattcccctccgaggctaacgtttgcccgtttcgaattaatttttcgttgactttttctaattattacttttttgcttacttag

SEQ ID NO: 25121 - DNA, 1178 bp, Heterodera glycines
aaacagcgccgactgcaattgtggcccgaacagctgacgcgccacagttcgagctcctcgatttctgttaaatcgcttaataacacatgctaaaaatccctttccccctcgcctctcttctctcattttttccttttctctctctctttctcttacaccatttcccaatttatcgtaccttacattcgctatcccatttgaagtgacagccgccccatttttgagcccaaatattgcgaaaatttccccatcgtttccccaaacaaaccctctgacggaaagggcccattcctaagggtggaaataacaaaagcgctcattaattaacaaagggaaacattttgggggagtaattaaatcacatttttgtcccgggacataagcaaaaacacaagacaaggatccgaagattgaagtaagtaaaaagggtcattaattggggtgcttaatccatcagaggaggaaaaacgaatttgacaagcgaaactggggaaattgggaaaccgtaacatttgaggaagagagaaaagaagattaattgaggggaaagacaaaaggcaattgccacatccggggacttttgaaggaacagcggattttcacaattatttaaaatcttttaatcttgtggcgacggcacacgggtggacacccgttcgatgtgcgcagattctaccattatatttgcgcgggtccgctcgggctatttacgatggattgcgagaggatgctaaatcaaattggaaaaccttagtcgacacactcgccaccaatttaaagaaggtttcctccagccttgttgcgcgacagatgctggccaaacgaaagcaacacgtcggcgaaagcttggacgaatttgctcaagagattaggactttggtagcgaaggcgtacccggatacgtcgcttgaaatgaacttcgaggcattggcattgggcgacatggaagacgatgtgaagagggaacacgaagaacgcctacacaaatttagagctggaattgcaaaggactttttccgcgcaaacatgacggcatcaatcaaagaaaaaattctcttcatggatgaacctccgacatttgaggatgcgatcacacaagcaaaaagagttcaacaaatgcagggagcgttggcagaagacctctgcaaacaaacgcaaggaacaaaagctgaagttgc

SEQ ID NO: 25122 - DNA, 1064 bp, Heterodera glycines
ttttaattaacttagtaaaatcttatttaatataattactgtaaaataataaatattttataaatttacaaaatattttaaatattaaagttcgttaattcgagtttgctttttagatttttatttaacaaaaatttcaaaaaaaaatttaaaataattttttatttaaattcatatttttttaaaataattttattttgtttttatcaattttgtttttgttgtttttttatccacttcaaagtttgttgcgctcattttatgtatttacaaatgttacactaaatatttggcctccgaagtgataacaacagttattattttcgcaatttctctctatcaaacctaatgaattaatttttgtaaaattttttatttaattaataatacatttttaatgtgaatttaatttctcactcgaaatttatttatgaaattggcgggaattactatgttttattgcatttttttttattcttctcttttgtgtatgtttaataaaaaatcgatgcacttttttcaaccgagaattctaattaaaaattgcttttcttcaaactctcgaaatttgattatttgaaagttaaaaattaattaatttaataaaattttttttataaattgtctttttctatcaaattataataaaactgtttattaaaaatctcaatttcttagtttattattttttgttatattttaacatcttaaaatttttatatgttatgaattaagttgattttaatttgttaagatttagaaatttattaaaaattatattattaataggatttttcaattagaaaatgtttttattttatatatgtaaaatgattcaatctctttgttttttattttattcataaacgtattaattatttaatttaaattcttatataaattttacttgaatttaaaaaatttttattgaaaattttagacctttaattatataatatatttatactttttttctattttatttaattaattttaatgcattaagacacaaaaatattattaaaaattacagcaattaatagaatttttcatgacaaaaaata

SEQ ID NO: 25123 - DNA, 789 bp, Heterodera glycines
aacagaaagtgaaagagaaagtggaagaggaagagaaagtggaagagaaacagaaagtggaagagaaacagaaagtggaagaggaacagaaagtggaagaggaacagaaagtggaagagaaagtggaagaggaacagaaagtggaagagaaagtggaagagaaacagaaagtggaagagaaagtggaagaagaacagaaagtggaagaggaaggaaagaggaagagaacgagaaataggaagagaacgagaaagaggaagaaaagaggaaggaaaaggggaacagcaaatggaagaggaacagaaagcggaagagaagaagagcaacagaaagtggaagaggagcagaaagtggaagaggaacagaaagtggaagagaaagtggaagaggaacagaaagtgaaagagaaagtggaagaggaagagaaagtggaagagaaacagaaagtggaagagaaacagaacgtggaagagaaacagaaagtgtaagaggaagagaaagtggaagaggaacagaaagtggaagagaaagtggaagaggaacagaaagtggaagagaaagtggaagaggaacagaaagtgtaagagaaagtggaagaggaacagaaagtgtaagagaaagtggaagaggaacagaaattgtaagaggaacagaaagtggaagagaaagtggaagaggaacagaaagtggaagagaaagtggaagaggaacagaaagtggaagagatacagaaagtggaagagaaacagaacgtggaagagaaacagaaagtgtaagaggaagagaaag

SEQ ID NO: 25124 - DNA, 1801 bp, Heterodera glycines
atgttcaaaatagggaagtctcttttagggccaaaaattccaaaataaggattcctaaaaaaataacttaaacccttaagaacccccgaggatttttgaaaatattattccacaaatgaaaaatggtgcgccccttaaaaagaaaaattcaataaattgcaaattttttaaacaaaataatgggaaatgatggaaacccttaattaattatgaggaattacagcaataaaattagtctactgtacataaacatacattaagcattggaaaggagtagccaacaatggcatttgagccccaattggaaaggaccgcaattgaattggcattgccacgagcattcgatggaaagatttcattaacaaaaagccatggaatcgagcctaaaatatttctaattattatatgtaattacgaaattgttgttgttttttttgaatttcattttattttttttattattttagtttttcaaagcattttaacttaaatggtaaaaaagcctgtaaatttatttccaaattacctcacaaaaatttaataaattctcatgagacccggtctctaattttttaataattaagtgcgtttagttttttattgccgcaaatccggtctcatatttgactgataattaattaattacctggcccagttgcaaacgaaatgacaaacagcagaacaaataaaatcgaaagatatgaaacccattgaactgactgaaaagcaattagcgaaatttgttttattttttgaaacaaaaaaacccactgaattaagcagtgaaattgcgataaaagcgctcgacaaaagcacgcccacgaggccagtaatatgcaaagtccgacgtccaaggcgttccacctgaaattcagttgggggtaattaattcttaattaaggctagcaggcttggaaaaatgaagccccttttcaaggacacagaattcaagggcatcattagtgccggtctaattaaggcgttaatgggccatcggacacggaaaaacagagcctttctcaaggacgcaaagggtatatttttcactgaaatacccaaagtctacaattcagatcttgaagattgggtggttttccttgaataaagacaaattttaagggcgcctctgaagccataagcatcgtgtccttgaaaagaattagtttcaaaaaaccgaaccaaaacgacagacacaaaagtcattagcacattcacggttcccattgcgatagtggccacagttggccctaaatattccgtaataattttaataagtaatttttcccgtattaaatttacattgcccttgaagtccggcattcttgaaaatgtcagctgaatagaacatagctgaaaaaaaagaaaaatgtaatttatactgagacgattaaatacaattttttaataaaataatggggatcaattacaatttttaatataggtttgatcaaacaatccgatcggataggttttcgtcaagttttgaaaaattaagataaggcttgatcaaaacacaaccgatcgggtagtatttgtgtcaagttctgtaaaattttcttttggcttctttattcaaaaaaaaatttgtaagtcaacaccaactttccattaattaattagtcaattaaataaaaagcacacctgcgttgattccggttcactgctgggacaacatcatgaacactgccaacacgaggggccacaacaacgggggacagaacatggcacgcatgctcaatttgggatgggccacgcttgcaaccgcctcttcattgatctgctccaactcggcatggacctg

SEQ ID NO: 25125 - DNA, 1170 bp, Heterodera glycines
  unsure (1)..(1170): unsure at all n locations
attaattaacgaaaaanatacgagaaaaataatgaaaaaaattgaaacgtaaaaaaacaattaaaaagaaaataaaaaattaataataagataagaaatttaaaaaaacaaagagaattacggccatacaattaattaaaataacaaaataaattaataattatgatgaaaagttaaaaaaacataaacagagcccaatttctattttttgcccattaaaacaatttttggagcgtttgactcatattttggcttaaacattcatcaaaatatgctgttattaaaatagaaaatttagtcaaattttaaatttaaattattagaaattaaaaattggtttttcgtgttgacataatttttaatatttcgtgtatttctagtccagaaatctgagccctgtttattaataaaaggaaaaaacgacgaaaaaattaattaattaaaaaaaatactcccacaaattttcattcaatcactcactcatcatcatttttttcacctaaaaaacaaagtgtaatagttggaaaaggggggataggctaccgtaccaccggtcttcatgagtcgttccttcaacttaattcacatcattttaaatgttaaaacaattgttagattcaattttctcataattatttaaataaattaaaataaaacttacgcgttcgatttccatcttcatgagttgttccttgaattcgaatttttgtcgttccaattcggcttccaacttggaaatgcgcaattcgtttgccaacttttgttgttccatggccaatttggtgtcctttctcaactctttcaatttcttccagagttctttctgtaaaagggagacgaaattgtggtacgcaatcacgaacaatgaagaatgggggtcggtcccatatagaaacgaaagcgaaagttatcgttgcttcaaaaaacattttaactattttagaccaaatatgaaattcgaagttgagttttcgacttcttgtgcgaattcgtatcaggggttcggaatgggtcgaaatgggtgtccgctttgtgatcagtgaccccgaaaagcccaagagtcatgtttttgtcccaaaataagaaaagagaagatgggaccaacccccattcttcatcattgtcgaaattattctttttttcgctccttttaaatttgtgaacaatttc

SEQ ID NO: 25126 - DNA, 1761 bp, Heterodera glycines
gagtttgaccatagacaaaattaaattcactatagaaagatgcagaattcttttctctatcgatatgcaaaatttggtgaggatttaacttgcaggaaaaaagttaaacgtcacgaagtgaattcggtttttctctattaacagagataaagaaatagtacgccaaaataagagatgtttttttctctgcactctctctttattgacacatgtctcgttttttgactcggtgtgtttacccatggcaaaatgactgggctttgacggaattgaccgggaccgggcttccttcgggatgactaggtctcggtggttttccaaaaaaaaagggaccgagctgccccgtaaaagcccccaggctcgtccgctcaatattaaaaactgcgtttgctcttgcctctggtgctaggtttatgtagcggcatattgaacaaaataacttttttttaaagaatgaaataaattccaagacggaagagattgtttttcattcattaataattgggagcaacacacacccaaaaaaaaaaagtttttactttattttcctaattttaatttctttttttttgttagatacacaaatcaaaaattagcatttgccatttataccgagcgaaatgggtgcctacaaatacatgcaggaattgtggcgcaagaagcagtcggaggtgatgcgctatttgctgcgcatccgctgctggcaatatcgccaaatggaggccatccaccgctgcacgcggcccacgcgtccggagaaggcgcgccgcttgggctacaaggcgaagcaaggtgtgtgcagcgagtgaaatgcgagtgatggaggcggattttgagggggttggcggattttcgagagaaaaaaactcaggttttgccaaacaaattgggtggcggcacggcaatttttatgaaaattgggcgaattttttcaaaaattaaaaggtaatcccagccgtaattggcgcgttcagccctagttaaaacactcggggtctccaagttggttcatagaaaaaaaaatcctacaatcattgtgtcatggtgtcagttttttttttttttttttttgtaaaagtgccaatctgtgtgatgaattgatgctttggaaaaaaggggaaccgcccaatttgtcgcggccaactcaccgtgttgagtttttgtctgttaaaattttactgttttttaggctttctcatttaccgcgtgcgcattcgccgcgggggtcgaaagcgtcaagtgaccaaagggcaaacgtacggaaagccgaaaacgcatggcgtcaaccagctgaagaacacgcgcagtttgcaggccgttgcggaggtttgtttcaattagatgggcctaacaaattgtgcggttttcccaaaaaatggtcaaaacttggtgattttagagcaaagcgcattgaaaaccaatgaaaaaaaaatgcgtcaaattttaatctgccctggcggtaacaagaaaaaaggaaggtatgggagctgccacaatttcacccgccccttgtcatcccaggctaagtagcccggcccatcttttatttcaacccttaaagtttcacaaattttctgactgattttccccccttcccttttcccataggcccgtgccggccgccgtttgggcgaacttcgtgtgctcaattcgtactgggtgggccaggactcgacctacaaattcttcgaagtcattctcgtcgacccatcgcacaaagtgcgttttggtttttgtttgtttgttttgttgcgatccttt

SEQ ID NO: 25127 - DNA, 1036 bp, Heterodera glycines
cagcagtttccctgcaaaatttgtgagcctctgatcagtctagaacgttgggtgataaaatgaaaaaaataataaaaaaaaataatgctggtgtggtaagtgtgaagaactgtgttcctccaggcaaaaaattctaagaaaatttataagcatttgtagggttctcagcagtttccctgcaaaatttggtgagcttctgatcagtctagaacgttgggtgataaaatgaaaaaaataattaaaaaaaaataatgctggtgtggtaagtgtgaagaactgtgttcctccaggcaaaaaattctaagaaaatttataagcatttgtagggttctcagcagtttccctgcaaaatttggtgagcttctgatcagtctagaacgttgggtgataaaatgaaaaaaataattaaaaaaaaataatgctggtgtggtaagtgtgaagaactgtgttcctccaggcaaaaaattctaagaaaatttataagcatttgaagggttctcagcagtttccctgcaaaatttggtgagcttctgatcagtctagaacgttgggtgataaaatgaaaaaaataattaaaaaaaaataatgctggtgtggtaagtgtgaagaactgtgttcctccaggcaaaaaattctaagaaaatttataagcatttgtagggttctcagcagtttccctgcaaaatttggtgagcttctgatcagtctagaacgttgggtgataaaatgaaaaaaataattaaaaaaaaataatgctggtgtggtaagtgtgaagaactgtgttcctccaggcaaaaaattctaagaaaatttataagcatttgaagggttctcagcagtttccctgcaaaatttggtgagcttctgatcagtctagaacgttgggtgataaaatgaaaaaaataattaaaaaaaaataatgctggtgtggtaagtgtgaagaactgtgttcctacaggcaaaaaattctaagaaaatttataagcatttcctggattgtcagcagtttccctgcaaaatttggtgagcttctgat

SEQ ID NO: 25128 - DNA, 1345 bp, Heterodera glycines
agtgccaagtgggctggtaaataaattcggactgagtgccgaactcgttttaagagcacgcgggttttgctgtgcattgaaattcaaataatctttgtcatggtattcagtccacattcttttttaataagcgcataaagttttgttgtaaaattttctctgtttaattttctaatagccccttatctttacccttttttaaaaatttttgcaaatttttcaattcaaaaaaaatattcacgaaaatttcaaaaatattaaattaaatgataataattaggctgggaatttatgtaaatagatattttttcccctgggttctatggtcgaaataataggaaaacactttcttttttgtgtttgcgaacaaaaattgggacttttatttacatatttcggggacttttatacataatttacatttcgggattttaacacatttggtacctgttttgaaattaattcttacaaatttttattttttacatattctgggaacatttacggaaatttttagaaatcatcaaaaaatccaaaattctgctaatttttcgtacatatttcaaatactaggtatttagaaaatttatagaaatttcttgttaaaaaagaaatttttatttaaaatgtaccactaaaaaatgcccaaataatatttataataaaaatgattctaacaataagccatttaaatcctatttcaccctttacgaagaaatttttctaaaaattaaccagttttaaaaattgtatttacataattggtgcatattttgggttttatatacatatatcgctatttttttttatatatttatgtttatgcacatattttgaccattttttgcacatatttttggcagcccttctagccatagttttctgaaaatttttattctatttggcatatttctctatgaaggtttttcgaattcaaaatcattttaccatttcccattttgcccgtccaggttcaaggagcagcatccggagaaggcgaaatcggacgaggaggacgaccaggccaaatactatgaggacgcacagcagcgcgagttgcggctgatctacgaggcgcagacgaacatccacatgaccatgcagaagatggagttgcaactgactgaaattgtgcactggcagcagaaacagcaacaacaacaacaacaacaggctggagcagtacagcaacagggaggaggagcaggtggttggggcagtttatgagcaaagttggagaggggttatgacgggaatagaacaaatttcgtcgctaaaattttcaaaaaaaaaatttaattttaatttctcaagaaaaattttttttagaatttttatatcaaaa

SEQ ID NO: 25129 - DNA, 1198 bp, Heterodera glycines
  unsure (1)..(1198): unsure at all n locations
gagtgacaatgccacggtaaagcgcaagacttttgggcactattttttggttgggatgaaagccaccaattggccatagaccaactcggaaagaccaaggctaaatgagagcgtggaagagcagattataaaaagaaaacttacgcgagacagaccaaccattggaaaaggttcagacgagcggttgaaaacctggaaatatttgattggtcattaaaacaattaatcgaactaattaaaaaaagtaacaactgaccatttatggccaaaatgaacgatgagaaattgggcaagaaaagtggacagccaaatgatgcagaacatgtgattagaagaaagatgctgaacaaaatgaatggccaatcatcagacgaaatgcaaaagccatattattacactcactttgaacacatttcgttctccgtggactttgcgcgagtttatttcgttgaaaagggtctgacgggcaaaaattaaaacattttaatagataaactcgggtgcatttcgttcccccctctcgccgtttctccaccgttcgcccaccgattttatcattatttttttcaaattttcaaaattagaaagttatcaaaaaaataatgataaaatcggtgggcggggggaggaaacgagctgcttacgttaacgcaccattaaaacgaatgaattgaaaatgatggtgaaatgctcagatggaggagagtaaatggaggcaccgatgccactggcgacattcagcaattcagggcctaatttgcaggtgttagaatgagaaacaagggattcaaggtaatcactcgtgtttaaaaacgcgataaccgacctttgaagagcaaaaccatcaaaatggtgaattgatagacggcatggcaaaaaatgttgcggatcattgtgcgagagataagcgactttttgcggccgtatggtttgcgttccaacagttcctcggttggcatttcagtggcaagtgccaacgaagccaaagtgtccatgatgagattaagccaaagcatgtgaacagcctgaaaatgggtgcggaatcatttacaattagcatttcatagactgtccgatggcttgtcgttttttctctgttttatcgtcgtcactcactttgagcggtgagtcggcaattgtgcaggcactgacgacggcagtaaaaacggcgaccaaattgacnngtgagtgaaactgc

SEQ ID NO: 25130 - DNA, 988 bp, Heterodera glycines
agttttcgactttttgttcaattatggccggaatcacgaattggtcgaaattaataccatattcgtgcacagcgacctcgaaaacccccgggtaatcatcattatgtgtaaataaacaaagaaaatttttgaccaaaaaaagaaaaaaatttcaaatagaatttttttcaaatgggtggggaggaggggcgttgtattgcacccggagggtagcagtaagcccggtgccagaaaatttttcgggttggggggggggggaatctgaagaccttttttttgctcttcgggcaaaaaaattttcttcagcgcccgaatagagacttgtagccgtttttgcgtcaaaaaactgtcaaatttttttcaattttggggctaaaattccaaaaaaggaaaattttaaacactttgagtgcactttgttacgaaaatcgcctataaaaaaatcaaaaatgtacccataaaattttaaaatttttgttttggggggatataagtattattgctgaaaattttagattttccttggtggtaccccccccagacctagcctcacgcaaattttccaaaaaatttcgctaaatttttcaaaaaatccacaattttttgatgaaaatctgctaaaaatggctcaaaatcacaaaatttggtcatttcggtgactctggtcaatttttaaaggttactagtatttaaaataagggaacattaaaataagtgaaaattgtgagcgaagagtgggtgacagaggtggggctcggacagaaagatcccgggtcgcggattcaatttgccgcggtcgcgaatcgcgcaaaaaaatacatgtgtaaatggcagagaaatgctaatgtcaattggctcggcatgcaaatcagttgttgacaatgcgttacgcatttgggtcatttgctgaaatggccctaatgcaatctcacgcatttcttgcgcagtaaagtcctccggaacattgtcacgattgtagacgttaaga

SEQ ID NO: 25131 - DNA, 1406 bp, Heterodera glycines
ccatgtttcgaaaaatttggagcaggcgggggagggatgtgcgcgagtgcccctccgggcgagagagtgatggtgcgatgatcattcgctctccccccccccccccttggcagtacccatttacggtgagtggcaaatgggggggacagcaaatggcagatgcattttgcattttcacgaatccgtgtgatgctaacaataagccttcctttcgcagttttttcccatgattaaatcttgcaaaagaagcttgagctggtcattgacgaatttcggcccaacacaaaaaatgaggaaatttctcaacccacgggtgagggctaattttaggggaaaaattaaaatgctttttaatcattagcattagcattatcaattaaatctcatttcgttttcattccctccctccgctggtggtcgccaactccgtcccatccaattttagggcgtcataacttgcgggactgagttggcccgctcaacaaatgccccttttgttttcaaaattcggtgcccttcccattaaaatgcatatttttagctgattttgttttccgcataattaatataaagcacatccatcccttcactcatcagtttgtgtccgtacggtgcaaagccaacaaaaagccaaccaataaaattggggatttccctgactttttgctgggatttacccgaatacgagcacagtacacaattctctggtgtgcttgctatgaagtgttttcattagtttcaatttctaaaactttccgtccttttctgctgagctctttgaattttaaatgcccaaggctttccccgacaatccaaacaatcgatcatcacttgaagacatccccccccacttctcccaatctaataaaagcttttgtgtgatcgtttacgatttgcgaggaaattaacgggtaaagtgaaacctggaaaagatagggagaaagagagtgagagagcgggggagagagtgagaaagagagtgagagagcggggggagagagtgagaaagagagtgagagagcggggggagagagtgagaaagagagtgagagagcggggggagagagtgggaaagagagtgagagagcggggggagagagtgagaaagagagtgagagagcgggggagagagtgagaaagagagtgagagagcgggggagagagtgagaaagagagtgagagagcggggggagagagtgagaaagagagtgagagagtgggggagcgagtgagaaagagagtgagagagcggggggagagagtgagaaagagagtgagagagcgggggagagagtgagaaagagagtgagagagcggggggagagagtgagaaagagagtgagagagcggggggagagagtgagaaagagagtgagagagcggggggagagagtgagaaagagagt

SEQ ID NO: 25132 - DNA, 1074 bp, Heterodera glycines
cctatagcctgtactttaattatgcggtggattttttctcctccatcaatgtttgagtaccacaaacggacacctgaaaaaatcgatttttttgttttcggggcagtacccccgaaccgatgcggccagcattattgtgaggacgaatccttcgggaataacttccctatagcctgtactttaattctgcgttggatttttgctccccataaattgtttgagtaccccaaacggacacttgaaaaaatcgatttttttgttttcggggcagtccccccgaaccgatgcgcccagatttatggggagaccgaatccttccggaatagcttccctatagcctgtactttaattctgcgttggatttttgctccccataattgtttgagtaccccaaacggacacttgaaaaaatcgatttttttgttttcggggcagtccccccgaaccgatgcgcccagatttatggggagaccgaatccttcgggaatagcttccctatagcctgtactttaattctgcgttggatttttgctccccataattgtttgagtaccccaaacggacacttgaaaaaatcgatttttttgttttcggggcagtccccccgaaccgatgcgcccagatttatggggagaccgaatccttcgggaatagcttccctatagcctgtactttaattctgcgttggatttttgctccccataaatgtttgagtaccccaaacggacacttgaaaaaatcgatttttttgttttcggggcagtccccccgaaccgatgcgcccagatttatggggagaccgaatccttcgggaatagcttccctatagcctgtactttaattctgcgttggatttttgctccccataattgtttgagtaccccaaacggacacttgaaaaaatcgatttttttgttttcggggcagtccccccgaaccgatgcgcccagatttatggggagaccgaatccttccggaatagcttccctatagcctgtactttaattctgcgttggatttttgctccccataattgtttgagtaccccacacggacacttgaaaaaatcgattt

SEQ ID NO: 25133 - DNA, 1006 bp, Heterodera glycines
tttgggggtactcaaacaattatgggggagcaaaaatccaacgcagaattaaagtacaggctatagggaagctattcccgaaggattcggtctccccataaatctgggcgcatcggttcggggggactgccccgaaaacaaaaaaatcgattttttcaagtgtccgtttggggtactcaaacaattatggggagcaaaaatccaacgcagaattaaagtacaggctatagggaagctattcccgaaggattcggtctccccataaatctgggcgcatcggttcggggggactgccccgaaaacaaaaataaatcgattttttcaagtgtccgtttggggtactcaaacaattatggggagcaaaaatccaacgcagaattaaagtacaggctatagtgaagctattccggaaggattcggtctccccataaatctgggcgcatcggttcagggggactgccccgaaaacccaaaaaaaaattttttggataaaaattatttaaatgaactgactagataatatttaaaataggttatttctcttcctttcagtatccctgcaaagtttggtgcgcttctgatcagtttctgaaaaaaaagttaagcctaaactttttggcctgtttaaaaaggaattaaaaatttttaaaaattttattcatctccctttttgatagaaaaagcatcagagtgcctaaactaacatgtaaataaaatttggtgcgtttcagaaccctttctgaaaaaatatttaagaattaattttgcaaaaaataaataaaaacgaaagactcagattttcgaaaatttttttgagccagctagctcggcgctcatttcagtgtaagttagtcctttaccggggagtatccctgcaaagtttggtacgcttctgctcaattagcaaaaaatatgagtgatcgaattttcactaaaaaagtaagcctacattttttgcatatttaaaaagaattaaaaaattttaaaattaataattttcctgcac

SEQ ID NO: 25134 - DNA, 2265 bp, Heterodera glycines
  unsure (1)..(2265): unsure at all n locations
caacagctccatggcacgtgaagaggccatcctttttaaaggctggaggaaaagcggngtaaaaagagtgtaaaacttaacgcacgccatttggcgctatttaattattcaaatttgttcatgagcaaacacacaatggcataaagaatgatggcaccgccgaaaaagggctcaatgagggcccaacttctgtcgtgttgttgccgacgaagtttgaaaagggctaacttaacaaatggatcgaattgacaaaatgcatggcgatcccttcattgtccacgcctttttcattttcgactgaccccaatcataaggacgcagaagcaaatgcaaacgacggacacaatgaagaaaatcaattggagcagaatccattccgaacggcaccaaccatcgccggcatcggcggacgccaccaacggggaggaggagcagcacgaacgggcgaacacgcggacaccgccgtggacggaatatgagcactgaggaggaaagaagacccaatgacagcacggacaaacggaggaatggccatcattagttggactgttctcacgtgggtttggcagtgcgagtgaggacacgcgttcagcgaaagatcgggcggaagagcgatttggaggaaagactgagcaatgtttgtgtggtaaacggcggacggagtccaccgggggtttccgcccaaacattggagttggaagccgaggacgggctgcggagaggcgggcgaggcggaggcagcgaacggcgaacgcgcggcaatggtcgcgttgggaggaagcactaaaaacggagcaaaacattcattagcagataatgatagaactgtcggaacccgagagaattcgtcagtttttatcgaaactttcgggcggaaatttaaaatttgtgtggaattggaactgccgaaccgagaatgtttttttttccatcacgacaatcctaacattattgttccggtgattttcgtaaaaaaatatttggcaattaccgaaatgggaatgaatgcctttcttttttgaatgtgagtaaatcataattgttcatgttatttatttgccaccccgtccggaagtggccaaataagtgtgtttcgcgaagagttgtgccaccgtcaacagaaggccccgttcggcagtgccatttctctcttcctcccatcggcgcagcgactcattgagcagttgctgcaccagcggactctccacgcgttcggttgggtcgacatggccacaccgaatccaattgggacaacggaaatgggaggcaccaaaattaactcaaaggaaaacggggaggaaagtgagccgggcgggaatggctttacaaattactgcccttggggggggagcctcctccctccgtcccctcaccaattctcgaatttgggcccgaaatgggggcgattccgagaagggcttccgacggcccgtcgacagcaatcggaagggtaagttggtgccggaagcactgtcgttgccggcggatggttcggcctatgaaatttcagtaatccggaaaaggagacacgaatcttacagctgcaggtgtccgtggggtggcataattttcctccgtcgcttcatttattgcgcccgccaccgccaaaagtgtgagaattgcggtggcgaaaaggcaaatggcacgacaaagcccgcgcggcattccttcagaatagccttagtattctcgcctcttggaacatttttacgcaaaatattttgaagaaattattataagtttaaacaaaattcatcggagttggaggacctttgaagggaaacaaaaacaatgcgattgaatttcaattgaccaaagggtccgaaatttcgcgtgtctttccctcgagggacattttggcacggggacacttttttataattcacaatagccgaagagaaaaaaaagtgtggcgacgattgaaattcccgcgggaattgtttggagaagtctaactttgtaagaacgacgagtcaatgccaaacggacggacatttgggagagaggggggggggggggttggaatttattggcaaaagtttaatgaatttccgatagagggccaagcgaaagacgaaaacgacaaaagattttagcaaagtgcgtctttttgggctattaatctctttgctcgggtattccgtttttgagggggaaaaggccattgtttgccgatttcactgctgttgctgccattcacgcacattttccgccaaggaaaagaaagaaggatgaaaaatggggggaaaagattcaaatgcaaat

SEQ ID NO: 25135 - DNA, 1142 bp, Heterodera glycines
aacaaatccaagcgccaaaattgtacagaaaaactgaaaggattcaaaaattgttgcaaatttccaaaaatggttaatggggagggggaacgcgcaacggcggtcgatggaatggacagaaatccatcgccaaagtggtgcttggggtcgacgaggcgaagagtgagtgccccccccccccattttatgatggggaaaaagtggcggactggggacggatttaccagcacaaacttttttcgtatcttattagtttgatggaacggaggcacacaaaaatgaatccgaattttcgagcgctgagacccgaaaaatctcggcacaccccaaaacacagccgaggcataacacagccgggaataagttctaaaaaaatttcaaacagaaatttttcaataaaaaaatcgtgaaaaattttctaagatttttcagcgcttttttttgaaaatttattcccggctgtgttatgatgtctcggctgtgttttgtcctgttccggaaaataaagtcgtgtgaactgcaatagagccccccaaaaaaatccagtccagagtccgacccgtgtatccatttattaaaattaggttttaacatttatttcagaaaaccacaaaataccataatgacataacacaaatccaaattgatcatccccattaaaaaagaacaattattatgagcacgtcaataattccataataattcaattaaatcgatcggtcaaattctgaacaattcatacattcatctgcgcactaatttgggccgtccaatgcgttgagaagcctaaaaaacgaaacgcaataaaatttaatttttgaaaaaaaatttcacttaccagtccccgtaacaaaactctcatcatgaatttgaatgtaaattttgttccatagctcatcaatttcacagcgaatcgcttcttcttcccattttgtccatttgctttcatctcgcgcaattggacaacggacgaacagaaaataattgctattggcaatgctttttcacgacaattgttccccagttaatccattagtcagatcgaagagcacaacggagtcagcaaaaggcggcgggaacaaaaccgaaacaatgaaattgacgggagatgaagccgatgcaaaagctaaaagggggggggg

SEQ ID NO: 25136 - DNA, 1998 bp, Heterodera glycines
aatatgtgggtggagatgggcacgaggagggaggagaacgagtggaggagaacgtggcattgacagcggcaagcgaagtgggcatggcgacgaattacgaacagagcgaccgaggacaatgggttaagggagaggaagaagcggtggagaaatacacaggtggagagaggaaaaaaccgattgagataggagagatagtagggaaggcggagagaggaagagagacagacagattgagatagtaaggtgattaaagagagaaagggagacagacaaaccgagacaagaaaaaaaagagttgggaagacggagagggaagagatataacaaataaataatccctttaaaatcaaattgcggcgatggcacttttcctttgctttcagtgacacctctttctgtgaatgcttcaattggcaatgactgaaaaagagcagaaaatcagaagtggttttgccaagtttccacaaattaactcattattatcccttaattatccctgacacttccgaaatgatttatcatttaaccaatggaaaatattttatgttttttgtccattaattttgtgttactttttataaaagtgaaatttgatctgatgtgagtcagattttgcgattgttcatttacttttgagatggacaaatgaatgaaaatacaaacgaaaaacgaaacgaagaaaaagaaaagagacgaaaagatttggggggggggaaacaatgggacagcaaacactgaccagggaaatgggaggagaagcacaacacggggagggacagggggagggagggaaaaggaggggaaagaaagggtcacgcctaccaaagggacgacgggcagatcagttgctgatcagacggcacaacattcgcaaatcagcttaaaaacatttgccagatcagtccgccccccccccctaattaagcagctgtccttaattgagcacggattctctgtccggcaatgattcgctttgcttcttccattaaacgtattaaacagtacaaaaacaaaacttccctcagtgtaattacgactctttaagacaatgccttttggcttttcgccgtctttcgtctcctccaattgcctttctgctcgccttttaactgtcccccaccacaaaagtggggcccgggcccccctcagaattgtccgtcgcccaccgacccaaacaaccgaccgccgttagttttgctttgccctttgctttggctctgatcgttcgtttttgccaaggtccgctctcgagcgttggttcacaaaagcgatgttcgaagtgagtggcacaaataaacgccgaaatttaatcgccccgaaggatttgtttccgtttgccaacctcggctggggccccgaccgatgctttccctattcatacgaaagttttgcaatcgctgcgcgttatttcccccgttttgggaccgaaagtcccaaagagaacggactgagtcggacggagaacgaacggagggatttggcggcattctttgcccacgccattcaggagacgggacagaatgacatttcgctttaccaaaggtcacccatccgacattcttttctcggcaaaagtttcccccttctccttcacattttgaaaatgctttaaatgggaattggtcattttgcttttggcactcattttcagtattcccaaccaatccgcggctgatgcctgcttctaccgtggcggactgttcaattggtttgagggtgggcccgtgtcagcatttttggactccaatttgccgggctttcgtcccaccgatggagcgaaatgtttgagcaacggaaggttcgatgggatttgaaaatgggcgtttcgatgattgattgaataatagcttgcttgataatttgctcgtttgggtgattggttgttcaggtactgctcgccctcccttttctttccttgtgccaatggcacttccgacgatgggcgtttcttcaaaagctgctactttggcagagggacaattcaaatttcgtaca

SEQ ID NO: 25137 - DNA, 1005 bp, Heterodera glycines
acatatgactagggatgtgatgtctagtgatttcactactttttgctcattgttttgaagaaaggagctcaaaaaacgcatttatgcgttgaaacgtcctcaaaaattgcaatgaaaattttctcataaattattctaaaatttattcattattttcatacaaaaaattttattttaaaaagtgtgtaagttattgctttttgaataaaattttgtcattttacacaacctaaaggctaaaaattagagacaaagtcggaccggacccggtactggttttttctggatccggtccggcgattttttggaaaaacctggattgacttcttttctggattgaccggtttttgatagaccgaatccggaaacctgttgcttctgaaaatatcagtccggtccggtggattcggaaatctcggtctctactaaaaattaggtatgtcactattcgtcactactcgaaaagtatttcacattatgtttgaggcttctaacatgcatttgtttaagaaaacatatcctttggcattctttcgctcccctctatcaaccgctgctcaaattgtccgttctgttgttgtttgtcccctgttgaaaaggttttgccaattcctattttcaaaattgcttttcaactcgatttttttttttttgtataaaatgggaatgaatcggcataaatttcgtccctcctttttttcatacatttaccacatttattctctccctaatgtttttttcgaaaacaaaaaactttgtggccctttggttaataatttcggcagcaaagaaatgaccaccagtgagtggtcagttgatgaatggccaaatcattggagttgattcgccagtttttgcattccgaattgtaatttgtcagtccattcgcattaaaatggtacaaataatccaacaaaaaaagcaaatttagaattgagaagatgcaggacagaaccatcgattattattatgagggggggggggggggggggggggggggggggg

SEQ ID NO: 25138 - DNA, 1183 bp, Heterodera glycines
aaacatttatttttaaataaatcgcatgacaaaaatgaaacccttttaccatttccatttcaacagaagccatacgtaaacccattaccaaggcataaaggattaacaccagattaacacacttttatcgctcgccataagcatttgtaaaaaaattacgtaaatttaggcatttaaatgccgcaaaaaaagtcattttctctcaaatataattttatatttttctacaaattatttttttcattgaagacagcctgtgatgtatttttccaacattttttttttaattctttttggttttcaccgacatatatcgatcctgaaaatttcaaatttttcgttttcgggttttccaccgaacaagccgatgccgacctttttgtcctgtctattaaattttttgttgaccaaaaattatagtaaaaattaaatgagaaattcacttatcaaaagaaattattttttaattttaatttcacaattaatttaatttttttattatattaaatattaaagagggatttaaagaaataataataatttatttcttataaattttttatcttctaaaagtattaaaatatttattacttttaatttgatatattcgctttaaacaattatggttcgcaaaagataaaacattccattcaattgtgccgaaaaccaaatccaaattttgaattaatgttaatgccattggcatttgcattgttcgtttttagcctccacccgccccctctcccgcgacggatttccgttggcaattgttcaaattttaataaataagattttttatcattttttgtcaattggttacgattaaaaaatgcgtcttgatgtgattaaacatcgccgagtctcacttaaagtgccgtccgatgcagctgacgctggcgacgaacgttctgcgggaaataatggcacttttttaaataccaaaacttttaaataattatttttatatattcaattttacgattttattgttaattaatatatttaaaaaagatgtccaaaagtcttaaaatatcaaatgtaacgtaaacaataataaaaagtgtttattaatcttcttaaaattattttattagtgtaaataatataaataattaaaaaaaatttttttttcgtctgttaaaatgtttatacatatctatataaataaattattattaattat

SEQ ID NO: 25139 - DNA, 1674 bp, Heterodera glycines
  unsure (1)..(1674): unsure at all n locations
tcgctttactatctgaaagtaaaaaaatatatttcgattttttatttacataaatatttttcgcatttttcgagaacttcatcacaaaaatgctaaaaatcaaaaatcacatcccgactaagaatggaaagattttaaaaaattttctactaaatttattttttcttgaccaaaatttttgatttatgaatttttaaaatctggaaaatgtgaattatttacaactttaaccaagtgcataaattctttgatcgtgttcttctaagcaagcagttcatccactttttgcattgcaattttttcatcattctcattgcattattaccttcctgccaacttcgttgttccatcggttcatcaacgatcgtccatgccattccgcggatcgcttattgctctcctccttttcacgtacatcaatgaaatcgcttaaattgctcttcattaaatttaatttgtcattgtattgtctcttgagcccggaatcgagatttcggtattgagtaggaatttcgaaaaaaaactcaaaaaattcaggaaaaaataaaaatatcaaaaacagggcgaaattttttccactcccagccgtacaaattattttgaaggaaaacggcggcgggcaacaaacagcacggcaaaaaatcccagttttgacaattgctgattgtgagcgccaacccgggatttttgggattttcaaaagcagaattttcagttatacttttctctaaaatccccggtttttgctaatatttgacaagtcctaatgataataaggaagatattttcgagaatttcattgaaagctttctgagtttgggcgaaaatcccgactcagtaattgtctcacaatcagctgctcaccgcgagaatcggtagccataatcgatgttatcgccacaaccactccaagtccaatcctcattaacaccacggctttgttgctgaatgtggaaaaacatagaatatccatcttcatcatcatcatgagtgccaaatcacattttcccaatgataaaattcattatttgctcattaaaattacactcacagagaaatatattaaattaattaaaataattggataaaattaaaattcaaaaaaaaattttttttttttgcaaattctttgaaatttttcgattgcgtttatagtcaaacacttttggacacacccaatttcaagagtacccaaattttctgtcccacaagagtttattagatatttgccagtttttcgattaaatctgccaaaatataaatttaaaaccagaataataactatcaaatgcagatgattttgattaggtgcaatttttgttaaaagcccacgcgatttggcgcattatcactttctgaacagccacaacttcgcagaaagccaagacgacaacggcgtccaatttcatgtgtgacaccggcagaaagaattgcatatgtgaaagccgcttcacgagttcctttaagtgggcataataagttcattaattttataaaattttgaaattaaaattaaatttattgaaattatgaacgcggacattttattttaattattaaattttaacaaattcacctttcttatgtattggaacaaatgtgtccttcagctcttgtggtgntgagcagttccatcgatgataacggaattgccattcgcactcctcaaaattc

SEQ ID NO: 25140 - DNA, 1767 bp, Heterodera glycines
tgtgacaaagggaaaatagcatgggaaaaggggcataagaataaaaactaatgattctacagtcttacaaatattttaaatataaaatccaaaacctgcgtcaaataaccgctaggcaaattgatggcatgcgaaagcaaagataaaacgatgaccatagccaaataaaacaatgccttcttttgcgcatcgatgaagaggtatttgcgggagagttgtgtaagaacacctggaaaggaatggaaacataaaatgaattgaaaaggttcaataacccaaaacaacgtcatgaaatgatgtaggcgcttgtaagaaatttctgccgttattctgctgctgttcagttccattattttcagcttgttgacgtacatttccgttaccattagaatgttgtttacgcaaatcaacgtctgtcgatgaatttgcatccattgattgaaagtacagaatctgtgaaaataaaattatctaaagaatttgaaaacaaaacaaaagatacaatatagatagaaatataatgacaatgtcaaaagatgcgaccgggattcgcggcttatgagatgctaagaaaaatcagtccattttttggacaaaatctgttagcaaattacactcaaagcattgatgtttaaaaaattgaaatttttgaatttttaaattcgcgatccgcggcagtttgaatccgctatccgcgaccgcgggatttttctgtccgcgacccacccctcttacaattagctcctcgagaggaatcgattagtaaatcttttaccccagttttgaaacaaattctttaaatcaatttaaaacaaaacttaaaaattcattagggtaataaccggaaaagcaaacacagaattaattttttaagtgatttgacatttgtgttatcgatctcaattgactttgacctcattttattcatatattttgattttattttttgatcatccatatatattatatcacttactctacgacatactatctgaacagtcgtcagagtaagtggttttttgcccttctgatgactttttattcacgaataaataaataaataaaaagtcgaaacttcaaatttcgttttttcgcctaaaaatgatttaaaacacatggaaacattttgaaaaccacgaatattgcaataaaagatcattaaacccttttcattcgaaaaaaaatatgaagtttcgctttttgtccgaaatcgggttcgggattcgaaattggacgaaatggatgccagaatcttgatcaacgacaccccgaaaacccctggaaactttttagaacgactttttaaattttgaaaatttccgccaaaaaataggggctaccatcttaactctaatttaccctgaaatgcatgcctttgatggatgacgacttcaacttttgctgctgcttcttcttcctcggtttttgcctcatttttattgttgctgtccaatgttggggaaagtgacatgtacaaaaggcaaaaaacgaaaaagatgagctaaaatgaacacaaattttatttttgcacaaaaaaccagtcagaatgcacaaaattttaccgataaagcaagaaacactcttgaggatcgccttaacagtcgccgaaccaataaaaaatacattttcaaaattttagtacatacagtaaataaatgatgatatgaaatcttaaaatatgcgcatgaaatatgcaccaaaaattgcaaaatatgcacataaaaaatgaaaaatatgcacataaaaaatgaaaaatatgcacataaa

SEQ ID NO: 25141 - DNA, 2089 bp, Heterodera glycines
  unsure (1)..(2089): unsure at all n locations
ctggacctggattttcctggatttttgtccaggaatcaaaggtccaagtcaaatgtgaaaaaaaatccaggtccgaggcaaaacaggaaaaaacctggattttcctggacaaaattttagaatttattttttcaagtgaccgatgttttttcaagttttcaaaaacagattaaataaatttaaaaacacattattattattaataattagatatttttagatgcttctaagcaaataattaattttttcaaacattttttttgatttttaaaataatttcaaaaaatccaggtccaggcctggatccagatctcaagaagcctggatttttcctggacctggattttcctggattttgtccaggaaatcaaggtccaggtccaacatggaatccaggtccaggtccaggcttttttcaaaatgtcgatctctattatttttaaaattgtttaaatattaaggttcaatgaattggactataagccttggtaccacgctgaacgatggtcggaaggcaaaccgtacattttgataagaaaaagcaaaaaattttccggttattttcttcataaatatgaatattaaatagtgttgctgagttatttcgtaattataaaaaagtttcaaaaattatttaagttacttcaaaatgattatggatttattttctatcattgaattgttaaatttggttccaattatgacaattttaatttttatgaaacgatataactcatttaataagcaatgaacaatagtttaataatccatttttatcgttcttttattttaggatattcggacaataatattgaaaatgtgaacaggcgttcgctgatttatttgtcggaaaagtcatttagcacggagcataatgtcaacacatcacgcggattaatcatggaacanttagtcaaatttatgggtaaaaattatctaaataagaataaaaaaattnnaattattaatttntaggctttcgtgaagagtttctccgtgccgacgcgtcgagttatattcagccaattacagccaataaacgaccaccgggtccttcttcgccaccagttttttccaatgaacaattaatgttcgtacattaaaaaatgttacagattttaaagtttcgaatttaaaaaattaaattttaaaattaattaatttgaaaggtttttgtaattggtttttaggtggccttttgaccccgagtcaattacaataccggcaacagcaagagaatggttcaaattatctgtttattgcaagggcaggcaaaattcggacattggcgcagcgcaaagggcgggaatattaacaaggcaaaatgaatttcaacaatcgtttattttacagtgaaaatgaaaatttcagtaatttaaaatattcactgtcaaattaaatataaattgtcttattgatttttttattaaatttattttcccaaatattgaaaaggtgggacgcggttaaattgaactcaatgttctgtcctgatcaagttgggaacgcggatccgagaatgggtaaaaatgcataatctatacaaataaatattttaaagattaataattttttaatataggcccatgcgttgtcccgagaaaaccaaggaattccaacccaggaaataattaactgaacttttgtatgtgccatccaagtcagaagcaatatatgtgaccaattattgacatttaaattggattatgtattatctctaagaacgaacctattttacattgaaaattgtgttgcatgaatatatttgtaaaatataatgttgtagaatgattttgatcatacataaggtttttgaaaagcttttgctaattagttaattcttgaattatataataaatatcatttaaatgattttcatctaatttaattaccccacagaaaaaggaaatcaaaagggttggaatttatatcacaaatccctaaatatttaagaaaaaatgcctaaatatttaagaaatattgttcaaaaatgtgaaaaattgagtgcaatttggaaccgatttttgaaatttttcaaagttcaaattcatttttgttttctaaaaaaaccaaaaatgtggaatattta

SEQ ID NO: 25142 - DNA, 887 bp, Heterodera glycines
ccccccccctgacttcgttcgtatgaggggccgaaagagtgggggacacttcgtatttgttgggataaaatgtgaaaaaatgcggggaaaggtcggagataaaggggtaagagagaggcgacttcataaaggcgtaaataatttaacaaaaccttaaaatttaatgagtttagtacaaaaaattgaaagaatttacgaaattgagtaatatttcttattttttttaccaattatgacttcttttttatatgattttcgtttttaaatttaatttttttttttaccaaattggacttcgtaaaatttatgaaaaatttaaaaatgtcttaataaattcattcaaaaattaaagtttttccttggcggtttacaaaaaccttttaatttttcgcaaaaaattggctcgaaattgcaaaacttggtcattttttgtgtaaatccattaacaaattgcgctcaaattttcaaaaactttcccggcggcgcctatcggtaccgccggactccccccccccgttccccaaaagttttttggaaaaatgcgccgcaaaaaaaagcggttttgaaaagcagaaaaaatttttgattcacatgactggaggactacgtaaattttggtctccgacccctccttcgacccccccccccctggatttcgttcgtatgaagtcgggtcgacccccttactatttaatgtatgattaattttatcggctattcctataaataattctaattaatataacaaaaattatacagaaaaatcatatccgcatttttaaaattgaaaaaatttaaatgatttaaaaaatgattaaggaataaagttgaagcttattttttaaataaattaaaatatttacataaattgttataaatatttaaaa

SEQ ID NO: 25143 - DNA, 2001 bp, Heterodera glycines
  unsure (1)..(2001): unsure at all n locations
gccagggaacggatttatatgtggccaaaaaagctccaaaaatatgtgctaaaaagctcaaaaaaggccaacantatgtgccaaaaattgaaaaaaaactgtcaaaaaataagttactttctcaaaaatcacattttttatcaatttcgctagtacaattctaatcaaaaacatttcaattctttgtgacgtaaatatttttctcgcttcaaagatttatttatttttctgttttcattgataaaatttaaattttgccttaaaaatgaaaaaagtcataaaaaggtcaattcaaaaagtgcaaaaagagaaaaaactaaaatttttgtacatttttgtacatttttacaagaatttgagtgcaaaaaaagctacttttgtaaaaaaaattaaaaaaaaaatccccaaatatgtgctaaaactactgaaaaccaaaatatggtttcattttaatgaatatgcttgatgccattttcaaaaaagccgaaagacagccatattaatttataaattgaaacccactcgtaataattaagttaattttaaacaaaaaaaaatgaaaactgaaaattttcaaacaaaaaaaataaaaatatatcccaaaaatgacattttataaattaaaattatttatgacgcactatgaatttctttgatgaggatatatatatataagacaaagatgtaaaggttgcaatcattaatgctgtcaaaatggcatcggcatttggcatagatatgcttttagctgtccaattgcaacaacaaaggcaataagtgcgattgatgctctatgtccgaaacacacccattttcggaccaattaactcaccatttcccaaaccaggagaagttggacgacaaagccaatctcaacttggcggagggaagagatcggcgaatttggcacaaggcagtcaacgagggcgacacggttggacgagttgagcgagtgcaaacgagaacgaaagaagaatggcgaaaatggagggagaagaaagtgaggaggacatgaggaggaagttgcgaatggggaggacttgccaatctgacaaatttttttatcacttaattcgatgatcagggacattcatttttttctgcccaaattctcattttctttgcattaattatgctttaattttaaatgctttcaatcatttaaattgttaaattctatttctcatttcctctcctattatctccgacacatatctcttgcaaattgacggcggtctcatccgccatatttaagccattcattctttcccatcacttctcacatcattcacttaaaaaattgtttttaatcgacaattccgcttttttgcaattctcatcaatttttaaattaaatttcttcattggaattttattgaaatttgtgttttgcaaccagcaaaccggaggttttctgagcaagtttaccgccacacaaaactaaactgcctaatttcaaattgtggcagaaaaccggttccagcctaaattatttttaattaattttgtgtcatcaaaatttcataattgttttccccttttttacaggtgaaaagtatctgacattggacaattggaaattggacgagctgaacaaattggacattggacgcactgaacatttggacatttgacattgtgtgcaccgtctcggagcgtgtctcatcgcgcaggccagtctcaattctcaagacgcgccccggacagttacacatattccttaatttttccacaatttcatattcaaaaggtttagaaaaaataattaatttgttaattttacatctattactctcctgttatatatatatttaaaagtttttatatttatgaaaaattgaatatttgttttttattgcttttggtattttaatttaaaataaagaatacatttttataggattttactttatgtaatatattctcaagttcaatacaggtttcaaaactttctgtagcattactatcattgtttttaattcttaagataaaatattccaa

SEQ ID NO: 25144 - DNA, 1057 bp, Heterodera glycines
tttttcgaaattttggcaaattttagctgtattttgctcacttccgaaagtttttgctgacaacaaaatgagatattacaaatgaaaagtatttggtttgcaattgtgaagctagaatttaataaaaatttggcatttttaagttttaaaccccttttttggtagtttagtgtattttttaagtttgtttaagcaaatattgaattttttggaaattttcaagggttaagacttaaattttggcttttttagtccatattttggtccatatttggccatttttgagctttttagtccatatttagtgcttttatagtccatataatttacaaccctatttataaaggaaaagaaaaaaaaagttaaaatttaaaatttattggcaaataaaaaagaaaaacaaaaatgagtgatcgaaaaattgttgaaatgataactactcggcaaaaaacactcaaagatgaaaaaccaaatttggtaaagaaaactatggaggcaattgaatttttttgctagcaaattttttgaaaattgctgtatccgcagcattcaaaatttcatattttgtgcataatgtacattgccctactttctcccgacccaatcccgtcgtaaacttatccatctgttcatcccatcccaagccaatcctatccatctcatttccaatgttatcgtgccatttcttcctattcacctctgttgcatatgccatccatttctcttattcccttttgtgttttgccgtcattacccctcatcctatccaaagtccatccccattgtgcgagtatataagtccatccaatttccccgtagggggctgcgagatgtctgcggtgggtcagtctgtgccatttcttgcctttggcaatcctttcccaaataaccaattgcattgacccacccaaaatgctctgaggttgttgttacccaaacttattcccggttttttaacacataattatttgtcaatgcttttccttataataaattcctctctcctaaaacggtaatttgaaatggctgaaagccttaaattcggggacacaacaaa

SEQ ID NO: 25145 - DNA, 1404 bp, Heterodera glycines
tgaattaaccgtcctttctatgccatccctcatgtcggtcctagtagcctcccccccccccgcttcccccaaattacacttcccattgcgtattttgtgcctttttttgggtccaatgaccccctccttatgtgttcccctttttgtccccacctctccgattgcctccccatcgttggaatgcgctgcctccgcccgccgtccgtgtactgctagcgccccctccgctggtcagtgccggcgtcgtcgcttcctctccgctgctcatcaccgactgaatggccgccgaagcggcggaagtgtgcgcgagggcaggcaaagtgccaacgcgaccgatctttttgaaggcgcgcaacggaagccgttcgacacgttcgttgtgccgcttgtcagtgcccacttgggacgggggcttcagcattcgaacagaaagcggacaaatttatgcagagcaaaacttggccaatcttttcttggggtaattaggaagtcgaaaactgtgccaaagtaatttccaatcgatgccaatttcaatttgaaaatgtccccaggtggcggactctcttcgctataaatgcccccgccaggcgaccctttgccgccacttttgccatttgtccgattggaaattaattttccctctctcagccgcaaaaacaaaataagcagcatttgcgagtgaaattctgttggtaattgctacaattcgaattgattgcatttgtatggcctcgggggagagaagaagagcagaggaacgaagaagagaagaagaaaggtgagacaacgacagaaagggaagagggcattgagaagggaatgccgtgccgatacccggggcccattatttaattagtgccgtgccgacgacaccccaaccaattaattaagtttgttaattcatttgaattttacaaatgccaaattgcgccactctctgctgctgctgttgctgcctttgttgctccgtcgctgctccgtcttgtcccgagtggcgtcgtcgtgcctcgtccatttgcgccttttggaaagaaatggaggagcgcagcaaagagaattcggacagttggcgccgggggccactgaaaaaccagcgattataaagaagctgaaaatccttaagaaatccgagatcggcataaatggaaaaagtgccgacttctgtcgccccccccccgagcgattgcgtggcgaaaacgcatttcgaagttggaaaaggcaaataaacaaatgggggaaggcactaagcaccatcaaagtggggcatttgacttatttgccgtttttcccccttaattttcggttttgccgtcatttccgctaattgtttcacttttgtcgggtcaattaagccctttttgataattatttacttccgctgatcccttcaaattgtgccattgt

SEQ ID NO: 25146 - DNA, 1202 bp, Heterodera glycines
  unsure (1)..(1202): unsure at all n locations
agaggagtgggaagcacttctgaaaaagtatttccaaccctactacgtttgtttantgggaaattttgaaaattngacctctttttgtaaaatttttggtnntattccatggattttgggtacgctttcttttctctcccctttccttttctcgaccccaccccttctgctgattgtcagatttgaatttacttgctgccttttgcagatgccattcgcgtgaagcgcctcgtctgttcgtcgtagaacaaccaatacatctcatccccttttgtgtgtgtaaacatcacaatcccttcgaacgattgcttttgctgctgcgtcggttgaatgcctttgctgctctccaccgtttcaatggcttttccgagttttaccattgcatttgctattggcaccaccgctggcgacggcacttcttttgaagaaaaggaggtcatgccatttggtgtgggtgtgggcgcttgtgagtgtgaggcgatgttgttgcatttttgcaaaagtttttggtgtctcgtggagctaattggcgcaccaaaagcaccgtcctaatagaaaataattttattcagaaaaaaaatgtggaaggaattctttaacttaataatgcggaattactacttatagtacaataaattttagcttaatcggttcacggtaagttataaaagcagaataaaaagacggttcttataatttagaacatactatagaatgtccgatttcattgtcatttttaaaaatttaaccgttagtcattttaaattaaatcaaatttaattaatactggcacaaataaaaaaaagtcgtaatttttaagcaaatcgccgccacctgcacagtgattttgctgaaatgttcgtgcaattggaactcgctgctgatccgtccgtcctcctttttgcgtgggctgtttttcgtctcgcaatttccttccgttacttttggctcttccagcgtttgtcgtttgctttccgtgtcgactcgcattttggcaatttcgagcatttcggccaccatccaaagcggctgctgttggtcaggcaatgatgaaaaacgggccctcactcgggccaataacagtgaagaaatggcgtcagtccctttgcgcttcatgttgctccaggcggacaacaaatcaccattcaagtcgatcagaacaccaagtcggtccaccttgagggagcccatgcgcaaacacg

SEQ ID NO: 25147 - DNA, 1190 bp, Heterodera glycines
taaacgcactttgcctttatctgttttcttggccggtggtggtggaggacgagagacagccttaaagaaaaaaagttcgtggattcgaaaacaacaacggcaaaaagaatcttcgtcagtgaatctcactttggtttttgcatccgcttttttgcccgatgacggcggcggaggacgcgaaacagccttaattaaggaagcggaagcaaatatgaagacaagacgaaaaacaagaaacaacgcacttttctccctttggttgtttttgcacaatcaattgggtccgctgaatacagagaagttggaacatcctgaaacgtattaataataggaatttaaaaaggaaaagcgcaaaacaaaactcactattcccgcgctaacgccctttttcggatgcggaaggcccaccggagagatcttatgatgggggcaatcaaacaaatgcaaaaattattggaaaaagcgccacgctgtgctcactgcggttgatttgagtggtttggtcgggcccgaaggacgtgaaggacggacgacagccttaagacagaaaaaagatgagatcgtgacgagggaatatgccgaaaaacaacaggaatattattcactttgcctaagtcggctttattgttcggcgcgctcggagcagcagaagttggagcagtacgaggaacaagcgaaggcggagcagcctaggaagggcccgagggagcgattggagtgggagaaacgacgacacgcgcggcagacggatggacgggcttaacagaaaaaagggaatgaaaaagcgcaaaaagaaatggcggcgtggacaaaacccacttttttgtcgtaagcaggcgaattgggccgctttttcttctcttttcgaccgaaacacatttatcagtacatgcaaagaaaaatataataatgctttgagcaaaaatttatcattttagaaattatttagcaaaaaaaataatgaaagaaagcgcaattagggaaaaactgtaggatgatcagagggcaaaaagaaatgatgaaaaagaagagcaaattaattccttttatatacatatgtatgcgcactttgggttaactccgctgtgcagagaaaagcctagcacatactatctcgtcgtttctctttttctttgcgatttctctcactttggcgtactatctcttcatttttaatgtgtaaaaacagg

SEQ ID NO: 25148 - DNA, 1122 bp, Heterodera glycines
ggcgccaaaaaatgagagcaccaaattaagtttactacaccccagaaacgtcttgttttggtaatacaaggacaaatgggcctgatcaggacataaccattgtgcattagcaaaagatacttaataagatccggcgccaaaaaatgagagcaccaaataatgttactacaccacagaacgtcttcgtttggtaatacaaggaacaattggcctgatcaggacataagcattgtgcattatgcaaagatactttataagatccggcgccaaaaaatgagagcaccaaataatgttactacaccacagaacgtcttgtttggtaatacaaggaacaattggcctgatcaggacataaccattgtgcattatgcaaagatactttataagatccggcgccaaaaaatgagagcaccaaataatgttactacaccacagaacgtcttgttttggtaatacaaggaacaattggcctgatcaggacttaagcattgtgcattatgcaaagatactttataagatccggcgccaaaaaatgagagcaccaaataatgttactacaccacagaacgtcttgttttggtaatacaaggaacaattggcctgattaggacataaccattgtgcattatgcaaagatactttataagatccggcgccaaaaaatgagagcaccaaataatgttactacaccacagaacgtcttcgtttggtaatacaaggaacaattggcctgatcaggacataaccattgtgcattatgcaaagatactttataagatccggcgccaaaaaatgagagcaccaaataatgttactacaccacagaacgtattcgtttggtaatacaaggaacaattggcctgatcaggacataaccattgtgcattatgcaaagatactttataagatccggcgccaaaaaatgagagcaccaaataatgttactacaccacagaacgtcttgttttggtaatacaatgaacaattggcctgatcaggacataaccattgtgcattatgcaaaaatattttataagatccggcgccaaaaaatgaaagcacccaattaatgttattaccccacaaaaacgtcttgtttttggtaatacaaggaaaaattgg

SEQ ID NO: 25149 - DNA, 1776 bp, Heterodera glycines
cgagggtgcgaagaggccgagggagtcccttcggtgcaggaaatttgttgagttttaaaaattttttaattgctttttaaatatgccaaaaaatgtaggcttaacttttttagtgaaaattcgatcactcatattttttgctaattgagcagaagcgtaccaaactttgcagggatactccccggtaaaggactaacttacactgaaatgagcgccgagctagctggctcaaaaaaattttcgaaaatctgagtctttcgtttttatttattttttgcaaaattaattcttaaatattttttcagaaagggttctgaaacgcaccaaattttatttacatgttagtttaggcactctgatgctttttctatcaaaaagggagatgaataaaatttttaaaaatttttaattcctttttaaacaggccaaaaagtttaggcttaactttttttcagaaactgatcagaagcgcaccaaactttgcagggatactgaaaggaagagaaataacctattttaaatattatctagtcagttcatttaaataatttttatccaaaaaatttttttgggttttcggggcagtccccctgaaccgatgcgcccagatttatggggagaccgaatccttccggaatagcttcactatagcctgtactttaattctgcgttggatttttgctccccataattgtttgagtaccccaaacggacacttgaaaaaatcgatttacttttgttttcggggcagtccccccgaaccgatgcgcccagatttatggggagaccgaatccttcgggaatagcttccctatagcctgtactttaattctgcgtggatttttgctccccataattgtttgagtaccccaaacggacacttgaaaaaatcgatttttttgttttcggggcagtccccccgaaccgatgcgcccagattatggggagaccgaatccttcgggaatagcttccctatagcctgtactttaattctgcgttggatttttgctccccataaatgtttgagtaccccaaacggacacttgaaaaaatcgatttttttgtttcataaatatttttttcagaaagtcatgcgcacccgtccgatctggcaagttaagcaacgattgctgactagccaaaaggttcggtgccgtgatgaaacgaaccagcactgcttaccccgcggcacccggcacggtcccccgaaggaatggatttaattaaattctctccttcgggttgttttttgcataattaattcataaatatttttttcagaaagggttctgaaacgcaccaaattttatttacatgttagtttaggcactctgatgctttttctatcaaaaagggagatgaataaaatttttaaaaatttttaattcctttttaaacaggccaaaaagtttagacttaactttttagtgaaaattcaatcactcatttttcgagtagtgatcagaagcgcaccagattttgcaggggcctaaaaaggtcaaggaaaggcgtctctgcgttgatttagcagtagtacctatgaatttaaattttctatgaatttttaaagttttttgaaatttttttaagtgcaaaagtggtggtgtctgcaaaaaattttcaccgggtttaaaaaatctaggaaaattagtaagcatttgtagtgttccgatacgtatccctgcaaaatttggtgagcccctgatcaattacaaattatttatggacgatcaaatttttagaaatttttatttatttttgcataattaattcat

SEQ ID NO: 25150 - DNA, 849 bp, Heterodera glycines
tggggcgaattattggtggtattgtcgttgtgatattgctatttgccggtggaataacggttgtagtagtgccagctgtgtctggaataattgatgtaccggggcgaattattggtggaattgcgttgtttcacttgagatttgtcctctttcgacctctccaacgtagtgatttaagacattattttgcgattttattgcttctcttggtactccaatcacttggttttttctgtcttgatctttacttatcggaaatgtgtactgaagttcgtggactactatggcctgtccgggccatgtctcagttgttactggtcccatagagaaatgcgtgtcccaatattctcccgagggaatgcgccacatcaaaagttcaactgctcctggcaggcgaacccaatcatcctttccgatcgtgaattgttcgatttttagggaatccccccatgatgtgacgagcatttccccgtctaaaattcctccgttcccttcttcgataactgtttggacattgttataacagttcactccgtaccagccgtactccttcctaattgatttaaaactttcccagcgcttctcgcttattctgttcattggacgataatttaaagaattttgacaatcgtccagtgatgtttccgattcgaatttcttcggcggatgatcaagagtaaccacgcgtaagaatgattcggtacatgccactgtcgtaacattccagcatttgaatactggaaatgaacgcggaattcgtatgggtatgtagagaattgatttgttcatgattggctgcgtctcagtcgggagagtacagttctgctctgctgggaaactcatagtcac

SEQ ID NO: 25151 - DNA, 1753 bp, Heterodera glycines
  unsure (1)..(1753): unsure at all n locations
tgggcccgccaaattcgccataaaaatgtttcatccatgcgcgaattttttgatcgttactttggttcagcgagggcggtaacttccgtggaaaactccctttccctaaagactatccgctgaggccgccgacgatgcgatttgcgtcgaggatagtgcacccgaacagtgagcggactaccgaatgaatggattgacggcattggtgacattaaaacttgtcctcaacatttagttgaccgagacgggaatgtgtgcatttcgattcttcatggtattttcatctttttgtggggcggtggcggtggacaaatgttccattaaatgccgcagtttggttgagagtgccaaatataatcgatcaaatagcgtatttgaaaaggcaatcaacataaacattgacttgtaacttctttattgccattttcaagaaaaatacactaatttttcaaatcattcctttaccattgtttttgggttatgagtttggactttcgattctttcgtgatcatatttccaaccatttcccatgcctctactaatccctccaattgtcccattttttttacaattctggcccggttcggttgtcaagcattttctctttagagcctggcgatgaccgatttggctacgaaaaggcgtccgagcgttggctgcccgtccacacgggtcaatcgatacgaaaacattgcgaattgccaaaaatcgtttcttttcagttgagaccattctgatttcggtcatttcgatgctttccgacccgaactttgacagtccggcaaatgttgacgcagcggtaagcgaaggcggggagagacgatagatattttcaaattatgcaggaaaatagagaacatttagggcaatagaatgatttcaaatccattcaattcgggcacacttgaaaggagttatacccaaaaacggggccgacgcccaattgtcctttttcgaccccccaacctccgaatttttttaaaattcttattttactatgtttttttggcaaaattccctgagagttttttttttaatttcgactagaggaaacgatgcggggacggcagggggggaactgtttctctttttagggacggaacaaaaagcgcgagtctcttaatgaaaatatcgaattacagatttttagcgcattttaggattgatgcgataaataattttaaactgatattgacgtacgctaaaaacaaatacttcagaaaacgcaccgcgagaatccgacggagtacaggcgtcaggtgtttattcatttcatttttcctaaatactcgtacaaaatgtttcatgaaaattgttcctttttgttgttcaggtcgcgcggtgtgtgcgggaaacggaagagcaataggcaaatgcgtcggagtgaacggatggcaaccgaactganggggggaggacactgacaaatgaccaaccgaccgacccttttgaccccccccccccccctctcgtgtcaattttcgcctttcatcgctttttccttctttgtgttaatcgttcgtttcccgtttgtctcaattttcgttcaattcaaaaatcaaattgtttttgttttggtgttaagacagaactgattcagtcaatcgaatgcgaaaagtgttaccagcagaggtcgtattctaatcatttttgtgctgttttctatttgaatcgcttgagatcgaaatgaataaagtcaaattttgatacgacctgtgttgttggtacacatttttcccctggggcctttcg

SEQ ID NO: 25152 - DNA, 1191 bp, Heterodera glycines
  unsure (1)..(1191): unsure at all n locations
taaatctaatctatgcaatgcttgggggccttttctatttaagaatgnaaaaaacaattataaggctcattcaaattccttgttttggcttttaatatcacctggcgcaaaaacaataataattattgttttcacaatactaatttaaaattcgaagtttaacctttacccaataattagtgctgaatcatttcccaaatagatttttcattcagtaaacataaataaatggtcacaaagtccattccatctcgatgccattctcgaaaacccagcacagactcctcagtcctagggccatacaacggacgattgagacagggcgggagtgtctcgggaccaaattttcatacgacggcacaacgacggggatcttttttcacattatttttttgtggcatgcttttttcaaaaaaattttgcggatcgtgggggagggaggggtccaacggtgcctatcggcaccatcgggtgaaaatttgtgcgccaatttgttaacatattttgtccgaaaaatgactaaatcttgcaattttaagacgctttttaaaaaataaagaattttatacaaatataaaagcacacagacaaaataaatggtaaattgtttaatggagtatcatttagaaaaaataaattggcgttaaaactattataagtgtgttagagaggttcatttgatacggctagcggtgagtgggtaattttttgcaaaaacgtattaatttcggtaaaaaaattatttcaataaaatacgattcctggaaatcattgaaatattgtttgaaaaattgtctttcaaaaaattttaataaattctgaaaacattcaaagaataaataaatactattttatttaaaaataagacaggcattatattattagaattttaacttattattattatttcaaaatgactctttccacggatatatttgtgatgagcggaggaagagcattgctggcaattgtgaccatattaatcaactgcactttggtgtttgtcacgcttaaagcaaaggattaataattaatgaaagataaaaaataattaaaattaaaatttaattcggcaattttaatatgttgtccgttttccaaggaatttgaacagcacatgcaattggctgatcggtgccaactcggcatgcagtgccatctattcatttacttattttgaccaatttggca

SEQ ID NO: 25153 - DNA, 1458 bp, Heterodera glycines
tttcgtcttgaaggcgaaaattcatcgcccaaaacccgttacttccggatctttctgattgattttttaattttttctcgcatcgattgacagctttttaatcccatcccacatacactaaattaagaaaagataatcatgaaatttttgattaatcaaaataaccaagttaaaattatgggcagtgcaatgcagtgattcaaaaccagcaatacgagtcgctttttgcattgcactttcgttgtcacgaacaataaggtgcactttttcagcgttcacaccataatcattaagaacttggctcagcaaaccacacattttttcgccagtatgactgccctaaatgtctgcaaaattgttaagtaaaaaccccttaaccgaaccttaattggaactgcttccatcacgcgaaaagtcggttccatattactgccaatgtaatgaactgtgacacttaataacgaatgttttccttcgtgagaactccagccatcgattgtaagagaaatgaagtctgttttccgaatgtcctcttttacgcgagctttcacattcacatacaaattcctcaggacatcacttgtaaaatgccgacgacttctaaattttaaagatttaaagaccatttttgttttagaccttattttgtacattggagctaaaattgacaataaatttttcaaggcttggtcttcaacaaaagagagaggcaatgatgccgaacaaataagtgccattactgcgtcatcaaccctttttgtcatttctccatccgaactccattgtgcttaatcgactttgaaattttgaaatatccaaataattacaaaagcttttgacgatttttggctgtgaagaagagaacggcgactcatttcttggcattttggcaggtgttgggctcaagcacaagcgagcagtacttgtacttgccaacaaaagactttgaattgattgttggccatttggtttcacttttgctttttcctcttccttcaacaattcttcatatttgtccggatgatgtcgctgcaaatgttctcgtagacacgtcttcggaaaagttgtagactttgagccgtaagaataactacagctcaaacatttcgctgttccatgagaaattttaaaatatttaatatatttgctttgtggtggcattttcaagctaaaaatgtaaaatgtgttaaaaagcatttaaaaagagatatacaatatgtagaatataaaataggtaatattgaagaaatatttaatttataaaattcataaacattatcaccattactcacattaagatcaataattaggggagtatttttacttcgaaaactcaatctttaggggtgcatttttcccgaaacttcgagcattttcacgaagctcgaagcacgaagttcgaagcccaaaaaacccgaagttttcgaagctcgaagcacgaagctcgaagtttcgccc

SEQ ID NO: 25154 - DNA, 1508 bp, Heterodera glycines
ctgtctattacatgagtatgtgtgatcagagaaagagagaagcaagatatggaagggagagagggaaagagaaaggaagtgaccagaggtgcgataggacgagagaaagaatcaaaaagttgactaatcatccgtcatttatacgatcagcaatgtgtcagagagggggagggggcaatagagagagagagagaggagggaggggggggggacacgcaaaacattgatcaggcagacaaataaagtgactgatcattaacaatgtgatgagagaaagagagagagcagatagagagagcagagaggagtgagagagagagagagagaaagcagaaaatgagagagaggagagagatgacaaagaatgagtcagacacatagatattttgatcagtcgttgcacctgatcagacttgagtgggagtagcacgacaggataagagtgaccaggaacttacttttctgtttgttcagcagcagccagactcggctgtcccatcggcttggctccacctcgtcattcgcttcctgctcaatcactgggcaccaaaatcggtaaaataaggaggggctcagtcgattggacatcaatttgctgtcgtatttaataataaattaaaattgaatttgatttgcagttcggacagtgttggctccagtcattcggtggcattttcattgcctggtggtggttccagtctgcttacacagaaattgttgcgcaaaaaacagccttccggtgaatgaatgggagatgattgatccaaaaaaatgtgtctcatcagtttgtgatcgattagtcatgaatcgcttgaaggacaatttgatcggggggctaacatgatcgggagggacatgcttgagaaaatttaatccacagctatcccgaatctcccaacttttttcgatccaaccccttacaccggttgtcgacatgtccgtgactgaacttctcctaaggcacatgaaatatcctttgatcacaaaaaaaaaaaattcagaaacggaattcctaggcaccaaaaattttcgatataatgttcaaaattccgatttttcggactcggaaattccttcccctccctggcccagggttctaatacttgaaattcagtttttttttaaatttaaattagctaaattactaacttctcagatgatcattttcggagtgatgaccttgttgagctggaattcatgccacaaaaaaagcagcagcaacaatttggtggagttaatggcacaccggcagcgatgccggtgccattcttgacaaattgcacccatcattcggcacaatgtgtgccgacaacggtcaatgaggacgcactgcggagcagtccaaggtggaggaggccagcaaaaattctgatcaattggaattagagtttttgatcaaaatcgttatgtttgccaacgaaattttttcaattctcgatgggctaaattgatgattttctatagaacacttttctggagatttttttgttttgattatttctaggttt

SEQ ID NO: 25155 - DNA, 1093 bp, Heterodera glycines
agacaaaaaactgagtgattgaaaactgccgaattaaggcattcctttgtgagaccacaattgaacatgaataactacaaacaaagaaaaacctcttcgtcaagacggttgtagcgagcaatatcacgatggagagttctgaggagaatcattccaacctttaatggaaatgatagagaaaaaaaaaatgaaaaaatcaccatcccggaaaggaaaatgacgatgacgagtgagttcataatggaaaaccattgaatgtttgtatgaggcattgagtcgagaatatagtcccaacgggaagaccatttcacatcagttggttcccaaacaattgaatacgagtaaatcactttgaactccttttctcccgctccaatgggctggggagcggcttccattccgcaattcattccacctttgctttcatgtttgatgctaaaataaaaattaagaatgaaatatatccaaaaatcaggtacttaatctagccaaaattcgggagtaattctccccctccctcgcatctgtgcccctcggataaaaaaccgttaattttctagcttcatatcattcttattgttagaggtttttattgaaaaataaatttaatatttttcctagaaaaaacatctaaatgttagcttaaagttgtcaaattattttatgatcgtgtaaactgcaatagagccgataatccctcgcaatttaaaaatttccaccttcttggctgcactttgatccgaattatacggccaccaattttctcatcgaggaaatttggatcatcagacatgtctctgttcgaggaaattttatttaaagtataattgtattagacacaacctgtactcaatcttaatatctacgtggttgaacaggtaaaaactgtcctgctgtcggtaacgtccctaaaaatatgtagtcaatagaaccaaaagaatactcgaagaaatagttacatccaaaacgcaggcatctttgggcttcccctcctttgtcacataacaacccattgggaagccagtggtgcacacattcatattttgctgatttatgaagcagaaagtgacaggcatgggtgtcatgatcctga

SEQ ID NO: 25156 - DNA, 1164 bp, Heterodera glycines
taatagttaaaatataatttaagtttacctaattttatattattttttacactaattttttatttttcatataattttaaatattgaacattaaatatttttgtatagatttgattatatttgagttgttttgaaaacttagacttcaatttataattgggaaaaataagcagatagatttaaatatttactaaatcaatttatttcttttcacaattatagataaaatttaaaaaaaaaaaaatttcttattttatataaaatattctctctaacattaataacatttattatcatttaattatgtcaagcttgtaaaatttatgaaatatttttttgttattattaatttatcaataaattttcacttcatttaaatgattatttatatttttttttcattgtttattttttctttactttaaaataattaattgcttaaattttgcaaacacatattcataaaaatatgtgattgcttttattttattttaaaataatggcaattttttaaacaattagttaattaatttattaagcaattgttgaaattatgtttattttaatttttattccctgaacctaatatttacaaaatttaattaatcttaatgcatgttttaatttttattttttaaatctggtgaaatagttgattaaaattacccgttaattgtattatttaatatagatttcaaacatattaaattgaaaaattttaaattaatttgcgtttcaaaaactatagattttaaaaatttttgattcgccttaactgctgaactaggaaaaaccacttaaaaaaaacttaatttagataaccaaattaaactaatatatttatcgtagaaaattaaataatattttaacagagatattagttaaaataagttataatacttatttttcaaatgtgctaattttgaatttaagtatcattttacaaatattaaatttaaaattattttttaaacagtaattttctagtgctatttaataaattttcatttaattcagatatctttaataaatttcaataaatttagtttagaaattttttggtgttttataaaaaaaaaataaataaaaaatatttattaatttcaatttcaattttggtcttgaaattaattttatttagttggtttaaatatcttactgttt

SEQ ID NO: 25157 - DNA, 1962 bp, Heterodera glycines
tttttctatatggtcttatttgtaagaaatgttttgattggggggtagtgccttattttcatctaaaagagggaaatttctgaaaaattgctaatttctaacaaaattcatataaagtcttaaaaattttcctcttgcggcgccaatcggcacagccggcctgcaaaaatcctatttttttcttaaaaattagccaaagatcttaaacttttgttcttttttggacaaaatttgttaataaattgcattcaaattttcaaaaatttttcccggcgggacctctcctttcgcacattcaccatgttttttggaaatgtgccgcaaaaaatcttaaaaatctgatttagtgatcccgaatgctctgaaatttatgatatatataataatagaatacatttttggttgaataaaatgtaaaaatatttgaagcaattttgcaaaatgttcttatttttaaccatagtcttattttttggcctttgttattttgaaaattttgagatagaaaccctggattaattgacaaaaacacccataaaaattgactattctggcataatttataatccttaaatttggtcattctttagacaaaatctgtgtaatttatgccaaaaagaattgaatcgaggcgatacatcaactaaagtaatgtggagccaaacacatcattcatattaattaatttttttgtgagattttcacatgcttgagcatattctaataaaggcccaggggtaaaaacttttgactttttttttattaaattactatttaaaattctataaataaataattaaagcaaaagcacaaattagtaaggcgatagatagagctcaaagaataaaaaaagagaattgataagagaaaattgcaaattagaagaacaaaatgaaaatggattattttataattttatttacactttcatttttaatacaattttcatcgcattttacgtcaatcacagtacacctttgctttacttattgtacattacagtacacttttgctttacacgataaatgaaataaaaaatttaaaattcataattaaaaagtgaattaaaaaatcacattaaaaagtgaattagaaactcacctttcctttttgtgaatatgagtcattttatcgctttatcagtaaaatattcccttttgttcaatgttcgaatgcatttaactgataaaatgaaaaatggccaataaaattttgtcataaatcgcagcaaaccatagtttgcgttcataacattttgaaacgagttggaacaaagacaaaaatttttcctgctttcatttatttgcaaattatcattttggaaaatttttaataaatttaatttgctgatttcaggatttgttaagaagctgcaactgttgcccaaagggatgtcagttccatcaaatcccctgccggatcagtccgcctccattggcaatctgagcattgggccgggtgcaaaatacgcagaaattgtcgatggcagcggcggttccgcactgaatctgttgctgttgatcacactggccaagtcgatcagttccgcgggcaaagtgtcaaaactgagtgacaccgtactccgcatggactacgagcaccgtaaccgacccgtgcagctgacggtcaattgggacgcggtgacgcacgacaaattggacttttaccacttccattggacaaagccggaggacgaagtgttggatcatttggaggtcgaagcattcattttcattttgtaagaaaacaaaaaccgaaatgatgacgcatcatggagcgatttcaaaatgtttttcaattggaaaagtttttccaattgaattaggatggcataatgccaacaaagaaggtatattattctggtttcggcagagtgcttatttgatggaacactcgtggccaatcgacggtaagcatcaattgagcgagttcaattacgtccattgcgaggggggggggggg

SEQ ID NO: 25158 - DNA, 1306 bp, Heterodera glycines
tttcattaaatttttttaataattattttaaattccattttttactttctttatttttaattttattctgttttttttgtttcattaaattattattttcatttttttttttgcttcattaaattttttagaaataattattttaaatttatttattgatttttttattttagttttttttctattttaattttattttattaaaacacttaccctatccgctggtgttccttgaatccaaagtcaaatttgtggacattcctcggcccctctccactgggcattgtaacgcatgtaattttcatagtaatcggaaaagcattttcatccccgtccccgctctgccccagcttattaatctcctgcatgataacatccgcattattctgggggtacgcccgatacggcacccaaacaggggaagcaagcccagcacccgtaattgccactccaaacatccgcacttttcgcttcattttttcttccgtagtttttaaagccacctttatcatgttgtcgattgcgtccttcatcgcttcatcggggcgctccacatccgggttgacacgaaattccgtaatatttttcgtaaatccaaatttttcgcaagttgtcgattggtaatccatcaatttataattttccatttcttcagcaaaattatttctgaacaaaaaaaatttttttgaaataattcttaaagggtattatcttataattgtatttataattgtttaagaaattatttttttttatttaatttattaaaaatcacttacccgattgatcggaaatcccattttttggccaatgggacggcgggttggaaggagttcacgcgtttaaaagacattttaaacaagaaattgcagcagaagaattaaagagggtagagagattttaaaagaaaaaagacgtaagtaaatagtaatagatttaattaatgcaaataaaaatagagcggagagaaataaaattagagcgtgaagagagtttaatgaaatccaactatttagttgaatgatttgcgatttgggccgggtgtgcgaaataggcaaaaagggggaggggtctagtcacgtgactgtctggggttgccttaattttgagggtaatcaatcatttccgtagacaactgtcacattttattcaaaactgcaaaaaaaaatcgtctggatattctttatttcgaaagtcatcaatcatttttcttgacaggttgcaaaattacgggccatattgcgaaatagttggaacagaaaactaaaaataatggagacatttaaataagaaaccaatcaatcac

SEQ ID NO: 25159 - DNA, 1313 bp, Heterodera glycines
taaaaagtgatctggtagatgaagtccacagcaatggcggccatgttgccaacacagagcagcgtgatttcgggtgatccggtgaacgagccgaccgcatccgcgcaaatgtttgtcagtgccgagatcagcacggccggcccagtctcgaccagcaccttgggcacaataattaaatttattttttttatttttgttaaattaaattaaaaacgaaataaatttaaatataaatttatttaaaattgaatccgctctctcaaatgataggatagactttctatccaagagtctcgagtcgggtcataagaccaaataccggttccgagaatttctgattttttcgggactcaatccccagttttggaaccatcctgtgaccaaatattggtttcgactctcgagagtttcttattattttaggcgctcaatctcttgtcgctgtcctgggatcaaatgtcggtccatgagtctcgagaatttcgatctcgaataccctgccgcacttttgattaatcattaccaatgccaatcgttggctgagcaatgtttgctcctctcccccggctgttgatccgccgcttgctgcatctgctgatgttgccgatagcatcagtttgcgctttcgtcgcatctgatcagtgatccgttgccaagcatgcttcaaaaagtgatcgatcaatcgattaatcaacgaattttaaagcgatttgtgccaaaaacgaaaaacatgccatcatcagataggcatcgtcaacaccgatggccaacaccaaaaaaggcgtgacgcacagaacggagctgaaaaattgggccataaatgtgatgaagaagggtaatggaaaatttttgatttaaaattactctaaaattttagaaatttctcatttttgaaggccatgcacccacccagctcaaggtgccgatttatgcaaaattcggaatttacgataaattttttgattatcatccgaaaatgacgggtaaattttttagttttctattgtaatttagagcgttttttcatgggaaaaatcgaaaaaaatttataagtgaaattctctccaaaaaaattttttttataaaaaactaagaaagttataaaaggaaaaaaatcagttcagtttttttcgggggagaggaacgaactattctcgatccagtgagatgcttaagacttttgatcaaaagcacatccctccaatcattctttttgacataatatggtggcgaaaaaattttcgcaaaaaattgctttggcatttttgccatgtcttccttttttaatttttaaattttttacgaatttccta

SEQ ID NO: 25160 - DNA, 1281 bp, Heterodera glycines
tatttatcattgggcttgtcaatcaaaagggaaacaacaaagatgctgtttttaacgaataaagggcataggttattttgaagaagtgtcaaagaacatgcagcaataagcctgcaaaatttaataagtggaaaattcatggagtatagaattattttcagaaaagtgtccacatacttttggaaaaaatatatttgcaatttatcaacaattttggagaagtgagttagaaatgataaacttcacgattcaaaccaattttcgttgctctaattaaccgcgataaaaacattcgaatcaattaaatagcttctgagataataaggtttatcataaaatgtcatttaaaaataaaccctcaattattggtgtgaacgatactttccaaacatgcacgcgttttgcgctcgagctatttatcatcgggcttgtcaatccaaagcgaaacaacaaagatgctgttttgaacgaataaagggcataggttattttgaagaagtgtcaaagaacatgcagcaataagcctgcaaaatctaataagtggaaaatacatgagtatagaatttattttcagaaagtgtcaacagacttttggaaaaatatatttgcaatttatcaacaattttgagaagtgagttagaaatgataaacttcacgattcaaaccaattttcgttgctctaattaaccgcgataaaaacattcgaatcaattaaatagcttctgagataataaggtttatcataaaatttcatttaaaaataaaccctcaattattggtatgaacgatactttccaaacatgcacgcgttttgcgctcgagctatttatcatcgggcttgtcaatccaaagcgaaacaacaaagatgctgttttgaacgaataaagggcataggttattttgaagaagtgtcaaagaacatgcagcaataagcctgcaaaatctaataagtggaaaatacatgagtatagaatttattttcagaaagtgtccacagacttttggaaaaatatatttgcaatttatccacaattttgagaagtgaggttagaaatgataaacttcacgattccaaccaatttttcgtgctctaattaaccgcgataaaaacattcgaatcaattaaatagcttctgagataataagggttattcataaaatttcattttaaaaataaaccctcaattattggtatgaacgaatattttcaaaacatgcaccccgttttgcgcttcaagctatttactctcgggcttggtaatccaaaaccgaaacaacaaa

SEQ ID NO: 25161 - DNA, 1224 bp, Heterodera glycines
cccgatgctaatctgttccgcagagcctcttcaaaatttttttcccattaccgcaagagctgcggaaattgtgaattaattctcagaaaaatggctatctcgttttaggacaattttctatctcgtaaccccgatgctaatctgttccgcagagcctcttcaaaattttttccattaccgcaagagctgcggaaattgtgaattaattctcagaaaaatggctatctctttttaggacaatattctatctcgtaaccccgatgctaatctgttccgcagagcctcttcaaaattttttccattaccgcaagagctgcggaaattgtgaattaattctcagaaaaatggctatctcgttttaggacaattttctatctcgtaaccccgatgctaatctgttccgcagagcctcttcaaaattttttccattaccgcaagagctgcggaaattgtgaattaattctcagaaaaatggctatctctttttaggacaattttctatctcgtaaccccgatgctaatctgttccgcagagcctcttcaaaattttttccattaccgcaagagctgcggaaattgtgaattaattctcagaaaaatggctatctctttttaggacaatattctatctcgtaaccccgatgctaatctgttccgcagagcctcttcaaaattttttccattaccgcaagagctgcggaaattgtgaattaattctcagaaaaatggctatccccttttaggacaattttctatctcgtaaccccgatgctaatctgttccgcgcctcttcaaaatttttccattaccgtagagctgcggccccccccctttcactgttttgcattttatttatatttgtgcaatttggtgggacatcgccgccgtttcaattcgtctccaaaaatggaggggttgtgggaagaaggaagtttggagcaataaaaggacaaagatgaggacgaaagtgtggggccaaagtgaagggggggggggagggaagagaatgcaaattgacattgggggggaaacagcggagaatcattcgttcattcattcagtcctttcgttttgtcctttcgtcgtttcgtccgttttccctttccctgcgaatggccaccaccgaatgaatcacttcttcttctactgttgtcccctccctttgctcattttctgtccgttcaagggggaaatttgcattaaattctcaaaacttcccaaaaa

SEQ ID NO: 25162 - DNA, 1555 bp, Heterodera glycines
cccccattcttcgggattgccgaaaatgtttcaacaattttaaaacccccatttcgtaggaccatttgaatgaatttctcttcggcgttttggacggcaacggcggcgacggcggcgacaaaccctgtgaagatgaggcggagcttatgcgtcaaattgagcaattagaggaggaaatcatccgtctgagggctactcttgagacttagcagcgtcgatcattggaaaattttgacgatttatttattgtattgacccatcttgaaaattgtcccggtaatactactgacgatgatccccctatttgaaaaaattaaaaaaaaaaaatttttctagaactaaattgttttaggggttaccagggtcggagtatccgattctgacatcaattttcgatcaatttcgaaccacagaaccggattcgaacaagattcaaattcacaaatttttttattcaaaaaagggagggggtaccctcgacagtattaccatggtctcagttcaaaaatattgccgcttttgtaatttttatttcatttttcttttccgattgcatcataattgtctcctttccctccgagtgccaccgatatcttcagttcttctggatgccattgacaaattaataaaacatttaaagcgaacccaatttatttaatttgtgttgcattcatctcttaattatctacaagcaaaatttaagaaatttttttccccataactttttttagtctattactttttgaaattttgtatatggatagagaataattggggctattgaataataccaagaacgttcataaaaaactggttggttgcccttcctaaaatgctattaaaaatattttttcatagagcaacgaatacataaatacatcagttcgatgtctacaaatgatgttacgaaaggaaaagtatcgacgaaaattcgttgagtatgacggcgttaaaagcattcttttggcattgaatggtcgtgccaattttcaacttcaataccaactcattttttgcctttggtcggttgggttttttcgcacttttaactcaaaaataatcctggaaaaagtttgttaatttaatttccccatttccttccgaaatttgttggagaaaattgacaacagagagatggtgcgcgaatcggcactgcaaatggtccaatgcaaaacgctgaaaacccttgaattgatggacgccaaaaagtttgacgacccggacttggtgagagactgcataacttttggcaattttggatgggaaattaaatcaaattcaggtggacgacattgaatgataaagtggattattactttttataaagcttataaataacaaacaaattctcagaatactcatcaaaattctcgagaccagcagcgacccattgccgctcagtgttgctgctcatgacattggcgaatacgtccggcattaccatcgcggaaaaacgtttatcctaccgcaaaatttcagaataacaaaacaatttcattttatttataattgtcgaacaatacccaagcaaacaaacaatgatgaagatgttgag

SEQ ID NO: 25163 - DNA, 1933 bp, Heterodera glycines
ctttgcctattttagacttttggtgcttaatgcctattttcctatttttatgcatatttcgccatttttggcgcctttttcagaattttcggaaaaatccttaaccaaaataaataaaaacgaaaaatacacccctaagaatcgaccccaaaaaatttcagaaaatacatccataggattgaaaaaaaattttcacaaataaatttttgctttgcaaaattttttggtttaaaaatttgtccttattcgaaaagaactttaaaatatttaatttaattcatttacaattgaaatataaccagaataactttttaaattaagttttacgtgttttgctacctaaaaaagagtttaaaaaattttacttgcctattttagtgcctatttaatggctattgcgatttttttgccttttaagtgcctatttcgctatttttagtgcctaaaaaacgaatccttattaattgctaattgcatgtgcaggtatttattggctatgtgaagaaaagtgcaacttacgaaggatgcgttgcgataaaaatattcaatcaaaatttttacaatgtttatgagaattcaaaaaattttatgcaaaagattcaaagcattcttccgcctgacgagagaaagcatttgatcacaatggttgacgcgtaagaaatttataaaaaattattttaaaaaatattatttttaaattaatatttggaatttaatatttaaaaaataaatagcggaaaactgaagaaacagaataaaggattagtcataatggaattaggcttacaaagccttgaaaaaagtatatatgaaaaaagaaaaacatttgaaagtgatccgaacttatttgaggatttgaagaaaattgttgagccaattttggaactgcacaaaggcaatttttataattttttaaattcaattagtaaattttttttaatttactggtaataaatacctatttcatgtttttagtcgcaatccatggcgacataaaaccggataactttatgtatgtcaaaaaagtgggcgaaaacgaaactctgaaactgatcgattatgacggtgccactttcataccagttgggctatttgaaaacccgagaagactggcaaataaagttgtgccacgtgagttttatgtggccaccccaacttatgcagcaatcgaatattatgaggagaatatgatggtaaaaatgaattataaacaattaaaatgccttttcaaataaacattgattaaaccattaaagctcacaactaaaatggacatgtgggcacttggaataataatttacgaactcatattagtacaagcgaccttcaatgagcgaattagcatggtaggttttaaaatgctaattagtaaacaattaaaattaaaattaatgggatcaagggaaaaatcacgcaaatactgctgggaattggcaacatttacttgggcatgcaaagaaacagcagaggaataaaactaacggaagaaagtttatttgaaaatgactcgtgggcgaaaaataattgcgcaagtttattgaccattttgaatgtgtggcaaaagtacccgaaaactgcccttataataacggtaagttattaaaattttaaaaattaaattcgaaaatttactaaaattatgcaatggaaattggtttctaatagagaccggatgggatcaggaaaaataaaattttctcaatcgagcgatcaattataaatactagatagcatttgaataaaccttggcacaaacgcaaaaaaatggattgaccgggatcgggatgtcgagatcccgacccggtatacgtgtcgatcgtttttccaaaatattcgggattgaccgggtggattcggtcggatccttccgatctcagttgtccggtctctagattctaaatagttaaatttcagaaccttttgcacccggaca

SEQ ID NO: 25164 - DNA, 1120 bp, Heterodera glycines
ttttaaaaattttttaattgctttttaatatgccccttaagtaggcttaacttttttagtgaaaattcgatcactctattttttgctaattgagcagaagcgtaccaaactttgcagggatactccccggtaaaggactaacttacactccaatgagcgccgagctagctggctcaaaaaaattttcgaaaatctgagtctttcgtttttatttattttttgcaaaattaattcttaaatattttttcagaaagggttctgaaacgcaccaaattttatttacatgttagtttaggcactctgatgctttttctatcaaaaagggagatgaataaaatttttaaaaatttttaattcctttttaaacaggccaaaaagtttaggcttaacttttttttcagaaactgatcagaagcgcaccaaactttgcagggatactgaaaggaagagaaataacctattttaaatattatctagtcagttcatttaaataatttttatccaaaaaatttttttttgggttttcggggcagtccccctgaaccgatgcgcccagatttatggggagaccgaatccttccggaatagcttccctatagcctgtactttaattctgcgttggatttttgctccccataattgtttgagtaccccaaacggacacttgaaaaaatcgatttttttgttttcggggcagtccccccgaaccgatgcgcccagatttatggggagaccgaatccttcgggaatagcttccctatagcctgtactttaattctgcgttggatttttgctccccataattgtttgagtaccccaaacggacacttgaaaaaaatcgattttttttgttttcgggggagtcccccccgaaccgatgcgccccaaatttatggggagaccgaatccttcgggaataacttccctaaaagcctgaactttaattctggcgttggatttttggttcccctaaaattggttgaggaacccccaaacggaaaacttgaaaaaaatcaatttttttttttttttcggggccagccccccccaaaccccacgccccccagaatttttgggggaaaacccaaacccttctcgaaaaaagtttccccaaaaaacc

SEQ ID NO: 25165 - DNA, 966 bp, Heterodera glycines
  unsure (1)..(966): unsure at all n locations
aagtgcaaagtggtgggtgtctgcaaaaaattttcaccagggtttaataaatctaggaaaattagtaagcatttgtagtgttccgatacgtatccctgcaaaatttggtgagccgctgatcaattacaaattatttatggacgatcaaattttttgaaatttttttaagtgaaaaagtggtgggtgtctgcaaaaaattttcaccgggtttaataaatctaggaaaattagtaagcatttgtagtgctccgatacgtatctctgcaaaatttggtgagccgctgatcaattacaaattatttatggacgatcaaattttttgaaatttttttaagtgaaaaagtggtgggtgtctgcaaaaaattttcaccgggtttaataaatctaggaaaattagtaagcttttgtagtgttccgatacgtatctctgcaaaatttggtgagcccctgatcaattacaaattatttatggacgatcaaattttttgaaattttttaagtgcaaaagtggtgggtgtctgcaaaaaattttcaccgggtttaataaatctaggaaaattagtaagcatttgtagtgctccgatacgtatctctgcaaaatttggtgagccgctgatcaattacaaattatttatggacgatcaaattttttgaaatttttttaagtgcaaaagtggtgggtgtcttacagcttaacaaggcccaattaagattatttccagaaaatctcgcatgaattctcatttttaaattttttacagatttttaaatatttggatatttttttggcttaccaaaacttcatcgaacctggctctttctattctcattcaaatcgctccaaattttttttacagcttaactaggcccaattaagcttatttccagaaaatctcgcatgaattctcattnttaattntttatagattttaatggtttggaatttttttttggcttaacaaaact

SEQ ID NO: 25166 - DNA, 501 bp, Heterodera glycines
tatagtctggccggtatagtctgagccaagtttagagcatcataacttttttatttgtgaaccaaatccaataaacttggtatcattcgaatgctcttaacaagctctattggctttccaaaaaatacaaagatataccgacatataaaaaagttctaagcaaaaattctgaccttttggtagtcttcatgtttcaacttttttataagctgttaaatcgcttagaaatgcttatcaaaagcttctaaacatgtagagctttcgaaggtttctaaattcataaaatttggccagctgagaaaaaaaaagttatgatgctttaaacttggctcagactataccggccagactatggtgtcccccacccaataattttaactaaaattaataattgaactactcttgggacaattggctctttgaactttttctttttaaactttatttaaatgtcggagaggtcggtcggataaattaagcgaattgggggggggggggggg

SEQ ID NO: 25167 - DNA, 160 bp, Heterodera glycines
cacgatgttggcaaagatgtcgcggaacagctctggtgcagtttcccacagctttttaatcgcgttgtatgcaccaacgaaggttccgatgaacttgttagcgttgttcgcaaggaatcctccaactgcatccagcacgctcttgaagtcagttgcccaa

SEQ ID NO: 25168 - DNA, 1282 bp, Heterodera glycines
ccttgctgttgaccaactcgcccattcattcagatttggatttaatttttggcataatcaaaaattttttcctaagggatttcaaatcggaaaatatttgaccaaaaacggcaaaatatgcaaaaaatctgaaaatatgtacaaaaaatggcaaaatatgcatgaaaatacagaaaaccccgaaatatgcataaaggcccaaaatatgcaaaaatatgtaaataaaagtcccgatttttatatgcaaacacaaaaaagaaagttttttcctactatttagagcatggagaagccaggaaaaaatgcatttgcatattttttgcagccctggtcataatggcttagaaatataaaacagtctatcctaatcaagtacaaaaaggcgttaaattacgttaaattattgttaaggctagaatggaaacaaatgaccaagagcgatccagatttgttttctcaaacaatcctacagaagaaccggaattacttatgcgaactgaatttttgatagaaaaagcgagaaatgatgttaagcagtggttgactcttcccaaaaacaaagaaggcgcagatatggtaataaatttagatcttaaaacaaggacaattttaatttagtgcataaatgaccttgaaagaaaaaaaacctttggacaagaagatttgtatagatatgacacttaaatgaagttccctttagttttttttagaatccttggagacccagcgagcaaaggaccgtaagaaaagttgaaaatgcaccctcccttccaccacccttcccttttgttaattgatttctttatttggcccgcttagggagtactgtaattatttgagttgatgatgagaaaagttctttaaaaataaataaattaaaatcacaggcacctatattttcttttatcaaaaattttaaattttttatcaaccccctcgctgagaatcagcacgaacggattccaaaggccacacagcgagaacctttgtgacggtcgttccagaaagcaagtcgattccagctgccgattgttcattgagtctctcaattgctgcagcaagtgctgccgcgttgttttgttcaggaggtcgaagtcgaatcacgtaagggacgatcaaatccaggcggttggagctgcagtccaactaacattggactcgagtgcccctctaagacacggtcgaaaagatgttgaatgaggctctccatcacaaggtcgggacgctcattgtcctccaaaggcaaaatcaaggatcgcacacctcccactcgtgtttctca

SEQ ID NO: 25169 - DNA, 849 bp, Heterodera glycines
taccgtgtttgctctaattatcgccccggggggattattgttcaacctcttcagaaagggggggattattagatacggggggaaaatggagaaggggggattatttttcgacagatttattttgtgtaaaatttttgaaattttttgaacatgccgccaaaaaatgtcatcgcgtcaaaaaaataataattttttattgcattttttaaagaatttgtgaatttaacatgaaaaattcgaaaaatgctaaaatatttttaaaaatattgaaaatccaaacccaaacatattttttccgatattttttggaaaatttctcaacaaaaattcaagaaaatcaaaaatacacccctaagaatcgacctaaaaattttcaaaaaatacactcataagaaattgaacaaaaatttaaaaaaacttaaaaattggggcaatggtaagtaaagttttgtggtttcttcgaaaaattatttaaaaatttaagaaacacattttctaggctggaaaaatgtgctgatcacgaatctgagctcggattttgcaaaataattgattttatctatgatttttatcaagtactagattttttccaaaattttaagaaattagtcgggcgtaaaaaaacacacaggatgttgtagagctcaaaaagagctttcgaatgagctattgaatgtatggagaagtcatgtttttagttatttacgattttttgaaatttaattactagcccttaatggtcatatgagacggggtttcttttgattttgtttttttttgtctggggttcgagcccgcttggctgtgtttattaaatttttaaacttattttttgaagaaaccacaaaa

SEQ ID NO: 25170 - DNA, 1236 bp, Heterodera glycines
tttgtcaaaaatcccggtcccgtgcaactctatttaacatttttaaacatattttatgtacattagtcgcaaattttcttccataaaattagcagcgctactgatgaaagataagaaacttaaccattagggcatttgcatatttataatgcgacaccctatataaattaaaaattaatttattcatttaaaaaaacttaaacttagtttaaaaattttattttaaatcacaaatttaatttttttttataaaacttattcaatttgtaaacagaatgctttgcaggctcaccatgcataaacaaatttgtggcgggagcgggggggggggggagcaaaatgcgcattcacccgtcgcatcagctattagcagcgccacaatgtggtgccatacttatatctatgcatgtggcatcatcagcattatcattgtcgttgtcattgccgtgttgacgtgccatcaccatcgccatttagggcgcaataatccgatgatccccccgtcccaggtcgatgagtgacctgtgcaagcacacgccgattcgcgcacgatcttcgtccatccaaaaagagtcgtcgtgatcgccaatatatttttgcccccccccccgccctcgcccaacgacgcggggagtacagcttaaaagcgcaccaaatttgagtgtatgagtgcgtgagtgtatgtgtgcattgatgatgatgtgggaagagatgagatgatgcttcactcattgcactaagtgccgaaaatgtgttccacccaaacaaagtgccgcccgcaccctccctcactaatgatgatgatggacaaagcatgagactgaccaccactcactgactcaatttacgctagttgcgtttgtgcaacaaaacacagagcactcaacaaacttatctcccaagagcagatgatgggacgtgataatttttgagaaatttctaagaaattgcaaaaaaaaagccataactttttttatcgtactatgggacggttaccccacatttgcgccctggacatttcttcaaggtccaaaatcgtgttcaaacttaagtcttttcaatccctgatcgcttaaacagcataacaaatgatagaaagtgattggacccgataattgatcgtcagcaaatttttgaaaaaataataaatctttcaaacaacagaattattattcctgataaaccaaaggaccatgttttcttaactttaatgctgtttaggctattagggcttga

SEQ ID NO: 25171 - DNA, 1008 bp, Heterodera glycines
acattgcaatcagcatgactcaaccctccaacattcaattattgggactccacccaccagcattccaatctctgggactcaacccacagcatttcaatcactctgcgactcaatccacagcatttcaatcgccgggactcatgcaaccagcattccaatcactgggactcaacccaccagcattccaatcactgggactcaacccaccaacattccaatcaacaggactcaaccctccagcattcaatcaacaggactcaacccaccatcgttccaatcaccgggactcaacccaccagcattccaatcactgggactcaatccatcatcgttccaatcgccgggactcaacccaccagcattccaatcactgggactcaacccatagcatttcaatcgccaggactcaagcaaccatcgttccaatcgccgggactcaacccaccagcattccaatcactgggactcaaccctccagcattccaatcgccgggactcaacccaccagcattcaaatcactgggactcaacccacagcatttcaatcaaaaggactcaatccaccgcattcaatcactgggactcaacccaccaacattccaatcactgggacccaatccaccaacattccaatcagtgggactcaacccaccaacattccaatcaacaggactcaaccctccagcattcaatcactgggactcaacccaccaacattccaatcaacaggactcaactctccagcatttcaatcagtgggactcaatccaccaacattccaatcaacaggactcaaccctccagcattcaatcactgggactcaacccaccaacattccaatcaacaggactcaaccctccagcatttcaatcagtgggactcaatccaccaacattccaatcaacgggactcaatccaccagcatttcaatcagtgggactcaatccaccaacattccaatcaacgggactcaatccaccaacattccaatcgccgggactcaaccc

SEQ ID NO: 25172 - DNA, 1348 bp, Heterodera glycines
tattaaattttaaaaattttttaattgctttttaaatatgccaaaaaatgtaggcttaacttttttagtgaaaattcgatcactcatattttttgctaattgagcagaagcgtaccaaactttgcagggatactccccggtaaaggactaacttacactgaaatgagcgccgagctagctggctcaaaaaaattttcgaaaatctgagtctttcgtttttatttattttttgcaaaattaattcttaaatattttttcagaaagggttctgaaacgcaccaaattttatttacatgttagtttaggcactctgatgctttttctatcaaaaagggagatgaataaaatttttaaaaatttttaattcctttttaaacaggccaaaaagtttaggcttaacttttttttcagaaactgatcagaagcgcaacaaactttgcagggatactgaaaggaagagaaataacctattttaaatattatctagtcagttcatttaaataatttttatccaaaaaatttttttttgggttttcggggcagtccccctgaaccgatgcgcccagatttatggggagaccgaatccttcgggaatagcttccctatagtctgtactttaattctgcgttggatttttgctccccataaatgtttgagtaccccaaacggacacttgaaaaaatcgatttttttgttttcggggcagtccccccgaaccgatgcgcccagatttatggggagaccgaatccttcgggaatagcttccctatagcctgtactttaattctgcgttggatttttgctccccataattgtttgagtaccccaaacggacacttgaaaaaatcgatttttttgttttcggggcagtccccccgaaccgatgcgcccagatttatggggagaccgaatccttccggaatagcttccctatagcctgtactttaattctgcgttggatttttgctccccataattgtttgagtaccccaaacggacacttgaaaaaatcgatttttttgttttcggggcagtccccccgaaccgatgcgcccagatttatggggagaccgaatccttcgggaatagcttccctatagcctgtactttaattctgcgttggatttttgctccccataattgtttgagtaccccaaacggacacttgaaaaaatcgatttttttgtttcataaatatttttttcagaaagtgctctaaagcgcaccaaattttatttacaacttaattttagcactctgatgctgttagtatcaaaaaggaagatggagaaaaaattttttgggaaggttttccttatattttggttatatcgttttgcttttggt

SEQ ID NO: 25173 - DNA, 1227 bp, Heterodera glycines
cccgaacattccgcaagaagaacgaatgcaaaatgggacacactgaatttgtgttgaagcaataattaaaacctgattaaacaaccattggcatgcagcagggacaacatccggcaccgatcaaaggcaaagggaggggaggcggaagaaaaggcatcggaggggggaggacgggcaaaagctggtgggcacaacactgccaaggaggggattatatggttaaagagggagtgaggggagggggggaggtagcggcgttactggagaaatgccaataggagcagcagagcaacacaatgggaagttgacaggtccaatgccgccgaagggacagcaaccgccgaagccgaactggcgtttggaacgaatcaatctggcgggagtctcgagagaagaattaagcgacgaggacgaagaagaaagagaagccaaagggaggggacaaagttggaggaggaaaagcagggacaaaagcagcaggggacagccgggggacggaagcagggagcagggccgagttggggcggacaaaggcattgccagaggcagcgaatgatgggatgaatgctgcgcgacccctgggaggagggcatccgcaaaccctgggaaagttccactcaattgtacatccttttgtgtatgggttgcggcgggcgacaaacacttagctgcccctcatccggcactgtttgcccttctcgccaaattcgccgactgaacttgaaaagactccgatcgctccctcctcgacgaactttcattttctgcctttaaatgtctgatcactcactgcttttatttgttacaatgtatttttattaaagaatgagttaaattgaattcgtttctttctcttccattcttttcttaggaaacatcggatggatgggatgggaagggatttaccattgttacaaagtctaatctctgtttctcattactctctctctttcacacactctctttctctctcaaattatctgacgaaacgaaatgtgcttacaaagggagtgataatctctttaaactggtctaagagaaaatgaaaaagcaaaaatgcggcgtaagagaggcgtagccaatcaaatcggagtaagcgaaggcgagagagggagagagagagaagagagagagagaaagagagagggatagagagggagagagagagtgatatagagagagaagagagagagagaaagagatagggatagagagggagagagagag

SEQ ID NO: 25174 - DNA, 947 bp, Heterodera glycines
  unsure (1)..(947): unsure at all n locations
tttttatgagtattatgtaaggatattttcgacaaaacataaccaattccgagtttcatgaggcatcaacttcattcttttcttgtcctgcccaattgtctcaaatgtatacctaaaaatgcgctaaaaatgatcaaacccgtttttagccgaatatcctgtcaatatttccctattagaaacgatactgtgaattctttcgcctctttaattcattcgtgctttgcttcggattagtctaaaaatttctggacgccaattttacatattagccattttttattttatttgtgaccgcaaatttttacatactagccattttttattttattgtgaccaagcatatctttcctcgtatttctgggatttttttcagaatgtggtcatagaataggtgggttgaattatttgtattttttatgagtattatgtaagaatattttcgacaaaacataaccaattccgagtttcatgaggcatcaacttcattcttttcttgtcctgcccaattgtctcaaatgtatacctaaaaatgcgctaaaaatgatcaaacccgtttttagccgaatattctgtcaatatttccctattagaaacgatactgtgaattctttcgcctctttaattcattcgtgctttgcttcggattagtctaaaaatttctggacgccaattttacatattagccattttttattttatttgtgaccgcaaatttttacatactagccattttttattttattgtgaccaagcatatctttcctcgtatttctgggatttttttcagaatgtggtcatagaataggtgggttgaattatttgtattttttatgagtattatgtaaggatattttcgacaaaacataaccaattccgagtttcatgaggcatcaacttcattcttttcttgtcctgccccaattgtctcaaantgtatacctaaa

SEQ ID NO: 25175 - DNA, 2610 bp, Heterodera glycines
tatagtatgtttctaaattgtttataattaaaaagttttattgttgacaaataaaataaaattaatactttggggaaaatgcttcttttcaaatgccgttgcgcagcttcaagaaaaaaaactgtggatggaagggccaaaaaagagagtaaacatttgagatggcgggggaggaggaaaaacatagagagcagtgctgaaattatctatgcttactagtgatgctcgagagtatcggtctcaagtctcgggaaatttttggtctcgaacatcactaatgcttaaattagatgacgagcattggaaaagccccgaggaaaggggcgataaatagcgtttaaagccaaaaaatgcattaagcctagcaaactgaaaaagactaatataacaacatttttgtaaataggaaataaaatgtaaaaaaagactgggtttcaagatgacctgctggtcctggatttcctagacaaaaattcaggtccaggaaaaacccaggttgccgaaaaggacctagacctgtatccaggaataatccaggcctggatccaggtccaggtcgaactttatttaaaatattacaaaaaataaattaaatattaaaaatttcataaattttattcaatgtacaaaaataaatcttacataaaataaataaattcaaaaataaataattaaataaataatgggaaaagcaaaaaaggtgatgaattattgccgtgaggtgggaaagttcgagagtctcggcggaaaatgagccacaaagaaagaagaacattcccacgcatgaagaccaaaagcagcaaagattgtgcatggatattagccaattcaaaagaacaaatttgttttgaaaaatggctttatccatggacaagtaaatccccgctgctgatgcgtttgcattgctcgaggcttaaaggattttgacacgagaaattttcgcttttcaattaatccatagaaaatttgttttcgagagccggaaaaagatttccatgtcgagatttgtgctaaacttcgatgtcatgactactcgtacaaaaggcaactcgtacaatggcttagactaggcaaaagctttaggcttagacctaaacttttttaggccaggcttaggtttgcttgggcccaggcttaggcttagctgaggctttaatttgtaaaaatttgtacctttttacgagttgccattgacccccaaatttcagccttaagcaataacacaacattcgaaggagacccgggatggcacttcttccgacggcatttcccttccgacgcgacgccacccctcaggcgccggccggccgtggcacttccccggtcttcacgtagtagcgcagctcctcctccgagttgaccaccacaagtcggcgccgcacaatcgtatcaccaccaagcacgatccgctgttgttggagtgctaaaaaggggaaaacaatgaaaaaaataattttaaatatttttgagtatttaatttgagtctaacttcaaaaagtgtcgaaaaattttaaagaaaattattagaaattggacccaattaaaagacaaatcaatttgacaactccaaattataatgcgggaaatgtaaagttaatggaaaatgaagaatcaagacaatatcaaaactactttaaaattacttcggagttaattaacataattaacaccgaatgctgtaattttacccaaaattttgaatttatcgagggtctaaattcggtgcttcggttgaaaatttgtcgcataaaaaccacaaattttttttagaagtgtatgtgccacaccggtgttcatgcgcagcgtcggtgctgcgctgaccaccggcgcgtccggcagccgtcgatggggcgactgggccatctgctggtgcgcgtgcggctgcgtcggcggggtcgtcgccgggcgggtttgcgccaccggcgccaagcgacgactgctgcgacaaaaggccgccgagctgtcgctgcagctgtgggttggcaatcagtgcggcacggatttgctccagggtcagctcggcgggtgccggagtgccgtcggcggtgccacgccgggcgcggctgctaaggccaagcgtgcgcgacataatgtcgtcaccagggcaaccgtccactggcggacaggtggtctgaagaagtgcaataaattacccatctaattggcaattaattaattagtttggggtaatgaatagaactcgcctgagggcatggtgcaaatgggcaaatgcgcaccagacaggtgtactgtatttgggtggtggtctggtaacggaatgactccacggtgacgcgaataccgtagtcggtcttctggggcgggcacaccagcccaacatggtcagcttggcagccgtcctaaaatggtagaaaagcattagacaaaaatgtgcgatagtgtattagggcaaggtatatatggcctaagcggtagtcaaaaaaatccatatacctatctcacggatcaataaatggaaatggcatattttaaaaagtgagtaaaatattatttaaataaaaagtaagttatatatagtattttaatattttccacaaagtttattttagggtttctttttcagaataatgctttcctacgggaaaggtg

SEQ ID NO: 25176 - DNA, 1665 bp, Heterodera glycines
tctcaacagcacgccttttggtggctgtcgtgattttttgcgcaatgacgcgacttggatcccgttcatatgtgcgttatgtcgccatgcggatgaattcatctcgaagtaaagtccaaatccgtcctttgcatttgtcgacactgctgttcttgaattccaatcgccaaaatttagttgttccatcggcacttgtcttggtaatgtgtagagatggctaccatgctgtagctttgggctattcttttgtgttaatttgctgttgcatactgtaagaatgatattattatctttaaaaacgttaaaacataaaattttgataacaaaatttgattcaattataactaatttgtttttttaatattgataatatttttgaaaattttattagtttcaataaagaattttttgtaattttgaaaaaatttattggggcccaaacgtgagggcccaactgacgtgccgtgggaaaacttgaaaattctggccggttattcaaaaaagttacttcgaaagttcaatgatcacatttaaagtataaatgatgtctcaccgttgaggtccattttgtccttgaatttgaaaaacgccggtgtccgccaatagaaattgttcctcatcaatctcagtgcgcttgtaaattagcatacccttgcattggtctgacgggccatgaaactcacaccgccaaaatttcttaagtccatcgttactgaatttgtaaaacacataaagtgcaccatcatgcaccaatttatcattatttcgttttgttttaattacttgctgctggttcattttgtagttaataaaagcttaaattgtcaaaacattaaaaataattttacttaaagattaacaaaattatttgaatgcaattttttccatactcactcgtacgaaaacggcggtacgaaaatgtctccggtacgaaaacggcggtacgaaaacgtcccccgtacgaaaacggcggtacgaaaacgtcctggcccgagttaaacaaacttggtatcatttgaaagttcgtgaagaggagaaacttttcaaaataaattcttggcatttcgctgaagtccaacacattgacaccagcagaggataaaagtcgctgatgtacgcggtgaagcgttgggagactgaattggtgcgacatttgctgatcattggcgcgaaaactgttgtttccgactgatcagaaaatttcattttcatgcagcaaaacgacgaccaacagcagatgtgatggtggcaatgagagggaatcgcaattcacaaacaatcggacggatgtgcttattagtgcatagaattatatggaaattcatatttgtgccatttatgccatatttcgcgattttatatccatatttttctatgtatgtcctagtgattatattcgatcacttttatgtatgtacgtcagggctgggcgcaattacggattgcggattacggaaattgcggggtttttggagttacggattgcgggtcgcggatttttgggatttatccgcaattttgatccgcaatttgacttttattatttttcgagacgatttcttgcaagattttttataaaatgaattttttttcaatttttattaaaaggctacccatatttcaatttcatctgacttattcttggtaatttttagtattattaat

SEQ ID NO: 25177 - DNA, 2050 bp, Heterodera glycines
  unsure (1)..(2050): unsure at all n locations
aaaaagtaaaatttttcaagaaaatcaaaatttcagagttaagctgagagaaaagaaattagctctgtaaatcattaaaatgtcattaataatnttgagtgaatgaattcanagggggaattgtcttanatattcatatacgacaaaacaattccactttccatcattttaccactcataatttatgacaaaagaaagatggatgttagcaaccagaggccatatgtttcatgtttttagtttaaaaagaatgatcaaattatttatttcttctcaaaaatttttcatttttcacaattcaaaaaaatattattttctctgtgaaggttttttatgaaattcttttcaattttccatttggagcaggcttgccgcgggatgggaaggaaccgggattcgttcgggtcggcttttcacgccgagaatcgggacggactcgggcgacaaccctgagaagaagcactggaagaagcatttctcgtttaactctgccaaagaaaaaactgcatttaattaattaatacgaattattataattaatcacgatcatttattatttatgtatctttttctttgattgattatacattcaaaaattaaatgcttttcccgccgaaaacaaattttgccgcccgttggtctttgatgttttggcgttgtgtgcgatattattgcgaaattcccccttctctcttttccattcattcattcgtataaaatcgctttccgttggctctgtgctcaatttggcgagccaaaggcgcgctgttttggcggttggcgtaaacaaaaacaaaaaatacgaaagtgtcgagaatcgagaatgaatgaatttgcttaccttcccatttatttgctccatttattctccgcgcaaatgggccacaccttaagaaatttaaaattccttatctaattcgtcattaatttagcaaaattatgagattttacatattcaaaaatagttctcgatatttttcaaattgaaaaatcggaaattctgtaaaatttctccattagctttttgggattttcccattttttgaattgtcacattggacttttttttgtttttggttttctctgttggctttcggcattcgtttgttttttgtttcgttgtggtgaaattttgtaaaaaaataatcttctttacctgattaattttttttaattaaattaaaatataccaacaatataaacacgcaaaaatattttttaatggattttaacttttgagcttttctttatataaatctgagttgtgttgtgttgtgtttgttctttaatttaattggaaaattcttttaaagaaattcaatattcccttttttcaaatgaaaaaatgagtccattttatttttagagaaaaattatttatttatttattttcaattggcccaaaaagctttttcttaactgttttaaagccaaaagatgcaaaaaatcttttttgtttgatttgtaatttgagttgaatgagtgggcgaattttgtacaacaaaaagtcacaaaaccatcgcaattgtttcaacaatttgggcaattttcttttgccatttgtccaatttttgtcggtataaattaatttttaatgctaatttaatcttcagacagtcataaaaatgcttttctacccaatttctgtttctttgattttgttcaccttttttgccggaagcgctgaagcgcaggtaaattcaacaaaatattaatgttattatttttggtatatttcctcaattatattaataaaaaatatatatgcataaaaatgaaatttatgccaaaagtaaatccaaaaataaattttcggttttttcttgttttgtatttttttctgaaatggttttttcataccatatttagctatttttgagattttagcttaaattaaggaattagaagaaattttgagaaattatacccttatttggaaaattatctgcatgttttacagtttttatatgcatattttgcgatttttcgtgcttataaattaaagtcactaattattttattattttttaaaattaataacttttgttta

SEQ ID NO: 25178 - DNA, 1284 bp, Heterodera glycines
  unsure (1)..(1284): unsure at all n locations
atacataaantatgcattaattagtaaatgaattaatttaaaatatacaaaattaattaattaaattaacatactntaaaaaaataaaaataattaaccatgagctaaattaactaaaaaacgtaaaataaaaaataatccatttattattatgatttttccaaaaaaaaaagttggcactttttgtgtccgacttcgaactgcgcactgtgcagctgccctcctaccaacagttgtcccaccgtgccgcgcttgaggccgaaccgttgctgaacgcgtactgctcgcacatcagtgggcacccgaccattgtcacattgaccgcaaaaggtgcgaaaaaacgatttaaatttaaatttaaaaataaatttattgaaattaaaatatgcaatatttattgttcttcattgaatttattattaactgtaaaaatgtaaacacatttatttttaatgctcagcatttgaaaaataattaatttcttttatattttttcattttttaataatttatgaatttaaatattttttattttttcttaatttacggttttattaaatttgattttttcactgaataaaattttctttttattcatcagcataaagttaactaatttttataaacatttataatgtttatttctcaaatctttaaagtcatttcttttaaacgatttgcaaaaaaataaattaattaattttaaaataaaaaatgtttttattttttctccccattttaggcaatttgctggtgctcagtttgccttcatttcgtattttgctgcacgttccactgattggccaaagcattgacatggacagcagcttgtaaagcttgaaaaatttttaaaaaaattaaaaaatttttagtgttttcaaccgtttcgacatttctgagcatggcctcggcttttatgccgtttcccattcggaggtcccatccaatgagaaaattttgcaaattttactttattacatttaaggttcaaaaattcacagtcagcgccgaaataaccaaccaagtgtgcattttaattaaaaaaatttaaaatttttcctttcgaggcgtgccatggggagccttgaaatccgaaaaatgaaattttagcatattttttttttagaaaaatttaccccttttcgcaacaatttcaaaaaagtcaatccccggcggagcctgcatcaaattttttgttagatttcacttttttcggcagcttttttttaattacgcctcaattttcaaaaattcctatggcgctgctttaataattatttctgc

SEQ ID NO: 25179 - DNA, 996 bp, Heterodera glycines
ccattttcccctcaaattcaaatcccccattggattttctctctccgcttccaatttatccatccccgggggataatttcagcaaacttttgcttaatgtaattgtgcaaattccaacaataatattaataattattatttaatgttgccgtcaaaatcttctcattgacagtcattttttcttttccttttttctattatttttgcctttctctccatgccaatttaagtatttcaaattcaaaaattcactctcctaaagcattttcgctcttttgctttttgatcaccacctttttgattaaccgtcgtttaaaaccccaaataaatttcccattaccaagtaaataattccccccccccccccctctcatcaatgcttttaatatggaaatgcatgccaaatggagggggaggggggataaacgaagacgaatcgaagaacggatgagagaagggaggacgacggacgagaagggggctttaacgggagaatggttgggctgaatggctgggaatgaatgctttattcattggacgaggaatgatggggtgaataatgcaaatcggattgggggtagggagaggaggaaaatgggacggaaagaaacgcgaacagacagaagagagaaagagacgaagaatttgggcgagggggggtcagcaaattcgacaaaatttaaatcgaaaaaacccaaattaagtgccattgggtcgtcggcgagattgaattttcaggttcgagaatcccgggccaaaaaactcgaccgcacacatattcgattggaacagagaaagtctcaaaaggtttttctgatcaccgctgtgtagtcgcgaaattggagtgctcgtaaaccatcagcaatctttcccgaatgattggaaatttgccatttaattagccgattaattattagcccccccctctctcccatcctccccttttcttccctttcaagacaattattcccccccccattttatttcccaatcaat

SEQ ID NO: 25180 - DNA, 1067 bp, Heterodera glycines
gacagggcgataagcgattttgagaaagggccaacccctgggggatgccacggaatgacgacgaacacttaggaacagttcgagcgagagaaggagcaggcgttggagaagctccggcaagaccatcagcgggagattcaggcattggagcagcgattctcccagtcgcagctgttgaacctcgagaaaaagtgccgaaatcaatttgaaacgaatggaaaatggagcaattaatcctacagatacatcatggaaatacaaaagttggaggaggaaaggaatgggctcagaacggagagagaaaggcttggcgaggagttcaaagggaaactgtgccgagcggagagtttattcgaaatggaactgacggcggcgaaaatgctttacatgcgcgaactgcaagcacttcgagaacacgaagaagcattaaaggacgaattggcagcaaggtaagagaagggatgaaagaagagagaaaaaggcagggaaaatgccgaaaaaatgggagaaaatggcaaaagaaatggcaaaggcataggaagaaaaacaatgagaggggggggggggagggaaattgaacaaattaaaaacaacggcagaatttgaggcaggaggaatttcacgacagagttgtcgagatgcaattccagtcgagacagtccaaagatgagattatccactgcagagaagagattactcagctggagaaagcacttggacaaaaagcggaagagatacaaaggctatccaaagaagtgagagacaatttgaaaaggaggaaatttaataattatttggaaatgagctttaaacttaaaaagttggcaatcgcacgccgaaaaaccgaagaaacgatttaccaacttgtccaagtcaagtcggaggcggaagaagcggcacgagaactgtcggcacagagagaaagagcgaaacggctcaatggggcagaggaggcgagagagcgtttggaggagacagtcagagagttgcgcaaggaactgattgggctgagaagcaaagcggaattgttggaggaggagagggacggactgaaggcacaatgcgaa

SEQ ID NO: 25181 - DNA, 982 bp, Heterodera glycines
  unsure (1)..(982): unsure at all n locations
cgcaagtgaccgcctnggaagcagtcagtaaacggagggcggggaaatgatccgaaatgcattggcccttaaacgattgtgccgtgccattgcccccctcccttcccgtgccatttgtttaccccccccccccattcccctcctctgtcagatgttacagtcagtgaccagtgagaaagagggctgtgagcagcggtgccaagagttggtggacagagagagggcggacgcggaagagcgcgaattgaccctaaggcgagaattttcagcgaaattgggcgaacttgaggagcagtacaacggactgagacagcacgtggaaagggagaacactgaacactttgtgccagaaaatgtggtcaaattgggggagggaatggactgaggggaaaatggaaaatttcagaagctttgggaagaaatcgaaagtctgagggcagaaaagggcgaattggagaaggaactgacacaggcaattagagaaaagtggtagtttaattgggctaatttgaatagcaaaacaaacggacggatggcatggcgaaattggcagaagaaatccaaaaattggaaaagagcacaatgggcgagaaacggacaacgacagcagaagaaggagaagaggaggagggggaaaaaggaggcgacgaagtgccctcagtggaagtactgctagaaaaggtcggtttgaaggcaatcgaacggaaaacccagcgaggctctgcttccatttcagttggaacagttggagaaaagtgttgagggaatagtgcgtgaaaaaaagaggatggagaacagattggaacaaattggggagggagagactgtgtggatgaagagactgacagagacggagagggaattggaggggcagaaagagcacaatgaaaaggaggaagagaaacacagacatgagagagaacgtatgagagagcaggtagagaggaagaggaaggaagggaaatcagtaaaataatggcaa

SEQ ID NO: 25182 - DNA, 1550 bp, Heterodera glycines
  unsure (1)..(1550): unsure at all n locations
gagatgtgatgagtgcatggtgtgaatgtcatcagaatttgtgttttcattccccttttttctttcaggtctggtcttcgcccattggtgaatgatccgaacaaaaaggacacaaaatcattggcccgaaaccacatcattgaagtgtccaagtccaatcttattacaattgcgggtggcaaatggaccacctaccgacacatggccgaggaagcagtggacgcgtgtgtgaaggcgtgcaatttgaagccaaaaaatgggtgcatgacgcccggattaatgttggaaggtgagggtgaggcgtaagcatggaaataatatgggggggaaggcgggactaatactattcagtaatgaaataaatccgagcggctctcaactttgtttaccaataaaaacccaattcgtacttgggcacgttatgccaaagccatctaaatctcaacgcggcacaaataaccgacaaattggctaaaaaaaaattcagcgggtaccccgtccaaaaaaatctttaaattcttgaaccatcgctggcgctttcccgctttccgcttcccttaataattaggtaattagtatgctttaggtgcccacgattggtacccattgttgtacatcaatttggtgcaagactacggcattgaggtggacgtggcgcagcatttggccaacacatacggagaccgagcatttgtggtggcgcggatgtgcaaaatgaccggcaaacgatgttaagaatagttttaattctcttaaaaatgcattatttgcattcagggccaattgttggcaaccgattgcacgaagaattcccttatttggatgctgaggtgctctttttaaagtttcacattattgccactttatttggttaataagttcgcgaacattggaataaattaggcccacatccagcgaaaatttctattttccagaatttgatattttaattcggttaaccggcacaatttacggttcccctttttcgtcaaggtcagctacgcgatcaaagagtacgcgtgcactgccgtagatgtaatcgcgcgacggcttcggctcagttttttgaacacttacgcagcacacgaagtgctgaaccaagtggtgatgatcatggccagggagttggcatggtcacgccaggaaacggaggtgggaataaaccccaaactcaaaggaacagttgggcaaaaattgaatgttcagaaacagctgaaagttgccagggattttatcaacaacgaaatgggccaagaggcgcgaatgcaatgggtttcagatgttccgctgaatctgaccaaggaggtggacgagtttcttctcacattttcattaaatgaaatggttcaggaaatgcaaatggccaaagaacggtaagcggcgaagggaaagggaggaaaaagtgacaaattggaggaattgcaaaaatgaggngagaaatgatcagtcaattccttttgttaatttagttttaaccagttggacaaggacaaaaagggacacattacggtcaatgacatccgccgacactttcgggtttggtgtcatct

SEQ ID NO: 25183 - DNA, 949 bp, Heterodera glycines
tcactccgtccaaataaaagtcacccctgtggcttaatgtttccctcgtttcttcccccccccctcccctcccctctctctctctctctctgctctttttctcccattattcgcttttcctccgtccccttttttctgttcctgtctctccctcttctctctcgtctgcttctttttcgccttctcttctctctcactttctctgtctctcactctctctgatccttttttcccactgaattcgcctgtcccctcttttttctgtccctgtctctcccttttctctctctctcgtctgcttcttttttgccttctcctttctctagctaatccttctttctccattaagcagtcttttttgttcccctgtctcccttttcctctattttcctttttgccccttttttctcttccatttctattccctcttttccctctccccttctatttctattttcctctctccccatggctttttttctcactttgctaccatttgttcctctctgtccttccctcacacagcaaatcgcccccaacgccaagcccacaccctttcccgcgcctccgaatggctctctgtcgccctcccccccgactttcctcttatttccccccccccactcctgaaagaggaattggttaagaatagcgaagaaactaatgctgtgtacctgtctgtagcaacagaagcacaccattttagcttacaaattagcgtatagaaattgcactcagttcaactagttttttctgggtattttcctgttttggggccgcaagccaaaaattaaagaaacaaaaattcgcgcaaattcactcacaaagcgcataatgtatgcaacaattgttaataaaagctcgtcaaaagaatcatcaagagaaaatttctgaatttgcgcgatttttgtcgattttttaaaatttggataagaaaagtaccgttttt

SEQ ID NO: 25184 - DNA, 1274 bp, Heterodera glycines
  unsure (1)..(1274): unsure at all n locations
aaaaaaaagttcgaaccaaaaaaagtggcaaaatctggttttttgaattcttctggtcatagcttttttgaaccttaacgaaatttttccaaattttgcaggctaatagaggatacatagggctatcgaatgacactatcaatgttggatttggtagacaaataaggnngttatagccaaaaacttgtgctcgtacgaaaacggccccgtacgaaaaacgacccttgccccttgtttatgtactatttgaaaaacatttggtcgattattcagcgcatcattttcttgaccattgctcatttcaaaaaacaaataggcgctctcttgtttttttcatcattcatttttgcgattgttgcgaaaaaagagtatcgttttctttccctttacccgtaggtttgaatttacagatttaaacagtctagcaattgctttacattgatcttaatcttttttttatgcatctgttccttgttcagcgatcccttgataatattcaactgttaatttgaaaatgagcaccgacaacggagcagcagcaaatgttcagccggaacaggacgagaagctcattgcccagcccgaacagacggctgggaagacagcgtcgccggtgaaaaaggcgacggagagcgatttggggacaggcgagtggagaggggagaaacatttcaaaaaaagggttgggtgagcgaaaaaggggaaagaaagccttgaaagtcggcggttttgaaggccaacggaggggctaacaacaacaaacccaaaacaacaatcaatttgcatatgtgtcaggtgaggaatcgcgcgactctgtccaatccgtgggccaagagagtgcggaaggggacgaagaggaggacgaagcgggcgacgaggaggagacggacgaggagcacccggcccagcagacggaagagaagggcatcaacggacacgaaaaggcggagaagagcgtaaacggacacgagaaagtgggggagaagacggccgtcaacggagttgagaaggcggaggagaaaggagtcaacggacacgagaaggccgaggtgagagggaggggggcaagggacagaggaccaaagggtcggaacggaatgcaatttgaaatgtttttagccgcgaaagcgcatcaacaacgaaggcccagaagaagcggacactgaaagttcccagcagaagaagcagcgaatggacggcgtaagtgttttcttttaacatatggctttaagagaaaaatgacacactgaaaatcagattctttgattaggtta

SEQ ID NO: 25185 - DNA, 1262 bp, Heterodera glycines
  unsure (1)..(1262): unsure at all n locations
gatcaacaaaaagtgaataaattnggcacaattttagcatcttcaaatccatagaacaaaaaaaacaaatcctggtcaggttcatacaccaccagcagtttgatacgttttctcagtttaaaaaagtagatatatttaatcggataaaaactccgcaaaaatgaatctgactagtgtcataatttggcatcataaattgtcggaataaagtcactgatcaatgatctatcataaataaaactgtcagtcaaaatttgtcacttgccttccggcaacgaatccatttggacgatgaattggccttcctgttgctgttcctcctcatcttcattcctcttcagctgctgctgttcgtgccgttctagttgttgttgtgttccaattgagggggcacatggcgttgttgttattgttgctgtttgtgctgctgcggtcgagtgacggccccgtttcaaatgccgcaaatcaaccaccactttggcatgccgtccggaacgttcggctctgcgcagaacctgccaaaaatttacaatttcaaattaacccttaaatcatttaaatttacatttttgatgtgctcctgctgttcctggctcagtgctgctggcaatgaactgttgccatggcttggtgttatgctatcctcctgtccataatcgagtttttgttgtgaagcagctgatgctaaacatgacgacaaagtgtcgacagattgtcctgtccttggcaaaatgtcatcttccgttggtccaatttgatcaacaacgtcggcttcagaagttgaaggcaattcatcaccaataattgagcttctaaattatttaattaattttaaaatatatatgaaaatattttaaagaaataaagcctaccgaatgtatgaaaaccaggaagacatttaaaaaagcattttttaaaattaattattaaaatatatcaataatcctgaaaacaatttaacatatgaaagaattatttttcattttttgtcaaatgatcaatgttttttattgaattgtgcgatttcttccgctggataaaaaattgaggaattgaagaattatttttctaaaaacaaaaaattcctaaattgaaatatttataattaacaaaattaaaaacacgtttcttcacatagtattgcccgatttgtctgtctgtctggccaccattttgtgtttggtgcatgcgccgtgcggtgtcttttcaccgtggcatttcaagaacaaatcagcttcaacttcttcttttcttcttcatct

SEQ ID NO: 25186 - DNA, 1820 bp, Heterodera glycines
aatggctcaaaacatggattgtcatcaaaattccagaagaaaatcattttgtcataagtcatcacataaaaattttttggagaacaagaatgacaaaattttaagccgtcacgccactagctgaaagccttgaaccccaccattcggatgccgaattcgccatttactcaaagacgaggggaccgtctttcttaaaggccggggatgtggtattagtgactgtttgaccttttatttgattgtttgaatttgtttggcataatgtttaatttgaattcgacccaaatattttggttttctagagtgaagttggtggattagttggtcgttggggataatttttaggcgttttgttgattggtcgtcgatggatttttgttttaatttattttgttgttgacttattttaatttaatttggattgtctttttaattatttattggataaatttattttgttttggtgtttgattttaaaagcaggtgttgcctaatttcacagacaattgtccctttgttcgcaaaatttggaagtgcaaaagaagaaaaccccggctcaattccttttcttttccaacagtttgatgttcatatagtaaatgatacggaaaaatagccataaaatactcatatgtctatataataccgttggttgagcctgaagatgacaaacagtagacaattgtacgagaataattaaaattataattattatatatataaattctatatttatgcataatatgacattacatcctataagctatagactttaccactgtaagtcgaaatgttattcagtcttcggtattagaatcgcagctctacatattctctacaacttataatttttaaaaaattagtaaaagtttacaaaaagttgtgaccaaaaacttgcaaaaaaaatatagactcaacaattttgaccatactttttgaaattcaataaaatttttcgaaatttaactgaataatagagaaatctttgggctatcttttcatatcaaatgtagtgtgattaactgaatgtttgaacgattttcatgcatttaaacgaccttacattttttggatgaccataaaaacataaccttattaattccttctttactttttttcagaaagaaccaattttaatattatttatataattagatagcccaaagatttctctattctacaattaaatttcaaaattgaatttcaaaaaagttagggtcaaaattgttgagtctaaattttttggaaatttttggtcacaacttttgtaaatttttgctaattttttaaaaattataaaaatagtagagaatatatatatttttttttgaatttagctacattctaataccaagatgaataaatttgattaagtttaagctaagttatgctttattatttagcaaataaaatttaaataataattaaatttaattattacgaacactgatatttttgtcacctcgtcctagcaccgaattacaaatatattttactgacccaacatccaaattttcctcatcgacgtaaatgtcaattaggtttcgatttcgctggcccatgcggtgctcccatccctctgcttccttctcccatttggcccatttgttctcatcgcggcacatcggacaacgaatcatcacaaatttcgtaacatattcgggtgccccgtagttgcattctgtctttgtcataaccattcgctctccagtcaaatcatttgtcaaatcgtagggcaaaatcgaagtgtaagtagatgaatggaaccaaatgttaatgatgtaatttgcaggggaagaagcatccaaaaaggcctgaaa

SEQ ID NO: 25187 - DNA, 2137 bp, Heterodera glycines
  unsure (1)..(2137): unsure at all n locations
atttgggtatttatttgtccaaagatatatcctcacctgggagtcatcaacaatcacactgaattcataagaatccttagtgagcacaaatgaggaaaaagtcctttaagatctgtttctcttcccaagctaaaataattatatctatttcaaaaaataaagatttttaaccttttatttttgtctaattttgaggattaaaattaaatttttaatttttttttgtttgattgaaatccccaaatgtcgggaccctaaatgtcgggttgccaaatgtccgcggttttcttaagtgtcttttgctcaatgtcgttcggtccccaaatgtcaggtccccaaatgtcgggatccccaaaagtcggatccccaaaagtctggtccccaaatgtcgggatccccaaatgtcgggatccccaaaagtcgggtccccaaatgtcgggaaagtcgggtccccaaatttcgctttcaataaatatgagtttattaaatttattaaaatattataggaatttctgatcattttaaatttaaaaaataaatatgcattaaagaacatttaaaaatgtgtttttaaaaaaatttatttatattttaaatgaatagtttcaaatagggttaagccccgaccccgagccccccgacccgacccgagacgttttttggacctatgccccgacccgacgaacaccaaggccgaaaaataagattttagggacaaaaataataacattagcaacattttttcaaatcagtaaatttttacaatttatttgatcaaaatgctatcaaattttatatttttagtctcccattataaactaagaacaaaacgaggttaaaacgaagatttggccacaaaaataagataaaaaacggctttttacattgtaaaaacagggatgctaactgaaaattttcaaaaccagcatttagccaacaagaatcatcatttggagtcaaaatcagcactttggaaattttagtcaaaaaggaaaaaacatgcttttttgtgacgcactttttccgaaaaaaatttttgtacacaggtgccggcgggagaattttttgaaaatttgagttcattttgctcacagattttcaccaaaaatgaccaatttttgcgcgattttgagaaaatttttaagaacaattttcgtcgctaccccaaaatcagaacattcttataaataacgcactcttgttggcgctaacgaaatcagataattaaagtgaaaaaaggaagaaacataaaaaataaatctcacacaaaaagagctaaattatcaaaacttggtgttgataaactataattgtattaattttttgaaacttttttttagattttttggtaattaatttaaatttaaaaataaatatacgtgaaaatttgaaaaaaatgcataaaataattgaacctcttttgaatatactaaatatcattaaaataaaaaatatttctgattaaatatgatctttacaacaaaaattatataaagaattaaatatcaatataaaaaaactttaaatattaaatgaaggaattataaaattcgccagcaatgaggacacaagaagatgatactctggcaaacaggagaagttaaattcaaacactaattgaatggacctattaaaattaattataattgttataaaaaatattataaataaattcaaccaaaaattatgttacaattaatagacgttcgaatcgaaattaattcaaataataatcagcacattattttgtttatatatttacagaaccataaaatttcaataaaaacaagctatataaagaatcaatgcaccatataattgaatgaatttacaattttatcttcgctatcattttatttanaatagttaatanacgataaaaatttttttgtatatattagagtgaagcgngaccggaccgggccaggaattctcgttattcgaggtcccggttcccggtcctgaaaagctcaggtcccggtcccggtagggcaaccgtgaaccgggaaaaacagcactggtaagaatggaggtctgagtgaaaaattagagatgaaaatttcgagtaaaggaaaaaatttaaaaaacacatatatatttttcaattgacacatattttatcatttttaaatgaaat

SEQ ID NO: 25188 - DNA, 2547 bp, Heterodera glycines
  unsure (1)..(2547): unsure at all n locations
ggttagtaagttagaatgngtatatgtaggttcgtgatcaaggaccaaaaaaacttcgtgaacaattttcattactagacaaaccaaaatggtancccttnggttttaataaatttcaaaatcggtagacttttataatagtgccacattttcccataatgcaaaatttgaatgaaattaaactntaaaaagctagtaaaaattgaacattgtatttttgtgccacaccaaccaacacctttaaactgtctaaaaattacaataataaataaaaaaataaagtttttggtttaattttgcaagattaaaccgaaaattatttgaatattcggaaaataaactattataataattaaatttatctagttgatacttttgtaatttcggcttaccacggaataccatatggttcaattgttttttgggtatattttcatttgggaagcggcggtacaaaaaggcgccgccaggtgaatttggaattttgtatcaatttgtgtagagtttgaaccaaaaagccgaattttcgagcaatatagaaattcttgaaaatttcttttggaaatattaaaatattaagtttttgagtaaaatcatttataaattgcactaaattaaaaaaatatgtatggcgcctaaccttatcttacttaatatatgtgtgtatacgagaaaataaatgccatgtgctgttcatgtgaatcgtttaggaaattggctctaacaaatcaattatattcaatgacaacaaataaatattgatgaattttaattttttcagacatttattgaaaaatttatttaatataatataaattatctttttgaaaagtttcgcaaatttggaaaattcttttagtttaatggcccctttttgtgtattattattgtttttattgtcagtttacctaaaagaagcagaatttgacgtaattacatgcttaaaacaaaataagttggccaaaggaaatgtgtcctttgccacttcactttctgaaggaattaaacacacatttaaaaacggtgagtttaaactaattagtttaattgaccgtttatttgatcggttgagttaattaagaattggccaatttttaattaaaattttattaattgaatttctcatttaataaagaaagcaaaaatcacattgaagaagaagcgcaattggccaatatcatctgcgaaattaacaaaaattatctcattttggaaacatttttgaccgaagtaataaatatttataaatataattaaatattttgcttctttaaagaaccctttaaatcattcaaatggacatttttctgtggatgaatacaattccctccaaaagcgtatcacattaattaatctcaatgatccgcctttgagccaagtgatgggcactttaattgttacactaatgagccttaaaaaggcaatggaatcgggtaaaaagcgaaaaaggaaaatatttattttaaacaaaaaattcctattattttgataaatttctatataaactttaatttaaaatatttttttattataaaaaccaatttaaattaaaaaaaaattttttacataaatataattaattccctcatattaaaatttaggaaattttggcgattctctgattaaaatgggcaatcagcgtttaaaatttgcactaaaatttgttgcaaaacgtcatggaattgaatttgatgaacgaaacaattttagtttatggccaaaaaatagtcaaaagctttatttttcgaaatgggttatattatattaaataaattagttttactttttagacataattttaaataaattaaatataaattcagacgaaaatatttggtaaaaatggcaaaaaattctggcaaaataattcaaataatgaacatcaaaatgaaagtgatcaaaataaaacaaaaaatttcttacaatttgtggtaaaaactatacaaatttgcgaagatggcacggcaaagaggcgaaaaagtgcaattaattaaaatgaaaaataacaattttttaataaataatataaattaataatattcaaatttgaaaggttgtaaaattaatgaatcattttttaaaaatcatttaagacgcaaaacgacgccgaaaacggaccatattttcaaatataacaattgttttggtgttaatgttagggttaattttcgctattaccaattcccatcaattgctgtggacaatgaatcggattgcgcgaaattaattattatttttaatcatttaagacgcaaaacaacgccgaaaagggaccatattttcaaacataacaattgttttggtgttaatgttagggttaattttcgcgattataacacttagtttttgccgagttatatgtgaagatgtgatcaattttattaatctgacaagagagacactgaacaattttcaaattcaacgaaatgataattcaagtacagtgttatttgtatttgaattatttatttaaattttaaaaaaatttaataaatttgagtgtaggaagatgcttttgaccaattcccatcaatttctgtggacaat

SEQ ID NO: 25189 - DNA, 1905 bp, Heterodera glycines
agtagaatatattcatacttaaattatcgatttttcccaatcaatcatttgattgattgagtccaagccaaaaggtactggcttgggcccaaacctattgcccccccccccccattccggttggatttttttcgttattccattcttttattgaactttgcgcgagaattttttttcatgaattaagcgtcttattttttatattttaaaatatttgaaatttaaacatctttaaatttaaaaatcttcgaattttaaaaattcttcaaaaatacagccgtgtcgaaaggcctcaagcccctggtgaacatgcaaatcagctactctaaccttggctatgtagccattgatgtgtgcatgttaatgattgatttaatatgagaaattataagatgatcgagagggggagggagtacataaacatttttcgggatgaagagggggaggggattcgcgaaatgaacacattacaaaaaaaacaaaaaaaaaaacaaaaaacgaaaatgtcacaaaaatattgtttatacgatgagtgaattttttggtaggcatttttatcattattattaggcaatacacaaaacattttctgcttcgttaattaattaatgatttaatattttaaattaaataaatgctgttaataattatttttattattattttataattaaaaaaattcctttgttgggaatttgtcattttgatgtttttaaatttcaatgctcatggcgccaatcacaaaatgttttttgcttaattaattaattaatgctttaatattttaaatgtattaattaatgaaaataaatgttttaattaaaataaaattgttttaattaaataaatgtttaaaaaaattcctttgttggagttcttatttaaatgtttaaattttaatgttgatgaataaattaaaaaaaaattaatagaattaatgtcaattatttttttaaatttatttaaaattttaaattatccccccccccccccccgctcatccaattgtttatcgtttttaaaattttttctccatgttttaaagaatgccttggtattggcatagtgatttgccaagatgcgtgagcagaaggatggcacaacaggtaaaaaataattaaatttttaaaataagagccttaatggttggggccgggggataaattcttttaaaaatttctttaaattggtcaatctcagtattaaaatttttaaaatatgaattatggtaattaatttcttaatcgaattttttctgtggaataaaaattattttatttgcttatctgtcagctaatatgtcttgatttttttagcgccacccctatcaacagccaaacctgcatgtgcctatgcattatggttataacgaagcgtattttccgggtaattttgtgcatagtcgggctactgacttcccctgagaatggtaaaactgagcgcaggagaccaattattctctggcgcgaatcgccgggggaggggtgggggggattccagcactggttgaaaacaattaaaaaacagttactgggggatttttctcataaaaaaaaaagaaaataaaataaatttaagtgcatttgccattagcacagcagcgttatgtccagacaatgcatcatcatcctcctcctcttccgcatggcacccattttggtcatgatcagcccgggtaaaatagcgaattgattttattggtctcttcatatatttttttaaagacttttttataaaataattctgacgttaaaatgtaagattaaaattaaaaaaaggaattctcgacggcgcacacgccggcgcaggaatggattgggtttgcaaatgccacggcggcagcagcagccgatgaggcaaatgccagggcagcagcagcggcagttgtcgatgccagtgtcacaa

SEQ ID NO: 25190 - DNA, 886 bp, Heterodera glycines
aacgccatgttcccatcagaatcgaagacttcgatgtccgctttgccctcctcaacgagcaatttgactgaaaaaatagaaatgaattgtcattgattaaggggcgcttttgggtcaaattttgaaaactttagggtaattttgggtcgagaggtctcggaaggaataaaaaatacaaaaccaatattcaaaatattaaattgcaaatgtcatttctattaattaaaagctgctcgtcccgttacgtataattttcaattaaaatgttttaaaaacccaaattttttatcgtaaattttcttaacgctcttaaatttttttatagtttacaaaaaataaagaccgaacttttcaaaaactgaccaactggcaaatggccatcgccacacgtgaactgaattgtaacggaattggtgtcatcggttggagcaacggcgccgttttcaatctgaaaatgtaaaaaacaaatgataatcaatgagaaggacaaaaaataatattaaaggtcaccgccggagaaaaaaattttttgtttctaagatttttttgttgaaaaattgctgtgtttaaaaaaaccaataggccttaattatcaaaggtttttggtatcgtctaaacggaaaaagttgtggtaatacggaaatggtttttcattttgataaaattacgaaaaaaaagaattttttttttcttttttttcctaccaaaagtttgatcacatccgctttgtcattttgtgccgctacgtgcagcaaagtcgcgccattctgctcagctcccagcaaacgcttcaattcgtcggcatcgcacgcgctgaaaatggcacgcatccgcgcgacgccgccatctttggccaaggtgaacagcaatttgacctggaaaacga

SEQ ID NO: 25191 - DNA, 1007 bp, Heterodera glycines
attaaagtacaggctatagggaagctattcccgaaggattcggtctccccataaatctgggcgcatcggttcggggggactgccccgaaaacaaaaaaatcgattttttcaagtgtccgtttggggtactcaaacaattatggggagcaaaaatccaacgcagaattaaagtacaggctatagggaagctattcccgaaggattcggtctccccataaatctgggcgcatcggttcggggggactgccccgaaaacaaaaaaatcgattttttcaagtgtccgtttggggtactcaaacaattatggggagcaaaaatccaacgcataattaaagtacaggctatagggaagctattcccgaaggattcggtctccccataaatctgggcgcatcggttcggggggactgccccgaaaacaaaaaaatcgattttttcaagtgtccgtttggggtactcaaacaattatggggagcaaaaatccaacgcagaattaaagtacaggctatagggaagctattcccgaaggattcggtctccccataaatctgggcgcatcggttcggggggactgccccgaaaacaaaaaaatcgattttttcaagtgtccgtttggggtactcaaacaattatggggagcaaaaatccaacgcagaattaaagtacaggctatagggaagctattccggaaggattcggtctccccataaatctgggcgcatcggttcggggggactgccccgaaaacaaaaaaatcgattttttcaagtgtccgtttggggtactcaaacaattatggggagcaaaaatccaacgcagaattaaagtacaggctatagggaagctactcccgaaggattcggtctccccataaatctgggcgcatcggttcggggggactgccccgaaaacaaaaaaatcgattttttcaagtgtccgtttggggtactcaaacaattatggggagcaaaaatccaacgcagaattaaagtacaggctatagggaa

SEQ ID NO: 25192 - DNA, 2247 bp, Heterodera glycines
taacttttcttttttaattatttaaaaatattactaattgggcacaattaagcgattatttcaattgttttttctcacctcatacagttcttggaccacatcaatttgggttagcaaatatgccacgtcaatttggcagaattcgttgatcagtcgcagcatttgaccatccaacaaacgaattcgttccaacaaaatgccgtgcttaattgctctggtcaatgtgtcaaaaaagatgccaagaaggtgcgcttcctctgtgttcatttgttgccgtccaaattcatatgcccgtttcgcctcagcgatggcataacggaaggtgccgatcagaaagaaattgacctattcgatggggatgatcagatttttaaactcgaagacaaaataaattttgcattttgtaaattttaaaagaataatttacgaacgcttttatacttaaatcatcatcaaactggcaatttttgtaatcaaaagtcaacaaatttgttttaatttaccaagctttttaaaacctaatttttttttaattttacagaataatcaagaatgagttctcaaataccaagaatatttaacgcttagcatggtccgtttactcagatcaatgtctataaaatttgattgtcctaaagctcctcaaaattcattgtattaggatattaactttgaaaaaagtaaaatttggcaaattaggaaaaatcttgacccgctaaatttgttgagattgtaagggaaagacctaaaaaatgagcgaaccctcttcggttctgcgtattatgccaaagtctgctcggacaaagtcatttgagtcgggctgccacacaaagtatgacgaggtcgaaaaaatgaaaaataaagttataattagagaccgaatttgaggcatatcccaatttctgcgcattagttccgatatattgagcatacgaatcacactctgccttcgttcgtaacctgtagtctcactccacctactgtccgccgtagtcgagtgtgcggcggttttttagcgcaatactcgatattcaaggctacacgattttcgtgcattatataagaaaaaaacttttttattttttggtactgaaatgtcggttttcactgggactcagttgtcccagtgcttagacggcatcggttcgagtttataccttgttttttagacttagctgatcaagagctttcaaatgatactaaatttgtccgaatttgaccattttaaagggtcataagcccctctattcactcaatttttcgagttttaaaccggttcaaaaaccggttttttggcatttccgcaactggagacctattttttcgtgcatagctcgtcgagacgaatcgattggtatatcatttgtgccattattttctggggggttgactaaagtatatccgaaaattccaaatttcttacgaattaaaaatattttttagtgcattttgacttggttaattttatatatttttatgatggatgaatttcgttttagcgcgtgttttttgatgaatgatagaatatattcataactttgccttatttgactttatctccatcatcatccattctttctttgtgtgtattttgcctgtctcttttttctccattttccctccttttttgccttcggcaaatccaaaaaatatttctatgcaaaaagaaattgtacagattccccccccccctcacaaggcaaatatttgaccttttgttcaattttaattagataaataatttcttttggaaatttggaattttatttaattatttaaaaaaatattgtcaaagacaaaggtgcgaatgtcaaaactcaaaaacgcggcagctttttttttaccaaattttcaatttaaaaacataaaaaaatgtaaaaataattgtgagcattggtatatatcagacattttttgcggcacattttccaaaaaaacttggtgaatgtgcgaggttcgagggtccggcgggagtcacccccaactcatccatagacccaactcatccataacgctgcgagtcatcgtcgtggcatggcattttctgctcatgtggtcatggccgtggacatttttgattatgcggtctcggtcgtggcattttttggttgtacggtcttagtcgtggcattaaatgccacggcgacgactcgtatcgtgctatggatgagttgggtatatggatgagttgggcatggatgagttgggtatggatgaattgggtttggatgagttgggtttaccccg

SEQ ID NO: 25193 - DNA, 953 bp, Heterodera glycines
  unsure (1)..(953): unsure at all n locations
gaaaagcgctcgnaaaaaagtgatgtgaaaatcaaatctgaatttctattaatattcgatgatntagtccaaaaatgattaattgttgaaaataattgaagaaaatttgtttgaaaattttcattaatttaatttattataaaaaaccaaataattttgtattattttcacttgatatacctaaattaaaatttgaatttttttttaaatttttttgaattttaaaatttcccggttggtcccggttcccggtttttcttgcggtcccggtcccggtcccgaaaaaaaatcgaggtcccggtcccggcttctcaggtcacggcaagtcccggtcccggtttttgcattaattgcctgtgtcggcagagtgaatgccatcacgctttccacgatgtcttgcgtcatcacccaatcaatgcgtgcatcgttaatgaattcgccgtcgtcctggtcaccgaacattcgttggaaggagtgccgaccctcaaaaagaatggcacaaattgttggcacttttcccggaatttgcattttgctatttatgaatcgctttctcttctcacatccatcgtcgtccaattggcaaataatccgttggtcacaaagcccgcttcgtccggttcacggcagtaacaaacagtggcgagcagcggttgacgttgtcgaagcacgattaattaataaatgtgtgaactgctaatgaatgtgggattgattgatgaaaatgcacaattaaatattgaagcttctaacttgcatttttgttatttgactttttttattggtgatttttatgaattttttcactttaaagctaaacacagaaagagaacgcatttggggaatccgattctgatatttttgacctattaaaccccggaccaacaaaaaggttttcggggtcgctgatcactaatccggcatctatttggaccaatttcgaaccccggacc

SEQ ID NO: 25194 - DNA, 2112 bp, Heterodera glycines
  unsure (1)..(2112): unsure at all n locations
aattttcattttgatatttccaaatggcacaagttttagcactggactgatgaaacaactttttatnntaatgagattcatntaatgcactgaagaaaaacattctggttaatttaaaaaataaaattcaaaaaagcaatctcgaaaattcaaatttaaatattatcgatttaatatttaatttcaaaccgaaagtattcatgaaacacacctctaaactgatcacttatttgaatttcaaaatcaaaagccgaaatttgtctggattggattgatcagttaaatgttattgcctttaaacaaattgtctattttgatcgctttttttccgacattctgatcagtggggtaagaagcggcgtcgctgatccgttgttcctccgatcggtggaaaatttggcagtatgaagaagcagctgtcacggacgcgtcccgccgagaatgaagccggcagctgcctttatggccaattgatccgttcacttttgaaaacacgaacatttgtgggggtggggaggagcatatcccacccagcaaagcttcaaaatttgatgataagcccatctgtttatgaaaaaatcgacaaaatgtccacaaaattaaatcgaaatccacctaaaattggaaaaaaaactaaaataaattaggcacttacttttctttgagaaaatgtaagttaaaataagaaaatttctgcctttatttgatacgggagtacaggacaaaatgtcgcagaccgaagaatagccgcaatttttttttaattttgaaaaattttgaaaaaatcaaaaattttagctacctagcctaattcggaaaaaaaaatttattttttgttggaattcagcaaattttgttttactaaaacttcagttttcaaaataaaaactaaaattttttaatgttttttgaaatttttaaaaactttcctcagagaacttaacaaaaattaattaatttttttgaataaaatgtaaattaataaattaaataacagaattgctgctttggcttgtgagtgttatttgataaacccattctgttataggaatttgaaaaaataatgaaaaaaataaatttaaataaatttaaataattattccttacaaaatcaacggcttctaaagccctaaaatcggtgcagaataatctccgaaaaaattactttaaaaagagtacaataattagtgacaacaatagtgatcaaaaatgatttaaagaatcattaaaataagatccgcagcaaagagaaaaattgacaggaaaataagggacagtccttgaaaaatgagaaatttggcaggaaaataaaggacagtccttgaaaatgagaagtttgactggaaaattgaaaatgggtaattttatgtgaacgggtcattgagtaaaattaattccattttagctaattttgtttggcaaaaaatggcattagcattgattaatagcaaaacatatttttccattcttgctatcattcgataggccaggtttttctctattagcttgcaacattaaaaaaaaaattgattaatttttgaaaaagttgtacaaaaacaaatgcctatttctgccataacttatttaaaatttggttctaattttgcaggctaatagagaaaaaaccgggcaatcgaataataccaagaaaatgtaaaattttgtttacttttaagcaaaattcgaatcatatttctcgaaaaataaaccgaggctttttcttcaaaaatattttgtctcgaaaatggaaaatagaattttcagagaacgaaaatccgagaccgacacgagacttgaaacacaaagaccaagaaacttcttttttgcaactcgagaccgagactgtcgagaagcattggtttgtgtggagtgttggttttttttttgatattatttttataatttttaaattttaccagcaattttatatctatcatattggtttagagcatcctgcaagttttttcagtgtctttgttcaatggtttatttacaataaacttgacatatgcagattgaacgcttccaaaaaaaagtgccgatgagaaaatgaaaaataaaacggtgatgagaagcattttttgcgagccatttggcccattctgacctgca

SEQ ID NO: 25195 - DNA, 1591 bp, Heterodera glycines
gccatcagcgggttgtttcgtgacaaaaacaaaccagtttgatgttattgaatgagctagacgcgctctacattgtcaaatgtatcaacaaagggtctaccgccactccctggcgagatatggcctgtcaaagcagaacggggccaataaatttgaatttttgttaatcttcggcagttgcctttatttcgagcctactctacttgtgcatcttttcccaatatggcactgcttccgaattattgaactgtttcacgactgattgttgagataatttttttttccgattcctttatctccaagcatgagccttataagtgattgttcatatccttctcttgaaaaaaattgtcactaaaaaaaacacgttttctgaatattaacaacaaaaatttttagacagtttctaaagaggaagaaaaaaaatttttcatttgcctaatatttatttatactgttgaactgttggaaatgcagctgatgccgtcggaaaagctccgattttttggggaagtttttttctttcagtttcaccactgattgttgaggcaattttttcgccaatttcttttgtctacaaacattatttattgcgtttcatcctgtagtgtgtaaaaaattttcagtaaaaaaacttgttatctgaatatttacaagcaaaatttaagaccatttccaaagaggaaggaacaaaaatttttgcctaaattttatattatattgttgaattgtttgaaatgcatctgttgtctgccgttttgaaatttttcaacttttcgcgaaaagatttcccagaaaatgcatgggacaaataaaaattaaacttctattatgatcaatttaaatttcctatcagtttcgggtttgctttaaacacgctggcctatgaaaaaatggagttttatggatgtcaaattttgggacttttcttcgacgtggccatcagcgggttgtttcgtgacaaaaacaaaccagtttgatgttattcgaatgagctagacgcgctctacattttcaaatgtatcaacaaagggtctaccgccactccctggcgagatatggcctgtcaaagcagaacggggccaataaatttgaatttttgttaatcttcggcagttgcctttatttcgagcctactctacttgtgcatcttttcccaatatggcactgcttccgaattattgaactgtttcacgactgattgttgagataatttttttttccgattcctttatctccaagcatgagccttataagtgattgttcatatccttctcttgaaaaaaattgtcactaaaaaaaacacgttttctgaatattaacaacaaaaatttttagacactttctaaagaggaaggaaaaaaatttttcatttgcctaatatttatttatactgttgaactgttggaaatgcagctgatgccgtcggaaaagctccgattttttggggaagtttttttctttcagtttcaccactgattgttgaggcaatttttttcgccaatttcttttgtctacaaacattatttattgcgtttcatcctgtagtgtgtaaaaaattttcagtaaaaaaaacttgttatctgaatat

SEQ ID NO: 25196 - DNA, 1452 bp, Heterodera glycines
  unsure (1)..(1452): unsure at all n locations
cagataattttttaaaaattcaaaatctccacaaccatagcttatctaggtagcgaagctcccaaagcgcgaagcgctttttcccagctaaatagccgacggttcacgcacccgcntagtattatatatgttatattgacaaggagtttcgttgctaaaaccattttctcccggccgaaggccggggagcggccctgaaagtagtggaagggtcttacaactttttgaggcgcatccgggaaaactatagaaaaaaattcagcgcggacgactgagtccccgggacggatttctcactttttcttgcagtttttcttctacgaaattttttctttggaccgggatcgcttagctcttgctggtaggattttaagtcagactatccccgacaactttgccagcaaaacctaagccctacgttaagttatattacaatcacaagggttttttatagagatggccttctcctttgcgtagtcgcccacgacaaagcgactgaatcgcaactcttacccagctgacgccattgcaaggctctcacctaaattagactattttttgcaaaaaataagaaaaattatatatatatatatattttttttaattttggattcgaagttatttagtttgatattaagttttttaatataattaaattattaatattaccatacttatatcacgttgattatgcgtacaattgcaattcattttgtttttaaatttgaattgaatatagtcttttaaattcgttttagttaaaaaatagaggaggattttaatgactgtgtcaaaagccaccaggacagtccacatgaggccatccatgtatgcctaattagggataattaacattaattattttacattgaaaaatttaaattatcatcatcaaattaaaggttttgttcaaatccaactaatgtagtcgcgagtttgactgcacttatgagatcattgcagatgagcgtgtcaaacgacaaagttttgggtaaaaatacttaaaatcattaattatttatttatttaattaatttttagtcattatgagtctgtttcggaaccgatcacaattggaaactgttgcaacgaaatgcacagctatgaacacattcagcgcatttttgcggccatgtgggacaaggacaagttccaggcccattacaacaactgccgaaattggagtgacggattttggtggaaagtgtaagaaaattaattgtaaaaaaataataacaaattttattgatacgggaaataattttaaaaaacgttttctctaaaactaattaattcacagtttttttgtgaaaattaaagaaaattaattaaataacattttcagtgggtttttanatagcaaaaaaattcactgattttttaattaatatatgctaattttctnaaaatgtaactgagttttgggttggaaaatctaagttttaatatgaa

SEQ ID NO: 25197 - DNA, 1506 bp, Heterodera glycines
ccccccccccgcccttcaaattttgaaaaaaaataacctttaggagactcagaattttgaaaattttttataaaaactgatgacaagctaatgtgataaaacaggttaattcttttcctttcagtatccctgcaaagtttggggcgcttctgataagtttctgaaaaaaaagttaagcctacattttttggcatatttaaaaagcaattaaaaaatttttaaaatttaataattttcctgcaccgaaggtactcactcggcctcttcgcggcctcgtggtgggccttcgcccccccccccccagtattatcttacaaaaatatttatgaattaattatgcaaaaataaataaaaatttctaaaaatttgatcgtccataaataatttgtaattgatcaggggctcaccaaattttgcaggaatacgtatcgtgaacactacaaatgcttactaattttcctagattttttaaacccggtgaaaattttttgcagacaccaccacttttgcacttaaaaaaatttcaaaaaactttaaaaattcataaaaaatattaaattcataggtactactgctaaatcaacgcagagacgcctttccttgacctttttaggcccctgcaaaatctggtgcgcttctgatcactactcgaaaaatgagtgattgaattttcactaaaaagttaagcctaaactttttggcctgtttaaaaaggaattaaaaattttaaaaattttattcatctccctttttgatagaaaaagcatcagagtgcctaaactaacatgtaaataaaatttggtgcgtttcagagcattttctgaaaaaatatttatgaaataaaaaaaatcgatttattcaagtgtccgttggggtactcaaacaattatggggagcaaaaatccaacgcagaattaaagtacagactatagggaagctaatcccgaaggattcggtctccccataaatctgggcgcatcggttcggggggactgccccgaaaacaaaaaaatcgattttttcaagtgtccgtttggggtactcaaacaattatggggagcaaaaatccaacgcagaattaaagtacagactatagggaagctaatcccgaaggattcggtctccccataaatctgggcgcattggttcggggggactgccccgaaaacaaaaaaatcgattttttcaagtgtccgtttggggtactcaaacaattatggggagcaaaaatccaacgcagaatcaaagtacaggctatagggaagctattcccgaaggattcggtctccacataaatctgggcgcatcggttcggggggactgccccgaaaacaaaaaaatcgattttttcaagtgtccgtttggggtactcaaacatttatggggagcaaaactccaacgcagaattaaagtacagactatagggaagctattcccgaaggattcggtctccccataaatctgggcgcatcggttcagggggactgccccgaaaacccaaaaaaa

SEQ ID NO: 25198 - DNA, 1391 bp, Heterodera glycines
catcatcgaatctaacaccccttaaacagggtagccagatctgaggctttagcctcattttatgggtttttgataggtcaatgaggctaactaaattttcaaaatgaggctttgaggctttttatagttttttgagaaattttgaggcttttggggaaaatcgtcagaatctgttaaattttatgattaattttgataaataggcataatgtttgacaataatttaataatttgggtttttaaaaagttcaccgctaaatgatcaatgattattccaaattgaaaaaaaaaaccaaaacattttgcaaaatgacagagcgcggacgtcaagctgtgatgagcacaacaacaacagtcagcaacaccaccactgccagcagcagttggccacgttgcaccaactgcatcaggcgaagagcacgccgctgaccacgagccggacaagcgccagcattggagccgcgtttgaccgcagcgttggcactggcggaagccggcaccaatcgcaccagcaacagccgcaacaacaacaacaacggcatcaccatcgggcatggaccggcatgaccgttgcagaccaacatacagccgaaagagctggcacaaatgccactcgctggacatcacaggtgaaatttgttgacgaaatgtctctttaagttagatggtggggataaaatgacgactaggtttaggggcaatttgtctacccaatatgggacaaaatgccgacacagcaaaggttttatacaagttgtcctcgagatatgacaaagtgccgacacacataggattcgggcaatatttccccaacactaaaatggacaaaccatctaaataatagccaaccaaccgaattacattcaaagattttattggcactttatcaaatttcaaatatttaaaatgtacaggaccattttccgacaatttgtcaacaaccgcaacaacaacaacaaaagttgcgcccctccgagtcattcattcgctccatacagcagcagcaacaggagttgaagcagcaacagcagaagaacacctccaacaccatccccagcaacagtcgaatgcatagacggcaaaaaaagaggtcgaaatggcatactctcgacaaatgtgtttcactagtctcgattcttgaggccaattaaaaaaatctttgcataattctttcaagaaaaacataaaagaaattttttgaaggaagaattgcaagaattgaaaaaaaatttaaatttttttcaatttcataaattttttaaatgtattttttgagacttttttcttttaaaatttaattttttttgttttttgttttttacatgttattttggaaactggatgacccttggattttttcctttaatttttcccatctattttttcaagga

SEQ ID NO: 25199 - DNA, 1836 bp, Heterodera glycines
  unsure (1)..(1836): unsure at all n locations
aaattaaattatatttacgcnnattaaggatgggtactcacgcaacaaattcctccaggagacggcgttatgcccacaattggtaagtttttacttaaatttttatggatttaccctttctttaaatctttaattttctttcactgatttgtgattttgaaaattttttcgttttaaaaatgattttaaaattaatttactttttaaaattttttttgagaattttatagcttaattttacaacaaaataaattttgttgccttaattaattaaaaaattttttatttggttttatttccaaaggtgttattcacatttggaatgtctcgttaacaatggtcgctttgatcttccattgcattatgcttctaatgaacaaaattctgccaccagatttaaaatttctccccgacaatgtttgttgtaaatcatttaaataattaaaaatattagtagaattaaacatttatttatttagttttccaaattttcttcaattctgaatcgttacaagcttttcaagactgagtgcctctcaattgatccgcaacagtgcttataataaaatattttattcgattttaatttgaatatttaaataatattaatctcataacttaagtaatgctttttaacttttagaatgggttttgatctgttggttgaaaataacgctgacctttctgcttccggtgatcaacgaattgcaagaaatggcggtgatgtgttgttcgaatttgatcagtccccgataattccgcccactcaacaaaatgtggataatacaacaatcattcaaatggacccaattgtgcatgaaagcggctatgaaaataaaattggcatttcaccaaccacaacggcagagcaatttgaatccgttcaattggagggtctgtttttttaaatggccaattgtggattttaagctaaatttcaaacaatatttatgtgcattttgtggtccggcagtgccattagggcaccgccagcgaaaattttgaaattttaacgaaattttttcatttttcggttatgctatgcttttccgttccataaaaatataaaaaaccaaaacatttaaggagatcgatttatacagtgcagaaacaaagaaataaattcaaggagataaaaacaatttaaataattaaacatagaatcaatcaatggttgttccattttctaattgttttcttttaaatcaagctcatgaccaagcctcgtcttcagctgctgaacagctttcaactgtgccaacaacgtccaaaaaagcattctcattaaatttgccattgttcagcggcaaaaatggaaggacaaaaaagggcataaaaactcccttttcaacgggagcagaattatttggcggcagcaacgaaattgtaaaaattaaatatttaaattaataaaaatacatttttctattctaaatttaattaaattcgctaagacactttcgaaaacaataatttgtcataggtctattgtaattataatgctttttcacaaaaattttacaaaaatttattttagctttcaagcaatgatcaattagaaagtacgaatttaaatgcgcaattggttataaaacaaatggaaggagacaatcgacccaaagaatctgtcggcggcggtgtctctgatgagaaaaacggttacaaataaaaatttaattaattaaatttatttaaataaaattaataaatttcaagacacaacgaatgcgaaaaagttcaaaatggcgactgtaaaacgttcgccattggaggaagaatttggctttgttcatacggttgatgttcacactgtactgcttggtctcggccattctt

SEQ ID NO: 25200 - DNA, 1609 bp, Heterodera glycines
gattttccccgctccgtctgaattttgcaattcacttcttataaataaatttgaatgcgcagtgaattttatccctttttaccaatgattcgccgcttttcttcagcaccaaatcggacgtgtgggctttcggagtgcttttgtgggagattttcacctacggaatggccccttaccccggcgtggagctgaacaacgtttacgttctgttggagcgcggctttcgcatggatccgccgccggagtgtccggactgtgtctatcggctgatgcttcagtgttggaattggtccccatctgaccggcctcgctttaaggatttactgctcagtctgttctctcaacagccttcggaaagcgtcgactcggaacggctccgatcggcgagctctttggcatttgcggccgcttcagcggcacaaaaaagggaagaacggaagcgcactgagcgagaagggacggagatgagctcgaaacggtgggaaatgccaaaaaaggctaacggtgaagttgccatcaaaggagtgccgaaggcggtggtgccaccggagcggtccttttgctgaacaatgcccggctgtcatactcgggatgtgctgccagccgagcaaatgtcctcagggaaagggcactttcgtcgggcgaatcgcgtgccttccctccccgcgtccgtccgccgtcccccgacgcgccgcctccgcccccgcggcccaatcgcagtcaacagaagagggacacgcgtcagcagcaaccgcagcagcagttcgcctccacttttcgaccggcagaacccgcacaaatggtcggaggagtgcaaatactccgcgaaaacagtccagcaggaggcattggcggcagaagtccctctgaacgatattcgccttttggcacgcgcaaaactccgcagcaaaattctccgtgcggtgccattcaaatgaaaaatccgcaaaaaacattttgggtgccaaaagcgcaattggcagagaaaagtataaaaggtcaaaggattgatgaaggggtagactgaatatgccatttaagcagaaacaatggacgaatgttccgacaaagcgacgatggtaagggaattagaaacaaagagggaaaaaaagcaatgggacaccaaatttagggggaggaggaagaggaggaggaaagaggaagagaaaacggaggaggaggaaatggaggggaagaggaggagcagcaacagtgggagaggagacagaagagcaggtggaggaaaagcggggcaatcagtggaagcagcaaaacatttaggaccaggggccgtaggacggacgaaacaaacgacgaattgccgggggcactgccattggaccatttgaaattgcggctgaaaaagaccgtctccgaaaatagcacaatgagcagccctcgaagtgaggcggagacggggaacgacccgctgttgaagaggccggagccaaagccaaggcgatccatcgaggggaagacgaaatcgacgagcatggagacgagggacacgccaagttcaagcagttcaagagggaacagacggaacagcacaacacgaaccattctcagtgagaattcagaccaagcgaaaacggcacggatcagaaca

SEQ ID NO: 25201 - DNA, 1642 bp, Heterodera glycines
atttttttttcattttttggcgtagtgttccagctgttgaggtatttttgttatcaatgcttctggattaataatcttttgataaaaagccccagttttaagctaaagctaccggctcaaatagttcttgggataaaaaagttctgcagcatttaattattaataaaatgaatatttaaaatacttatttattacaacaaaaaaaaattaaaataataatcaaatttttttattctattttgaatattttttcatattttacggtggcttttaaaaattgacaatataattggacaataactaattgctgattatttaaatattttcatttcaggtaaataaatggaataagattaactttttttagttgtaatttgtttaattgcctttatatattgcaagaattagtagatttattttagggatttggccaaatttcaaatttcttgaacctttagaaaacttaattgaaaaaaaacacagaacgaggttttatacaattttggcctcttgtaatacaatacttaatgatatagtactttattcagaaatataatcaatattactagagttgaccgggaccggggcgggaattccgggtcctccgaggtcccggttcccggtcccggattttgaaaatttatttcccggtcccggtatggcaaccgggaaaaacaagcactggtaagaatgggggtcaagtgaaggttttttgatggagaaaatgaaaaaaagattcatatttgaacttatgaacatttcgccaattttctttatctttcacacatttttacatttcacttaaatcaaatgtatatttttttcctggcttctccatgctctaaatagcagaaaaaacactttcttttttgtgcttgcgtataaaaatcaggacttttatttgcatatttgatgcatatttcacgattttatttgcatatttatgcgcatattttggccatttttcgtgcatattttttgcagccctgactattatttataaaaaacgacaatttcttcttatttagtttatcaataacagaaaatgtctgaaatctgtaagtttttcaattttctcaactcaaaaacaaggaaaatctgagccaaaaggacggggaaaaggtgtaattaatttaaaaaaattttgtttttttatctattttagaaataaaaacaaattgacaattttatggtaatatcaatagggatgtcaaaaatatgtacaaaaattggtaaaaatatgtacataatttgtacttggagcccaaaattgaatcgccgtgtgtatttacataaaattgacatccctagtgatcaaaaaaagtgcattggaagaggccgaaaagaatgtataacacgaataatgcttcgccagaacaattctttttattttttcgatgacgcggacttaaaggattgtgcaagaaggcctatcccagtcttgaatttaatacaaaggcatttcttaattttgcattttagaaatttgaatttgtatttaaaaaaattaaatttttaaaaatttttttgaatttttaaaaattcccggttggtcccggtccaagtcccgaaaaaaatcgaggtcccggtctcggcttctcacgtccccggcaagtcccggtcccggttttgcccaaaattc

SEQ ID NO: 25202 - DNA, 1756 bp, Heterodera glycines
aaataaaaaaaggcattaatgagggatatctaacagttacgtgccatctgttcacagtgctcgtcgccgaaacgccattcccttcggcgtcgaggacagaaacgtgcgaagtgccgtggtcctccttctgaagacattcgatggtttgctcattcccttcgctttcgatctgtcttccccctccccccttctgtccacctgtgccacaaatggctcttcggcataatacgcggaaaacatcgcttttggtggcacgcgcttcagaatctcgcgatggaagcgcgtgctggtcatatttctgtgcacaaatgggcattattctccaagggctctcctttttggccaaatgccgctttttctgtttacctggccaattccattgcctccggcacaaaatcgacgtccccaagttttgttcgctgggcatatgcaaatttctgcgcttcgatcagccaatggtaaaattcggtgtcgtccaaaacgccgtcggtagggtttccgaagcgcgtgtaattagtgaatttggctgaattgaagtcgaaaatttggcacaacaaatgccaattactgaccgaccatcaccgccacaatggcctgagtgacggcgaacgacgacggcggcggagggccgcacattcgcaaggcgccgcggaagccacccgaaatgagcggcgagtcgtaaacctttggtctgtagttggccaaatcgtctttggagagcagaccgcctgatcagagaaggccatttgatcagaaatgtaaggaactatcgattgattgccaatcaatcgattatcgagcaaaatgccatataatgcttttaacacattccttttttgccatttaccatttttctgaatttccgcaacgattgtttccgccatttgtcccctgtagaacaattcgaccggattctgcgcattcgccagcctttccattgtatccgccaattcgggccttcgaataacgtcgccaaattcataaacacttaaaaaatgcgggaattaaaacgtttgccactcttttgatcttttgaccactcaccgatttgtggcggggtttatccaactcctaaaacaaatttaattggccaattaaggcaatgaattaattagtgcaaatgcaaaaggcatttgtccactgacttcatcgatgggagtgttcggaaatgcttctctttgacccccaaaacgtaggccaaatactccgaaatgggcacccccgtcctggccaaccgaacggcaggcgaaatctgatcaaaaggaaagggcgaatgattacgagtgattaattggttgattgatcggcttatccccccccccactcactaagtctgtccaattcactcgtccgctgccgtactctttgaatgccaaccaatagcccgcgagttcgccaggggtcgcaattgcgcgatagcctaaggcatcattaattaccatgggtaattagtgtattcatttggttgatcactcatttaagaaaggtaattagcgtaatacagtcggatgatcacgcatttaacaaagcactattttgtgcctttttctcaccatatttcgatgcccattcgtccgttccgtacatttcccgagaactcgccgccggcgctgtctctcgcgcatccaaaactttgcaactgcgcgatttggcatcgtaaaaagtcattatgaatccaccgcctaaagcaaatggaaaaataacatcacattatgcatatttatttaataattaggcttatctaatccgctgctct

SEQ ID NO: 25203 - DNA, 1630 bp, Heterodera glycines
  unsure (1)..(1630): unsure at all n locations
atttttctcttttattttcataaaaatttgctcaaaatcacaaatttgggacatttttgtggacaaatctgttacnaatcgcataaaaattacaaaaaatttcccgccggcgcctatcggcaccgcgggcccctattcccgaagttttagtgccgcaaaaaatcactttcgattttcgtgctcagaatcccaaatgctttatttccaataaaaaaatgatcaaattgatcatggaaaatctaaaatataacatttgagcattttaaacgtgttttgaataaattttgtaaaaatgaggctttttgacccaaaatgaggcttttttgtctgccaaatgaggcctttgaaaattttagtctggctaccctgtatacaaaagtgaataatgtgagggatggtggaccttcttttttaaatcaattttttaccatcaaaaaaacgatagattgcaattgattggtatctcataatgaaaaagttttatttcttcatacattatatttaaaatataacaaatataagctgaaaaaacaaaattcatttaaatttctctgattcaaaaaaatgaaaattaattttgtaattatttttttcttatttgtaatcgtcgtaattgatggaaccgatgaagatttatttgatgatttgtggaaaaacgttaagctatcaaactcaaaaaacattaataaacctatatttggggaaattaatgccataaaagaagaaagaattgttaaaaatgaaaatgatgaacaaaaaaatgccaataaactccaaatggaaaacacaaagccaaacttatttcaaaaaattaaaaagaaaccattggaagaacaaaataatcatttaaaactaaaaatgccaaaaattgaaatggacaaattgagcgaagaatcatttgaaattgagtttgatgagaaagctgatcagaatgtttcgtcgactgatcatagcaattcttcagatgatgaggattacaataatatggtaacaaaaaaaacagtatcattctaggaaaaaaagtattttttgaaaattcgcttgtttctaaaaatttatattaaaaataaataaattattttttagaatgctgaaacaagaaaggaaattaaaattttaaacgagtttaatttgatgaaaaaggaattgcggtgcaattataaaacaatgccaattgttcaatttgaacgtgaaattgcaaaaaaagttgggcacatatcgtaccaaaatttataaaatgaagagaaaattagaacaaacacggaagtacacagtaaataaggacataaataaggacacaatgattcgaatgatcagaaaatttgatgaaatgaaaaaggaaaaaatttatggatttaaatatgtatgataagaacaaaatatgcaaaattgaatgtgaaattgcgaatgaattgggaattactcggcaaaaaatttatcaatggaagaagaaaattggtaagaacaaatggaataagcgaattttaataattgtctcattttaagatttatctaaaaaattttcaacgccacaaaatattgaaaaaatagagcaatttgaaaaaatcaaacaagaatttaccaaaaaattcaatttgaaaccaaattgggaaattgaaataaaaatcgc

SEQ ID NO: 25204 - DNA, 779 bp, Heterodera glycines
  unsure (1)..(779): unsure at all n locations
tttaatttcaggataaaaaatcatgataaaaaatctcaggatttcataaaataaaaccgccaaaaggtttgcgtgcgagcaaaaagatttggaattaatttgcaagaattgaatttcctccacctgtcactttggtgacagacggatgattgatgaccttccgcggcactgcgcggcgcgggcaggggaaatgaaaaaacatccgcgaggatttggggaaattaaaatccacaaagcggcagacttcaaagaacaccctcccatataggctcgggattgtgatcgggcggcaacttcaaagggttgcacccctcaaataggttcgagaaaacccgcggcggtaacttcaaagggttgcacacctcccataggcatgggtttgtgcggtaaacacccgctcggaacccgctcgcttttgacgccatatactactacaaaagacaaataagtgattttttattaattaatattaattttaaaataattctcttaattaaattaacattaaatttgtattgttttcatcgattccaaaaaaaagcaacttttctgttaatgaacttttgctcaatttaaatgagattttttccattcaaggtcacaaatgacgaaaaaaaatttattcatatataattgcttcgcaactaaataatctatgaaaaaatcttcattttaatttttttatgtggaaaagaaattattttattcaaaaaattttttgaatctgaagccctggaaggtctaggaatttctcactnattttgtgcaccaatttattt

SEQ ID NO: 25205 - DNA, 1897 bp, Heterodera glycines
gagagaggagataagggtaaatcaaagaagcaaaaagaagagaagaaagaagagtaagaggaaagcgggagagagagagagagaaagtaggaaagagaaaagggaaagagaaaggaacagagagagagaaaaaggggaagggaaaactgaaaggaagaggaagaggaacagagaaaagggaaagaggaaaaggaaaagctacaaaagggaaaggccaaatgaaaggggaggggagaaaagagaaaaggaagcgaaaattagagcaagaggaagcccgttttggttggagcaaaaacagcaaaaggcggggagggaaagaaagtggtcgcgcaaaaacaaacacttttgctcacgctttcagcagcaattaacaattaatgggaatttaattttgaaatgcaaatattttaattgtttaattactaaagtttcacttcaagatcatgaattgcataattaggaatcaaattctaaaccatttctttttcagttcctcaattagtaattctaattagttaattaattcgttaattgccttccgtccggaccccctcttccctccctatgttttttggaaaaagcgcgccgaaaaaaagtgctgttaaaagcaaatctgaatttctattaatattcgatcatttggtccaaaaatgattaattgtttgaaataattgaagtaaattcgatttgaaaattttcattaatttaatttatctttaacctttggattttataaataaaaaacaaaataaaaatttaattttgtattattttcagttgaaaaaaaatttaaatttaaatttttttaaaaatttttgaatttttttgaatttttaaaaattcccggttggtcccggttcccggtcccggtcccgaagaaaaatcgaggtcccgatcccggtcccggcttctcaggtcccggcaagtcccggtcccggtttttgcaaaaattcccggtcccgtggcactctactttttatgtgcatatttcgcgatttttggtgcatattttatgcgcatattttacgattttatatgcatataattttacaccctagtcattatttttcaagaaatttaatgatctgccgcaaatttttttttgatcttttaatcccgaatttactgaaatttataattttgcattttcctccccaaaattatcaaaattgataataggagactaaaaaaataaaatttgatcgaataaattggaaaaataactgattagaaaaatttttgatactaaaatcttattttgggcttggtgttttattttgaaaaattttcgatggaagccctggtttaaaaatacgtgaaaaggtgtggggtttaaccgaaatttttgcgaacccaccttaacatcgaatttgacggtgctaggtcaggttgtttcgtaaaatccgccaccttgagcttttcgtaaaatccgccattttaaacatggtataactttgcttaaaatcaaccaaattttaccttcttggtaccattcgatagccattttgtttctctactctcagattaattgccattgattaatctgtccattgatattcgttgtgttaatttgagtggcttaatgccctcctctgccagtgaatgtgaacggacggcattttctttgctcgcacaacgacattttgggaaaagcaaactaatcctcaaccaaaaatgaaaaagcaaaatgaattgattgatttatgctcctctgaaggccaaagtgatcacaatcaactaaaagcttataaaatcttttgagaaattattttttttatggtttaaaaatggtaaattccaggctaaaaaatctgctaataaaatcccaaaatttcttctccaattttattttccttttttttttaaacacttttttcacaattaaatcggaaaattt

SEQ ID NO: 25206 - DNA, 2164 bp, Heterodera glycines
aatttgtaggcctcggcggcccgtcaatcccaatattccgttttcgaattttgcccttcccaaatgcttcttttttgtttttgcatcaaattttaaaatttccaataatgccatttcttccaatttatgcttcagccagcagcggcgccactacgccagcggtgccatgccaaaatacacttacaacaacaggaaagctgacgcccttctgccggacaaatggggcgccattttgttttttggcgtgttctcaatcccgatgatctacataatctttggccgcaccgacgccacagtgtggtggaagctggaggatgacgacaaatgagaaagtggactgatcgatatacatacaaatgatccaactcttcatttacaatttggaaaaattttcttgtaaaaattatagggaaatataaatgaataatgacttttcttttctttgtgctatggtattcaacatgtttttttgagtctttccaggaacaaaattttgtttcgaaaagctcaagtctgaaaacatttcagccaatttcgagcacgggaccccaacttcaacaacaagccgaaaataaaatcctgccttttttcgaaatttttaccggaatcccggtaccatcttttggtacttgtgcagtttacggtaatagtgtagtttgtcccccccccctttttggaaaaaaaaatttaaaatttttttcttcattgaaacatgtttttgggggttttcgaggtcgctgatcacgaatctgacctccattgcaaccaatttcgaaccccggacccaaattcgaacaaaagtcgaaaattcattttttcaaaaattctcatttattgtccaaaatcgattacgatgcacgaaagaacaaatttgcagaagaacaaagctttgaattcattcacatgggtatagttcagtgacatgagaccaaaaattataaaaaacatcaacggtatcgccaaaatgcttgcgccacataaactcggggaagtaactttcaaatgtgtttgcagtgtttccgctacgtggtcggaattgcttataatgatgccacattgcctcaacattttgggtataagaaccagtaagaggggacaaactacactattaccgcttaagtgcttcgaaattatttcgaaaaccataggaaaacaacaaaccattttttgccagactttcatagccgctgctttctcagttttagtgctgaaaacttttggtcgcatgtttaactggtcccaaattccagcagaagcaagtcgattgaactctcggtaatattcggcatgtccttcgctgaaaaggcaaaacagtaaagaatcaatcataatttcaaaaacctaatgcttgatgcgaatctcttggagatagtagttgaaaaaccatgcattccgcgggaaattacaggagaattcattcgtaatttgctgattttgatttaattaaagtctacttataaaaaattctatgctataattgtttaaaattgaataaataaatgttggaaatgaatttttgagaaatttttcatttcctaggggtgcattttcctttttattgcattttgttaaaaaggcaaaacgccaaaaatagttggaaatatttttttcaaaaatgaaaccaggtgaaatccaaaagaaaaaaaaagatacttgtgtgttatctgtgggcagattttcaaaaatttttatgtttttcgctataacttttttctttggcatccaaatccatgattgttggtatcattataaagctcttcatatgctctattagtcttactgaaaattgactatttctaggataaattttctaaaaattaataattgctctgacaaaaggccaaaaaatttaattttttttttcataaaatctacatttttacttcatacgcaaaaatgcgatttccaagtacaatcttggaaaaaagtacagttaaacttttccaagcacaaaagccgaaatccaagtatgtacttggcattcaagtaccaatccgagccctgaactattataatgcgataaatactaatattttaataataaatttaataaatcacatttaagcaattgtttaattcatattcattcattaaggattcctataatcgctgattaattttaataaattttttcccaattaataattaaaagaattggccatcc

SEQ ID NO: 25207 - DNA, 1520 bp, Heterodera glycines
agctcattgtattttagtaaaaaattaacattaatattttttacccttataaattctacactataattatggtaaatagcaagaaatcacaaaattaaaaaaaattcctttagtgaatttttgcaagcaaaaggtttcccttttgtttaatataaattccaagggggagtgaaaatttgttacaaacatatatttttgtttattgtgaattacaatacaatacaaaccatgtagtttgatcctaccaaattcatattaaatcaataaatctttcgcatatattgttaataaatcaaaatttttgaagaatggtttaaattatttttcttatttttaaatataaatgactttttatattaaaagcaagtttattttttactataaatttttttattaatatataatacgagaatataacctaaatacaataaaatttaagaaatagaaactactatgtttttttctcagatttgtatttggcgcattagtgtattttacattttgataaatccgcaagacattttttaggtggggggttttaaatttaataaatatgcatgaaaaaatacaaattaatttaataaaatggatctgaataaatatatagacgataaaaatgcaattaacgataaatcttcgacgaaaagtgccgagttattgtaaggattattagacgcatttccctcatttaattatttcccattggccattatcaattcaattacatttatccttttctcacctttttccttttctcattgtaatgtttctccgcccattctcttcgcattttctccttccccagtgatcagtcagtcagtagtggtgatggaacagacttcaattatttattccgatttctcgcttcgtataaatccaacaacgaatgaataaagacatctttaacagtcaatgagtcgtttgggggttcggggcttggtcaaagggcccttggcttttccccattccctcccaaactccatccgggataaacggtgcatagttggtctgggggcacagtgcgcatccctcactggtagcaccggatggttcccattttgggaaacgacccatcattgacgacgaagcagagaattggataagccggcagaagtttgtgggagatctccctggcctgagggctagaaaaaaaagacgtgtacacgcaagtaaagaagtctgagattctaaagttgtccgggctagtcgaagactaaagggactttaaaaaaagagaaaatttgtccgggctagttggaaactaaagggacattaaaaacgaagagaaaaggaggccaaaaattcgtcagggctagttaaagctaaagggacttcaaaaatgcaaaaaagaggacaaaatttgcccgggctagtctaaatgctaaaggggctgattgctcagaaaattgacaaatttgacgagagagacagagaataagaagagagtgaaataagccaaaaataaccaaaaaaggggcctggcaaatagccgaaaaattaactaattttaaaacctgttt

SEQ ID NO: 25208 - DNA, 1598 bp, Heterodera glycines
aattgttatagactttaatttcgcgcaatttttgtcatgattttttttttgaaattaaagcatccttgatactttcatctagtaattactttcagggttttcctgaatctcaataggaatttgcgaaagtctccagactcagattgggaaaatttatggctatgttgcttctcgattctcggaaattttcaatcaaatgagcgggattttggatgttggtctgatcaaaagcctagtcatatttcgattttagttaaactccattttcagcgctccgatcattgaatggtcagcaggtgaattaataagagaacgcaaaacatttttatggccatggccaatttggaaaaaaatgtttttattttaatctttttttttataaaattgcaaaatgaattttaatatttaattttgactgcttataaaatgaattcggcaaaatacgatcgttttgatgaatatgaaaattcaacaaaatgaaagttctgaaatgcgcaatttttatatttttagcacaaataaaattccaactaggacaaacgaagaaaaatttagtaacgaaaaaaaaatccaccaattagcgacgaaatattgcaaagaaattgggaattggaagtcgaaccctttcacaccttggaaatttttacattttttgtcaaaaataattgttcaccaaatccaatctccattttttggctggatttgttcgaaatttttccacttaatgactaaaaataacattaaataatctgaaaataacgaattttcaaccattgtccccctttcctcccattttttgtcaaaaaattttcaaaaagcgtaaaatattttctttctttcaataccacacatactttgttgaaatttgatcaatctcataatgcccctcttttttctcatttcacaatgaatgccaataataattcattcattttttgtctttctgctgcctgcgcgaacgaatatttattgcgtttgtccgtcggtcgtcgccgccaccgccgtgtccgtccgtccgtggtgcctgccttcctctcattctctccaatcacatttttgcgatcattgggggaggtggggggaggggatgatttgatgtgatcagcagcagccgcaggtcgatctgatttgtcggttcagcacaaagtgtggtgaaagaagaattttgttttgttttgttttgaccatccggcggataaaatgtgccaccagtcgatttggggtggttctgccgtttttttgtttgtgcgtccgtcgatcataggtttttttaatcattgttttgggttaaaattttcgttttttgtttgtggtttttagtttgattagcattgcttttttttaatattcctttggctcttttttgtgcatttttcttttattgacaatctttttcttgcatttattaggcacttaatttagtgaaattagcacccattttaaattttttaatcttctacttttattcggattaaaaataaaattttggaatttgggtgaatgtttaccatccatctttgtcactgctgcgtgttgtcaagtggcgagttcaacgcctccactttaagctgacgatgttctctcatggaaaactttca

SEQ ID NO: 25209 - DNA, 780 bp, Heterodera glycines
aaaatggggccccataatttaggtcaaagtggggcgggggcatgtgccgtggatgagcaggaggcgcgcggcaccgttcgctgccgctccttcttcccggtggtgaacccgggcgaccgatggtgcctggcgcgcgccatcgtcctcgggctggccgaccgccgcgcccagctgcagtacggggccggaagcatacaggcggcggcccaattccgcgccttctggctggcacagcatgggcctggcggtgcgcaggcggcccggcagctgctccacatggccacactgccgctcgacaaaccagactacggcgttgctgatgctcagcgtctacaacaggcgctggacacgcggctgggcgcgcagcaggtgcgcctcgtgatcttcgagcgggagcacggctgccgcgtgctgtggaaaggtgtgcagcgtgcgcacttcaacatctgcgtgttgctgcagcagggcgcacactacggctacattcaacggcctgcgcaactgtttcgggtgagaaaatttatccatttaacgcaaagaaaagaaaagcaaaaaaaaaacaaaagcaaaagagaatatgaagtgaaaaaaaatgtgccaagtgaaagaaaattaagaaaagtaaaacaaacttcaaaagaaaaattcaaggaaaaatgtaaataataaagaaaagccgcaaagtcaacaaaaaaaacaaactcctagaaaaatatataaagatttatggaaattcatttaaaaaatttattcatttaaagaaaagcaaaaaaaagaaaa

SEQ ID NO: 25210 - DNA, 1837 bp, Heterodera glycines
  unsure (1)..(1837): unsure at all n locations
gaaaacaaaaaaatcgattttttcaagtgtccgtttggggtactcaatcaattatggggagcaaaaatccaacgcagaattaaagtacaggctatagggaagctattcccgaaggattcggtctccccataaatctgggcgcatcggttcggggggactgccccgaaaacaaaaataaatcgattgtttcaagtgtgggtttggggtaatcaagcaattatggggagataaaaatataatgtagaattaaagtgcaggatatagggaagttattttggaaggattaggtgtggncataaatttgggagtattggttaggggggagttattagaaaacaaaaaaatagattttttgaagtgtnggtttggggtaattaaaaaaccctgagacccccgcccccatgttccacatttttttgggaaaagcacgccgcgaaaaaagctgttttaaaaataaaaaaggtcggcaatttacatacccgggacccctttacaaatgattcccaaaatgaaccccaaaaatttaaaaagaatggattttacgtcacaaattataattttttcctttcggaaccgccaaaccaagacaatctttttaattttttttaaatgggtttcttaaaggatgagattattgaaatttaatttgaaaattttgaaaattttcgaccagagttcagaatctgccatttttcctatttttgctatttttctcccgcggcccatattttgggattttttgcctcaaaaaacatgcaaagcttttattctgatcataaattactcttaaccaatttttagattggatttttttaaataaaaattttcaaaattaaaaaaaaaatttttttttgaatacggattgcggattacgggaaattgcggggttttttgacccccgcaattgcggattgcggatttccgcaactgagaaaatcgccgcaattgcggatggcggatttccgtaattgaaaatccagttgcgcccagccctgctctaaatggcatataacacacattcatggaaacactaatatttcttgaacatttttgttttatttttaataatgaaatttcaactcaaaccacagtaaaacagtcgttaaaaagaaatttaattaatttttattatgtcacaaaagcaaataatttaattgtaaacaaatttcaagcaaaaaacggataattaaattgcaacttcattaagtgaaacgtactgaaaccaaagtaaaaattagattattaatagaaagagacagttaaactaattctgcaaattgaatttcgaacgttctttcggtagcgtttaaagtaaaaaaaaaaaaaaattccaatcagaaattgtgaattcattttaaaattattggcacaaacaatggcaacaaagaatggcctcaattaacaccagttcaaatgatccggtattaaactttagtaataattattttatttaattaattaattatttatttaattgtttcgcccagctttatttggcctaccgtttcgccggtccatccgccgatttgattgtgccggctgttgcactcaatttggttgcgttggttggcattgtgttgaacggcacagttttggtggtcactgtcaaatccaagtaaatcattttttaattaatttaaatttattttcagttccctccgcggctccgccaattttctgatggcattgatttgtatttgtgaattggtccaccaaattgggcactctttttttctggttgttgtcatttcgggcaaggattttgtcagtttgctcactgctgacttaattatgataggaaatttaattttaaatatttttttaattttgatttaat

SEQ ID NO: 25211 - DNA, 1495 bp, Heterodera glycines
ttcatgtcaatttatgtcatataattttcatgataaagcaaaaataaaatcaaattaaagatcgcaggaatttataaataaatacaagaaaagagcaaatattattctgcaggctttttacattattaattggccaaaaaaagcaaatccgacaaatcaatacatataattaatcatcaatgaaagcgatagaaaatgtttattccaaatattttgcatttgcgtcgtcgtccaccaaaaccaaataaggaaatgccaaaattgggggcccatcctttgacagcccccggggggagggaaaatagcgaacggaggcgccgaaattgtgctgttttccatcgcggcgccgtttaatgtccaacagagagaacataaggaaaacgttgtaactgaagggagcaaaatttgtaattatttgatgaaaaatggtcaatttgtaatttttatggaaaaaaacgaataaaaatggcaaatttatatgaaatataaaaaatatcccaaatatgtacaaaatatgcaaatatatctagacataaattcgtagaaaagcataaaatacagtcaggtgcaaaagtatatgaacaaaaaaaaatttttttttaaacccggttttccatgagatgcgtgattggatggaaatctttatctatgccaaaacaaacccccaatattactcgtaaaaaacggcaaaagacattccgatcagtcaatccatcaaaaatttacgagtgcccaacaaattgacccaatttttggcggtgcaaaagtatatgaacaaaatagttaatcgccaaaaattcaattccaattcggcagaaaattctgaaaaaattcctgctaagctaacttttgatactgatcaaaagagtcttttcgccaacttgatcagatcactccttcatggtgatctgaaaagccaaaaatggcttgaaatcgggaaattttcgaaaaaaatccctagggggttaggaaaatttttctggaaaatttaagtaagcctgtcaaatagaggacaaaattctctaccgaaatgcttttggaatggtgggcctaggactaattaatacccgtggagaaagagagcgtgaaaaattgaacaattcaaaaataactgatttctaccgtatttcaagggaaaattatcaaaaattgatcatttttgaagtgtccaatttataaaccaagtataactttttatatacaagtcatagccacatcattcaaaaggcaattcggtagagaattttgtgctctttccaatggccttactcattctcactagaaaaattttcccaaccccctagtaatttttttctaaaatttccctgattttcagtgtattttagggtgtcccgatctatgaaggagtgatctgatcaagttggtgtaagagactttttttgatcagtatcaaaagttatataaataggaattttttcagatttttgggtaaactattaaatagtttttcaagtttgaggcaagacttttttcc

SEQ ID NO: 25212 - DNA, 832 bp, Heterodera glycines
aaaaaaaaaaaatcttttttttcaagtgtccgttgggggttctcaaacaattgtggggaacaaaaatccaccgcagaattaaagtgcaggctatagggaagctattccggaaagattcggtctccccataaatctgggcgcatcggtgcggggggaaatgcaccgaaaacaaaaaaaatcgattttttcaagtgtccgtttggggtactcaaacaattatggggagcaaaaatccaacgcagaattaaagtacaggctatagggaagctattcccgaaggattcggtctccccataaatctgggcgcatcggttcggggggactgccccgaaaacaaaaaaatcgattttttcaagtgtccgtttggggtactcaaacaattatggggagcaaaaatccaacgcagaattaaagtacaggctatagggaagctattcccgaaggattcggtctccccataaatctgggcgcatcggttcggggggactgccccgaaaacaaaaaaatcgattttttcaagtgtccgtttggggtactcaaacaattatggggagcaaaaatccaacgcagaattaaagtacaggctatagggaagctattcccgaaggattcggtctccccataaatctgggcgcatcggttcggggggactgccccgaaaacaaaaaaatcgattttttcaagtgtccgtttggggtactcaaacaattatggggagcaaaaatccaacgcagaattaaagtacaggctatagggaagctattcccgaaggattcggtctccccataaatctgggcgcatcggttcggggggactgccccgaaaacaaaaa

SEQ ID NO: 25213 - DNA, 1474 bp, Heterodera glycines
catggatgaaattgatcgaaactcaaatttaaaaaaacgcattttcacaattcgagaccgatactctcgagcatggggaactcttacaaagccaaagggaagaagtttgtcgaaaaaatgaagatatctttttaaataatttaaaaacataataaaaagagattaattaaacacctaatttgtaagcagtgattaaatattaattgcctttttattttaaaaaggattttaatttttcataatttgccatgtaggcttgatggctcagttggctatttgttcgccctttcatcaaaattcccgggttcaattcccctcggcgcatcagttgatttccaattgtccaaccaattaaaatggcttttggaattgcagaaatgcgctaaaatgacccgaaaaatgggcaaggaactccgtgaatggtgacaatggcattttgcctgtctcactgttctccgtgttcctctcacaacaatcttttgttttttttaattaaatttaacatttaaaatttgcttcgagtcggtcaccggtttccgtggggttgtgcgagaatctcggttcccgagtcgagaattttctcgagtcttttggctttttattccttttggtcttccccccccccattttcccccattttcgtctgtctgtctctctcataaacccacttcattgcgatgttgctgccgtccaccacaattgaccgtaactgtgccgttgtcgtgttcttcagctgctgcggttgtgccgtcgtcgctcgttgcgttttgccaccggacgacgacggcaaagactgacggcgctggtcgcggtccaatttgatcagctcacttagcaccagatcctgctgggacaaaaaagtgattgggtgatcagcagcaaagctagaagaagtgatttgctgggaccctgggattatggtttacccattaggacgataattagcggtaattagtcttaatgagttttggccgacgcgatcaagcacattttttcaagtgcaaattggccaattgtccacctgctgttgctctttgccattgcccaaatgtcgcagcaccgttcgcaagtcgttttccgtgtagccaagtcgcgtggcgaactccaacagttgcgagtcgatcgccggtggtgcttcgccggcggcgtcagcgagtgtgccagtgccaccggcggatgagctgccgcagtcgctgctcgtctcgcgcgacagcagcaaatgctgttgctcaccttaagaaggcagggaaatgtcaacaacattgggtctttggtactaatcagccagtgatcagtgccaaaatatactgccagtcctccgatctgttatttctcattatcacttggcactgatcacaaaaaagagaccaatgccaagacaagccttgtcccgatcatgccatcccgtcaataaaccaagctactcaccctctgaacagcttgagtagcacgagtcggtcaacgagctggcact

SEQ ID NO: 25214 - DNA, 1795 bp, Heterodera glycines
cgatgagcttccgacaagcaagtcgaagaacctctccatattgagctgtcgttgcagtgtgtctgcgaaaaaaagaacccccccccccacctcccacccaggagggacccttccagtatccgccacaccgacctgacagtttcagtcccgatgtggcggagcacctgcccgtgccgctcagggcgccttctgcgccatcagcttctccaacagctccacatcctcatccgacacgtccccagacggtcccatctcctcaaacatctccgcctgcgcggccgccagctcctcttcactcatcaaaccctccatcacttccgtctccaactcctcccccacggcggccgcagcctcctccaacgcctcttcaatccccaccagcggctcaaacgtccctcccggggccttcgccacctggccctgcggattaagtaaggaatcgatgtaaacatgctgttggacctggtgcaacgggccaccatcctgtggcaccaccacatcttccagctgcctccccgccggcggttgcccgccagccgacgttgccgagcagctcggcccttctttgttccgaatcaccaccttaatgggtggccccccgccctttaccaccccgccctcatcccgcacctgacaaatcaggcgctgagccttcttcttaatgctctccaggctgcgtggggaccaccccttcttcttgccttcggcaacgaacacggccgccagcttggccagccgggccttatcctggccgaactgcccgccaatgaaaaattttttgtttaagttattatacatgtatatattttcatttttatttattctttacttcaggtgttgtatgcggttgcatttccgttttatatgcattttcagtatacaaacgatagcattgtccaggttgggtccgcccagcacgacctgctctttgcattgctgaggcttgtgaaattggcgtaaccagaaggctctgtgttataaaaaattaatatacaaccaaattcatgtatacaaacacaccaaacaacctacttacatcaacacgaatttgtggattgtaaattttttgtttgcaaaatccagtgtcaacgacaaaggcaataccatcaatagtaattgatgtttcggcaacattggttgcgacaatgcatttacgatctaataaaaaaaagttgtgaacattttatttaagactatttattgcttattactgatcaatgtgcattttttgtttggaatgcattgttggaaaacacgttgttgtttgtccaatggcattgaggcatacaaaggaaaacaatactgtaattaaacaaaagggaaaataaataaattatatatatatatgatatttaaaactatttattactaattgtccaaattgtgaaaccatatcatcgttcatttccagcgaattagccgacaaaccttttcagtctccttaaaattctaattaaatattctattcaactttcaggtataaaatgattattactttttgaccagtcacaaaaattaaaagatccccaggacgctttgcagtcaaatggatttgcaatgctgtttcgaccgcagcatgtgtgtagctaattactggtgtcggagaatactgaattaaaatgcttttattgtgtgaaattgttgttgaagaattttacacgcaaacaaatttaccaaaatgtcaactggaaatgtgcgtcctcgaattatcagcatttcacaataatttaaataattttggaatcgggcagaatccaacgtggcactcatttaaatcagcttaagctttggacat

SEQ ID NO: 25215 - DNA, 1638 bp, Heterodera glycines
cttctaaatctaaatcatgggtgctccaaaaacttcagcaaaatttgaaaaaaattttattgcaaaattttatatttatcctaacttaaaaaatattgataatactgtttaattatagattttaaagctagaataaaatatttttaaacaaaaaccatttagaaatgcttctcctcacaaatttttcgacgaagaggtagattgcatcaattatcatattacaatcgaaacaaaaactgataaaggaaaaccgttaatatgtcaaatatattataaaataaatattctagtaaattaacaattaaaacatttgcaatattttcaaaaactttaaatataagagaaataactgaatattaaatgaaaaaacaccgaggatttgccatgcttttttaaaaataaacattaatattttttgatgttaattcatagaataatgaataaattattgaacttggtactgaaagaatttaaataaattcataataaaataaaaattttccaaatataaaacaaaaattagacaataaactaactaaagctagaaattttaaataaaaatttaaaaaaatttgaaaaaatacattggcctgccttatactatgcatgaaaattataaataaaacaaataaaaagtgaacaaatgttgaaaaagaggccaataaacaaaaaaatttaaacaaatttacactaaatcaaatgtttctttgaataaaagcaaaaaataatgtaaataaatatgaaatttattttaaggttttcatttaagaattttaattgtttactgatctgcttcctgtttattttaattttaccataaaaagaatttttggataataaaatataaaataaaacaaaatattaaggaaatgttttaaagaatgtatagaactaaataatatttttaaaaattaaattgataaaaaaagaaaacaatttttaaaaaattatttagcaattgagatcgattaattaaatgtggaattaacaaaacaattacaaatttttgtgatgggacacgagttgaatagaacacaggcccataataacgaaaaaacagaataatttgactatggttaataattagatgtgttataccagcgctaatattaaagaataaaaatcaatgtaagttcaaaatttctaattaaacttccaaggtgtcggtgactgtgccttcagtaacaagcgaactggaataacctacacaaaggttcgaaatctattgtatacaacaaacagcaaatgtttgccaagcttgtaacgaaagttggatcgcgaaataaataaaaaataataggctaaaaaaacagccataataaatttgaatattaacgaattaatatttatataaaattatctatctaaaaaattttattttatttttaatttataaataactatatttttaaactaaatacataatattgtttagaatactagccaatgtaaatttagcgattcataataactacaaaaaaatctgatcaataaaatcattgcattaaatttaatttttgaaatatttaacaaaaatttctttcacaaattaaactcgattttcattttttgtgaatcgaccaaccacaatttatacaacaaagtaatcaatttatgtcctttacacaaagggttgat

SEQ ID NO: 25216 - DNA, 1822 bp, Heterodera glycines
gccggtcggacaacagttggcgcataaacttgctgctgactgccaattgtttttttcagtgaatcgtcggcagtgccatcgcacgcgttgcaaccgctggcggacgaatttgtgacggcggccgtcgccttttcaatgagtgccgcttccacgccatgttgactccgccggaatttgccacgaacggcgtccattgatatgcaaccggacgatttttgactaacagaagtcttaaatgattttaatggataaagaaaagggagacaaatggagtcgaaagaatacccaaagttggaaataaacgcggaaccatttggcaccttcgtacagaacggccatcataaacaccaaaatcagcgagaaaaacagccctaaaaagaaaaataaatgtaccaatagaaggtggcaatatttatttcccccgtaagcctaccataaaatgtttcggtcctccaaaagtcgaaaagaatcacttcccgaaagcctccgtggaaaaacattttcatggcgtggccatggtcgtggtggtgatggccatgagaatggactgaaatggacgctgtaaattaaaacaatacgaattcaagtagagtgattatgatttaatgtaccaaatatattaaagttgagtgtttgtatgtatgtgtccgtggtttgaattggtgtggcgttttgtttgaattttgcgttaaaaatgaatttgaaaaaaagtagagggagggaaaggtgggaaatagtgcactgtctgactgtctttctacgagggcagcggcgggtgggaggggcatacagtgaacagacgcgtgctgctgtgcagcagcagtctgctggatgcgtgcgtgtgtctgggagagggagggagtgggaaaaaagagagagtaagtggaaaagtaaaagaaataagagaaaagaaatggaagggagagacaatagtgaatttgtctcgcaccccttccttatttatatcccatcttttattttataaaatatttaataaaagaaagaggacactccttagtttattcagtaagaaaatcctataatattaacattgtgttgtgttgtataaatgctttgaaaaatgaaatgtttttgttttacagttttcttttgtcagttagtgtaaaaaacagtcttaaaaatgtatcttttctttctttgttgtttgtgtttaaattgatttgattttgatatgaaaggtattgttttgcttatgtttttaaatgaatgaatgagattttgtttgaaaaatttgtatagaagaaaaatgttgtgtcgtaagaaaatgtcaagaaacaaggaagaactgttatgccataagaaaatgccaaaagaagagtgcgaggccgctaagcggtcgagccgctgtcggttttatcattcatttccggttattgggtttcgaagaattggtgagattgaattctggagtgattgaaatgcttgtgggttgagtcccagtgattggaatgctggtgggttgagtgccagtgattgaaatgcagaattgagtcccagtgattgaaatgctggtgggttgagtgccagtgattgaaatgctgttgtgttgagtgccagtgattggaatgttggtgggttgagtgccagtgattgaaatgaattaagtcccagtgattgaaatgctggtgggttgagtgccagtgattggaatgctgttgggttgagtaccagtgattgaaatgttggtaggttgagtgccagtgattgaaatgcagaattgagtcccagtgattgaaatgctggtgggttgagtcccagtgattgaaattctggtggattgagtcccagtgattgaaatgct

SEQ ID NO: 25217 - DNA, 2134 bp, Heterodera glycines
  unsure (1)..(2134): unsure at all n locations
gcaaattttntgggaaaaaaagtgtttacattaaactgcggaaatgaatggccccggcaatggatcgaatccacgagcgcaacgagtggaacgattacccggacgagtaatttcggcctaagaaaataatgggtcaacgaaatatggtggaaatctacggtattttgcaacggtgacgggtaaggcatttgtaaatgccagacgagacggtcaaaacaacgccaaaacaaaatccgccaataaaagcagcaaggaaaagccaaaagaaagaaatggcatgcaacgaaatgtagttttcaaaagtgtgtgggttggcaccaggaggaaggcaaatgttgggactcgtataaaggacgggctcccaacaaacatttggcaattcacagagcacagcacagtttgccttcgtttcccaggcagtttcggccatttcaaaattttgcttttaataaaaagaaataaaagaaagaaattacagaacgaaatgattggccggatgaagtgcgacaaattgacgctgtttaccgttaaatcaatgcccccacccccttgtccattcaaattcactctttttgaacaattatttaaatttttattcccttctcaccccgccccgacttcttttcaaattcaaaaaaatagttaattctccgaacacatctgttcatcttttaattgctccgatcgcagaagtggcgagcaaaggccgaaaagcggctgacggcaaacgataaaggcgcctattgttggccgaaggggctgcttggataaaccaatgacaaaaatgttgatgtttaatgttgaaataaaagaaaaatcacgagaaattccgatggaaaattgagctcaatgaataaataattaatggccaaaagtaattaacgaaaaattaaaggaacagaagcgaaaaagcaaaggccaattgtttaacaaaaataaagataatgagaattggcaaatgttgccaaaaataagatgatcgggaagaaattaattggcaattacgagagtcagcagttgatggaacaaaagagtcatttggcaaatcctaggcattttgcttaaaacaatcgcgatcggacgcatcgtcactttttttgttattcattttttctctcgagcaattaccaacggcttttagtttttcctatcaaaagggattttcccatttaagccaaataattttaaaacgactaaaccaaaacaccgaagttgtcaaatcatcaatttttgatcgaacggaacatcacgcagtcgaaagtgggcgagatcggtactgatcagtgatcacagcggaacatttgcggtgcggacgtgacttttcgaagaaggcaattacggacggcgtgttcaactacgaagtggaccaaattgaagcagtcgctcgaacggacaaaaaggtgaattcagtttttgaaaaaagggttttaaataaagggccattcgtttaaaatacaaaaattgcctgtaatttggaaagagtgaaaattaataaaattgaggagtaatttgaaggagtgtaaattaacgacagtaaggtgaaggatttgaaatactgtcgaattgtgcgatttgtgcaaaaagaccaaaagtgattaaaaagtaaagtttgaatcttgaacgacggcagaaaaaaataaattattaaaaacgaaatcctctgaagtgcctgattatttacagaggggatttaaggacaaagttaagagcaattcagaaagagacaaaaggacaaaggagagagatattaaaaaaggacaaaatcaaggggaagaaaaaatgacggacaataatgatttggaactgaaataccaagttttaaaattaaaagtggatgaattggaaggcaaattggctaataaaatatcaacaaatttaccatcgggcgtcaaaatacccaaatatagcgccatgggcgattttcacaaattttaaaagaatttaatattttggctacggcgtccaactggcaccccagcgactgtgttcgcatgttacccttatttttagagggggaggcaaaagaaatttttatgaatatacccgcggataaaaagaaaacttggcgggaattaacggaagcattggcggaccatactaaaaaggtggatggaccgatgtgggcaaagaaagt

SEQ ID NO: 25218 - DNA, 1516 bp, Heterodera glycines
  unsure (1)..(1516): unsure at all n locations
tttttatgtttagaaaatacatcaattttctgatgttgataaaaagaataggaagggaaaggtagcaaaatgttgtataagaaatgtcatttttaaattttaatttaggctattgctaaaatgataatgtcacccaaattttcgacaattttaaggccggaaagaaaaacatatcgaaccacaaacaaaagatgttgatgaacaaaatgatcaaatgagtaaaaatattttagcattaataactaattttcaaaattaatttcaccgaggcaacaaattaatcttataaaattttttttagacagaattaaacagaatattcaccaaaaaaaattttttaaataatttttaaatttaggaaactttaaaaaaaattattccacaatttaatatttttatacggaatagaaaacatagcgattttcgtgagaagaataaagggaaaaacttaagaagagtaattaaaaatatagttattaatgcgaattttaccaatgaatttaataaaaatgttgcaaaatttaaattaattttatttataattaattaagaattttaagagaaaaatattttatctttttaagataaagcaaaagtgcccgatgataaagattttggtattgaggagcctgaacatttcgatgaaaatggtaaattaataaataaaaaagtaaaatttattttaaataaaaaagaaaatgcggctgctgaaagtacggaatgtccaatatgttgtgattatgtaacatatgatcagctctgtttctgtgatcatttaattggtgacgcaatttttggtagcagttcaaacaatgcacaaaaaggcatagcaattaaaacgaaaaatgccatttaattaataaatttaagaatcgcatgccttctgccgcgagtgccttaaaggctacacaaaagcggcactcgaaacgaaaccatttgcaagcggttggctggacactgaaatgcatgccggaaaaatgcgaaaatcctcttccatggtgtaacttttaatatatatattattaaatttttaaatcgattcattatctaataccaatatgatgtttcttacgtcacattatattaataaaaaatttgtatgaataatataatttatgaaaaatgaaaaatgattattttagtattatacaaaacgcgaattataggattacaatttttcttgataatttgcattaaatcattttcataaatttatttcccattaatttatttcgtatagaaaatgaaaacgaaaattttctatatttttttgtcattgcttttgctattctctctgatacaacgaaatgagtcggcaaacacaaacacaaagcatttgaaatttgttggaagaaatgggaaatcagccgaaaatgggcatgaacagaaaaaacaaagtcaacaaattggtaattaattatgggtaattagcgggtggaaggaattcaaattttattanaaacccacaagaaaaatgaataaatttaataaaaaaattttataaaaagttaaaaca

SEQ ID NO: 25219 - DNA, 1529 bp, Heterodera glycines
  unsure (1)..(1529): unsure at all n locations
cctattttttttttacgttttgaataaattttgatttttttcacccataatggacatatctacaaattggtcatgagagatttctaaaaatccatgagacacttaccgaaaaaaggcgcttgtggtacgcctaaagtgcaatagagtcaaaaaaatttttcattttttaaaattactttagcaattatcacagttatcttcacttttcttactgctttacttcacacatgtgctttaccactttcaactggtcctaaatttatcatttggtagtatattttagtacttatagttatttaacctaaatgtgaataaaatcaataaaaatagcaaatagatgtcacctagttgtatcgcaacatatcacgaacgttggtctgggagactcatgattaagttttgcaaagttttggcgttctgattactaaatcgtaataaacttatttgtacttggagcccaaaattgaatcgccgtgttaagacagaaatttaattgttttgatttttctcattaaaattattcaaaaaattcccgaatgccgaaatgggaggagacaaatttagcactgaacacatttaccacaaatcgtctccaaaacaacaacaagccaacattatgcggacgagcagcatcagaattgaccgaattggcactgttgagcaaccgggccctaaaaacaggcaaaaaatcggctaaaaattagaatttctgcatttttaattcaatattttttggaaatttttaaatcatagaatttagcttttctgaacagtcaaaagttgaccaatgtgcagcaacaccttctgctgcgagcaatgagaagcaacaaattgaatcgccaaaaagctttttcatacaggtgggcaaaatgtatatggtcattgttgggtactttaggtttttgtcaccccctgaaattttttttctaagaattttttctaggctcatttttgatgctgatgacgaatctgactttttgtttttaaccatgacgtgtttccagtgagttaagtgaaattttacgtgaaaaatttaaaaagataacagtgccgattttaacccccccccccctttagaaaaaaatttcaaaattttttttctcgaagttaagtcattttaggtgttttcacggtcggagaatccggttcctacatccatttcgacacaattcgaaccttgaacccgaattcgaacaaaaagtcgaaactttcaatttttctagtttcgcttttcacgtaactcacgtacaaaacactttatgcctaaaaataaacgtcagattcgtggtcagcatattattagaaaaaaaatttcaggggggtgacaaaacttagaagtacccattgatggatggcacggngatgggaccaaaatttaaaaatcggaaccggaaaatcaggatttcaatgcttgaagtgatggtttttaattttttttattcttttaattcttgcatttttatattaattttatcaaaattaaatgangttaaaaacaagtttggcatttaatcttgttttggatacgt

SEQ ID NO: 25220 - DNA, 1208 bp, Heterodera glycines
agttcttctacaatccacttttgtaagcaaaatttaaggttaaaataattaaatcatatggcaattccatttaataaaaaaaatacatcaaaagacaaagtagccattaatttttggaagcgtttggacgcatgtattttcgcctatgtggtaactactttgaacttatgatgtaatttctagtaactaacttcctattgaatgatattgctatgaatttgctgttttctttttgttttgagctttaatttttaatggaaaaacagattgcataactttggccgcattctgtatatgctttttaacgtacagaaacatccatttcctctgcaacacggttggccacgcacatcgcagccagccttcgtggctgcgtgcaaataactttttgtgctgtgccgtgaacaaaatccattgcccattgtggaatttgagtggctttgccactgccagtttctccaacaattaaaaggcattgtttttgtgattgtagatgttggacaaattgatgttgatatttaactacaggaagtcgccttcgggtttcaagcagttcaaaatatttgctggagtatggacggttatttaagggattaatgtgggacatttttgctaaattttttaaaaatcgttaaattcgatattaagttatttagaataagaaattgtttactctattctacgggccgttagcttctccaataaatgcatacttgatatgtatttattgggtactggacttgcacaccgcgatgaggtggcccttttgtgcaagacctacctacctacatatctattgttaacaacagtatatatttatgttaacttttcagaaatgatttttttaaaagaatttattaaaacacaacactggggagtaaagactccgaccaagtgttgtgtacaaaaaacaaaccacacaattaaataataaaattaaaatttgaaagaaaaacactacatgtataattaactattttctaaaaagtacggtcctgattcttcttttttttctttgtgcaagcgttttcaaattccgcttacgatgttgttcctcaagacgcgcctttttggcttcttcgggcaattctaaattatgttgttgaatgtataaagatgtatgtttgatgatatatatattttaatcttaaccataatggtccaaaaattctttttgcttctgtatttgttgttgtggctgtgactgc

SEQ ID NO: 25221 - DNA, 1282 bp, Heterodera glycines
  unsure (1)..(1282): unsure at all n locations
gttatgtttacatgtaacatgtacaaaataattatttttgactttaatgaacaaaaatgaaattatatctattcataggaaattctgttgacatctaatatgtaaacaaattagacttgaatgaacaaaggaaaaaatattatatggattataatttacatgtgacatgtaacatgtaacaattgtaggattgaatgaacaaaaaatgaaagtttcncagtatatttatagtggtggacccaaggaaattatgtttacatgtaacatgtaacaaataattaattttgactttaatgaacaaaaatgaaattataatctattcatatggaatttctgttgatatgtattatgtagcaaattagacttgaatgaacaaaattggaaaaaatattatatggattttaatttacatgtgacatgtaacatataacaattgtaggattgaatgaacaaaaaatgaaagtttccagtatatttatagtggtggacccaaggaagttatgtttacatgtaacatgtaacaaataattaattttgactttaatgaacaaaaatgaaattataatctattcatagggaatttctgttgacatctaatatgtaaacaaattagacttgaatgaacaaaggaaaaaatattatatggattataatttacatgtgacatgtaacatgtaacaattgtaggattgaatgaacaaaaaatgaaagtttccagtatatttatagtggtggacccaaggaagttatgtttacatgtaacatgtaacaaataattaattttgactttaatgaacaaaaatgaaattataatctattcatatggaatttctgttgatatgtattatgtagcaaattagacttgaatgaacaaaattggaaaaaatattatatggattttaatttacatgtgacatgtaacatgtaacaattgtaggattgaatgaacaaaaaatgaaagtttccagtatatttatagtggtggacccaaggaagttatgtttacatgtaacatgtaacaaataattaattttgactttaatgaacaaaaatgaaattataatctattcatagggaatttctgttgacatctaatatgtaaacaaattagacttgaatgaacaaaggaaaaaatattatatggattataatttacatgtgacatgtaacatgtaacaattgtaggattgaatgaacaaaaaatgaaaagttccagtatatttatagtgggtggacccaaggaagttatgtttacatgtaacatgtaacaataattattttt

SEQ ID NO: 25222 - DNA, 2093 bp, Heterodera glycines
  unsure (1)..(2093): unsure at all n locations
cgaaataagcggtgattttcncaagaaaaattttgccgatttcaccgggtgccattgttttcaaatatcattttgccactttttcggaacagaattggtcaccatactgaatcccgccggtccgaacatactatcaaaacacgacaaccctttatggcacaatgactgacacgtttctaaattggcgttttaaattaagccaattttgtaatttggcacattcgtcacccatccggcactttgagatttttaccatataccccttttgactatttgataatttgataagggccccttaacactctaccgttttgccaaaagttaatcgttttgtgctttctgctggtgctgttgtaccagaggctcgccactttaataagataagaaaattggtatttaaattaatttgtttcgttaattttacatttagtgctaattaatgggaacaaacagtttaattacactaattagttagttttgggccaaacataaccacgaaaaattaaaactatgaaaaggcataacacaattcaagatttaaataaaaaataaaaatggttcataaaacctctattaccagaaaactttttgcgaggttcaaatttttttcatattaaaatataattttcattcactcaaattggccagcccaaatgactaatgcaattaatggcattaattgccgtcgcaatttccgtggcttacgctttgtgattttggcgttgatgtgcttgcttaaccttcggcatgtgcggcaccgttgtgcttcatatgaccgtaatttgcatgagagaggagacgacgacaaatggtgccgaacaatttaattaaattaaaaacaaaaataatgaatgcattaattaattggcttttcccgcaaccgaaattccctcattagcaaagagagatggactctgaaatcagaatttattaaaattttacataaagtatttggtttatcggaacaaaatatttatttaaatttattttttaatttaataaagttaaatttttcataaaaaattgaaaaataataaaaacttttacaaaaaccataaaattaaaaaaaatagaattgtcactataatatttatatattctattgtagaaaaaatgacaaaataaaaaccaatgtagaaataaattttgtgaatccattgaaatttttctccctttaatttattcaaaatttattattattttaattgttttttaaatccttttttgaattacgttttcattttgcctcagcaacttccttttcggccccgatgttctctttcgttgaagagggttggctgttctcggcactttccctcggcactctgttgggcaccattctaattggccatctgtgcactttggtcggttttcgtcgcacattcactgcctacggtattctgaacggactgggtacggtggcggtgccattggctgtcaaatttctcacaaagccattccattttgtggccatatttggcgcccgattcttccaagtgaacgttttatatttaaatttaaattttttaataaattttttaagggaattttcctttcgatgtcattggtggccattggtaatatgatgtgctgattaagtgtgataatgagcgtaataaaatggggcacatttcgaaattatgcttaagccacaaaaaaatcgttaggggggcaacgaaaaaattataatttaaatgtcccttttcattaattgtttataaatttaagaaacaattagcaaacattggagcacgttgaaggagatgactttgttcataagcattctctccattcattttcaggtgtttttttgaaaaaaatgtttttttaaattaaaatgagtaaaattaaattttgcaaaatttacaatttttgggcaataatattaaaaagggcttacaattagttgaccttttttagcttggccgtatcatcacaatgcctttgtccggctttttgtgcgactcttcgcttggctggccaggccgtttattatttccttggcattccgacgcttttcacattttcacttttttgtttgttttatcgggaaacgccatcacagcacaggtgcgatcaccaccatcagaagc

SEQ ID NO: 25223 - DNA, 1243 bp, Heterodera glycines
actagagttgagcgggaccgggaccggcgggaaatcccggttttttcaggtcccggtccctatcccggtttttggaaaaacagaaatcccggtcccggtttagccagtcccggtcccggtgggactaaataagcactggtaagaatggggatctgggtgagaaaagagaagggaattaattggtgagggatcaaaaatttttgataaaaataaattaaattatttattttcatttatagcatgtgttcgtatgcataagtggtcaagtggctaaacctttttactttcattatttgtctcttcggttcaattccctgatggaacagaaaatttttttatattttctttaccattatttaattgaatttaattaataaaaaatattttaatttaaaattattattttttcatttttaatagcctaaaaacccataaattaaccaagtatttggtcattttttgacaaattctgttaacaaatctcgctcaaaatttcaaaatttttccggcggcgcctatcggcaccgccggaccccgccccctcccaatgttccaaaaaagtttttcgaaaaaacattgccacaaaaacagcgatttaaaagcaaaaatttaaaagattttcaatttttttcaaaaaaaattttcacttgggaaaagtcccggttggtcccggtcccgggttttttcgcggtcccggtcgaaaaaacttgggtcccggtcccggtcccgacttttctggtcccggtaagtcccggtcccggtttttgtcaaatttcccggtcccgctcaactctacttagcacaaagaaataaatgcttggcaataatccaattattttataattttacaattaacgatttttaattgctttttttgcaatattttatttatatctatttaaaatatatattaaatttctttcagcagaagcaatttatatgaatatatgcatatattagcactttcttttattatatagaaataaaatttttatttttatttaattgcaacaaattttttatctaaaattgagatggatttcttttacggaattctgtccttctgctgtttggcactaatgccatcgacaaactttgccgatttcatatgcattaatccgtcgttggtaaatgaggaatttgctatgccttctgatcaaaacagtggggcgtcgaaactgtacaaaaaggttcttgatctaaagggtgggaatagcaaagatgaaagcattgtgataatgat

SEQ ID NO: 25224 - DNA, 1811 bp, Heterodera glycines
ttgtgatgcggctcaattccctcatgttgggaatgagtctctctcttccttatctatggaattgagaggagtgtagaatgtgtccgtgtagctcagttggttagagcattccacggaaaggaagggtcgtgggttcgagtcccaccgcggattaacgttttacacttcgccatccaccaaaatctccacatggcgctcctgggtggattcatgtccgtgtgttagatgttgatcttattctaacactctctccgctcttacgtgctggcggccgacagcatataaaagagcccggggaccggtcttctcagaggccggggatgtgatgcggctcaattccctcatgttgggaatgagtctctctcttccttatctatggaattgagaggagtgtagaatgtgtccgtgtagctcagttggttagagcattccacggaaaggaagggtcgtgggttcgagtcccaccgcggattaacgttttacacttcgccatccaccaaaatcgccacagatttcgacagtagatgatttcgacagtgattgatttcgacagtgattgatttcgacagtgaactatttcgcttactctttgtgcctaattgtgatttcgacagtaaattgaattcgaaagaagtgatttcgacagtaaaggcaaatttttaaaatcgcggaaaattaattaagttcacacaaaattaacgcggaaacaacgattcattttgtcagtagcactaaattttaaaaaaaggttgagagatgaataaaaattgctgaatttcaattctacaaaataattgatacagtatttgattagaaaaattatattctccttaggattccatttttgtctgtacaatgtggcttaaaagggcacaaaagcaaattatgagtgattgacctttctcataagtaaagataagaggagagcaatggtcattttatctcgagtgttttgcatgcgttaccgctcattcccttccattaatttcttcatggctctccggcgttttttaaaggcgaaatcaaatcgtggcaaacttctcctgaccaatgacggctatgaatatacatttgaagtttgtatgcttttaaatttaaaaaatgccaaacttcaaaggcactctccaaagtcgaagatggttgcgaatattggcgctgtccaagaaggcccccgtattgcccaggtcgtgcaaccgtacttattcgttggcaagttgatgaggacggtacccaatacaaagaaggccgtgtcactgctgcacacaaccatccagcaattaggaacaaaaatggtaaaacaggaggagggggaatggcaaaacgcgtgaaattggttgttctcatctttttaaaggtccgtgatgccaatgaattacttcgacaggaggcggcaagcgattttccaacaacaagccggaacattgtaagagaaacgcggagcaatttgcctattgatgtgcgggtcggaagcgcaccttcagcatcaaatatggcttggaattacaattaccaaaaaagaaagcaccaagaagaggtgatttattaatatattacaaattaaaaattaattttaattaaaaaattcctaaaataaacataggcaggagatgttggtttggatgccctccccgccacggcaattgtcatacctgctcggttgcagaattttgtcattttggatggaaacgttgatggtggaagaataattgttttttgctcaaattttggaatgcaaacattgcgaaacttcagaaatgagatagcgatcgacggaacatttgaagtgatccaaaaaatattaaaaattttaa

SEQ ID NO: 25225 - DNA, 1706 bp, Heterodera glycines
  unsure (1)..(1706): unsure at all n locations
aacgacaagtcagcttattctctgtgcactgtggcctattcagagggaaaagacaagcccatccatctttttactgggctaacaaatggacaaattgttgagccgcgagggtcgcgcgagttcggatgggacccatgcttccaagtgaattaatgcttattcaaattaatggtttttatattcatcctttagcccgatggatttcaaaaaacatttgcagaaatgaccaaggaagaaaagaatcaaatatcgcacagagcgatcgcattagggaaattgagagaatttttgcaaaatgagaaataaaataatttaaaaaattttattgtttgatatataagaacataaatattgttaagtgaaaatgctaaaaaagagaaccagtttggttcaatgcgaataatttggctaaagaacggttgtgaagggttagtctcgtcatcagagaattgatgtcctctaacttcttcgacatcgcttcgtttgaccatttttgggcgattcttgtcgtaattgataccaaagtcggaagactgaaacaggaagacccctttatcttcgatctcttgacttgtttttcgacgaataaaactgcgacctttccgattcctgtttcccatccaacagagaattaatgtagctccaaaactgttgttgctgaacattgggcgcacaatggaaaatccatgggaaaacgaaaacgccttcatcatacagtttgcacagtttcatgtaggaagaaagttgaacgaggaaaatctggagaacagggtaaatagaaagtaaataaaagcaataagatatacaacaccttgacgtcggtagttgtgacattctcaggggaacaacaaaggaagacattttcacgagttgaacacttggacaagcccatcaaaagaggatcaagcgcaagatgatctggaaaaaattaaagaattagtaattaatggtaaagttagagttacagtttagattagaagaataagcgagaataaaggccaatcgtctaagaaagtgaatgtttcgtcgaagaggccaagcattggccagcaaaaggggaaggacatcgaaacgcaattccgaaagagcaattgggtcggtagtatcaatttgaagaaaagaagtgaccgatgtgccaaattgggcacagtctttataaggcacagatgaagaataacagcggaggaaggagaggagctaaagaacggaaagaaactgaaaattaactggcaacaatattcttgagtcaatggaattcgtaccaaaactagttcgtacaataataaattcgtataaattttttaaatttaattaaaaccagtattatgtttggagaattgcattgcaaatgtttgtgaaattgacgattattatacaataaagaaaacaacaccaacgaccatgttcctgtcgcattcgtgcatttccgcctccaactgagagtccgcgtgcaaattcgttctgagcagtgtcgtcaactcagcggcacagagtgaaaggagcgcgctatccgctccatcacttcctttgaccgatttatggcatgcctatttcaatgccaaaccgtagcaaaacattgccatcgcaagcagtcggaattcgttgaaggattgctaaatatgaaataaggacagannaataaaagtgtgctacttggtaatggnagaacagagtaagaaatcagcgaaacgacaatagaaagagca

SEQ ID NO: 25226 - DNA, 1524 bp, Heterodera glycines
aaaataaacatcatattcgtactcagcaccttcttttacgccagaaaaatatttttcaccctctttttcaacccataaaaaaattttgaaaatttctagggggcctagctcgaaaatttttgaaaatttcccttcatatagtataccattagatagagcttaaaaagttctacaattttgccctaaggcattttttggctaaaaccgacccctgacgagttatgggcccgggactcaaatgtcccgcttaggccaaaaattttttctatttccggaaaaaaatcgaaattttttcaaaaaaaataccattcgatagagctcgaaaaactatgttttggaagtggtcttcgttttcccgggaaaattcgttaaaaaatcataaaattcaaaaacccgaaaaccgttttttaggcctaactcgaaaaattttgaaaattttcgaaattttaaaatttcaaaaaatcgaactttcaaagctctacaataagttcgctggccaccccccgctcagatcaaaccctggcgcggtattcacctggtactgaagtgtactttttgagcacgcttcagttgccattttttgcaggccaggggtttgctcaaaaaaaattttaaaaaataccagcatttagaggacactttggcggagtgccctcacagcgggcactttttgattcgagttttacaaaaaaagttaggggccgtcaaacgcacgaaaaaatgagaaatcagtccctggtactcagttggcccttggaccggaaaacctatatttttcccggatgctcctcaaaaagttgtaagacccttccactactttcagggcactcccggccttcggccgggagaaaatggttttagcaacgaaactccttgtcaatataacatataggggaaaatgtccatccaaacgtcgttgtacaccaaactgaaaaaagaacgaatagcaagataaaaatattgtttatggaagaaaaacaaaaataacacagagaaatataataatatgctccccttatagttgtaaagaatattttcaaataattttttcgaaatacctaagttgtttactaactgagtctaacttagaattttgtagcgcttagcatcaaaaactcattaatttttgccattttgggattaaatcttcaataaaatttccttgaaaattttttttaatttagtcccccctgaaaaatctttttatgagttatttaagaaatcagaacaaatttagtcgctaccccaaaatcagagcatttctgagaacattcagtcaaccatcaaaaacggcagcgattcgagtggaaattgacaatttcagtttcttttttaccattctctccgcgtttggttaggatcactgtatatcccaatgcccatttgcgagttttgaagtgttcatcggcgaaatagtcaaatcggtggctgatcagtgcgatgcaaaggccaagttgaaaaggcgtaagcaaacggaacaccgacagccaacagtcgccggaaatgaagctgaaaaagggaaaa

SEQ ID NO: 25227 - DNA, 2233 bp, Heterodera glycines
gctgttatccatggggttttgctgtccaaaaatgcaaaatgacaaagtgggcgtgagaaaatggggaaattagtgtgggaaaaacgcccacacaaacgaggaatgaatttttggcacaaagtgccaatggaggatttagcgaacgaacaccaaaaaaataaaaattatatcctcaaatcggcttgcgaaattatcattaatggggagttttctcctagtgaatcaatccgcttctcacaataataataatactttcacatcaattaaatattaattgtttttattttggtcggtcataatcacgcacttgtgcgtttatttcttaacgcgttgatgaaattctcttcaaagaaagcatttagggtctatattttattgtaatatgttttggttttttaataattaaagcagtgtttggttatattttccatgccaatttgctgccgcctccccccccccccgacagctttcacattccattaacgttaattatgcatacattcgcaggacttttaaagcccaaatatggctaatgttaataagcaggggaaagaattttcggggaagaaaatgtttgtgtaggtaatatggccaaattatggggggaggacataaaagaggagagaaaacattttaagcagaaaaagaccatttttattatttaataacaaaaaacggacagacttttaatttaattttcggtccgtaattaggaaactaatttggaacgcaaatttaacaattaaaacaactgagaaaaataaaaaaacattaaaagaacgtaagtaagtaagaaaaagagtgaaattgaaaaaaaattctcacggtgttaatttccaaaaacaaaatgcctacgataggaaaattgtctgccagaaatttcccataaaattcattttcatgacacgagtctttgaagaagcaatgcacaaacaatttgttcttattatcatcaaaagcttttaaaattatattttgttaaatttaatttaaataaaaaaaaaattaaatttaacaaaaataaaatattagagaaaaaggcatttgtttttattttggaaatgggaaattgagagatcaaatgtgtgtgagcaacagcaggtgaatgggaaagcaaaggataataaagttaattaacttttcccagcaaataaataccctattaagtattaaaattatgtttttgcctttttctcaaattaatttccgattaattaaaatatttcttgcgcttattttggccaatgcccgcggcaaagcagcaaagaatccatttttcgcgtccgtccaatttgcttttgtccgcgtgagtgctattttcagcgttattttgttgcagcgcttaaaaattgatgagttttactgaagctgaaaaattcacattcaaaaaacagcgccataaattacttttttttttgctgttggaagaagaagagatgagaaagttgcaacaaattggaaaatgaaaatttgaaaaaaatgaaatggaaatttggtaaaaccgggtccgggttttgccgggcacagagaagccgggttccgggcccaattgattattggcgctatcaactcgatatttccacaacgcctgtaaaaatttgcttaactacattataaatcagagattatttgtgtttatcaactcgtcacttccgaaacactgatacagtttattttgagggggtaatgagctgaaattttaaaaattatataaatttatgtgaatatttcggcatgggataattgttcaaaagcatcctttaaaaatcgctatgcgagcgaattggacaaagaaggaaatgaaaaacaaaaagaatataactattttggcgatagaagtataacgtaaattaatacgtaaattcaatttttaaagcatatcagtagagataaatagtggcatttaaagtaaatattttattatttttttttaaatttttctaacctccaactttggtcagcaatttgacccagatccccatttttaccgggattttttgcggaccaaccggctcggcaccgggtttggattttcaaaaattcgggcccgggtaagtgaggatgttttaaaaatgaatcccctatttttatcttttaatttattcaataaatccaaaagaggccctcccgaaattctccacccaaattttttcaagtgaccaattaattacagcaataaaagccaatcatggggaggtaaataaaatttttcttggcttatgcatttgtttat

SEQ ID NO: 25228 - DNA, 1714 bp, Heterodera glycines
  unsure (1)..(1714): unsure at all n locations
atccattttaaaattaaaaaattaatatttttatttctctttaaaccttaattactttctttactttttacatttttacatatttttgaggatataaaaattgtatttatttttattttttaatcttctaatttctttcttttcctaactgatttggcgatttttaattacttttttaataaacaaatgcctatttatgttataaattgtattaattttgttgaatttttttattaattatttaatattaactgaaatttattatttttgattttataatttcaaaatattcattttaaaattaaaaatttcgacttttcattccattagaaacatttatttctttctttactttttacttttttgtattcaaggattaaaaattgtattttgtttttatttttaatcttcacatgtctttcgttcccttctttttctcgaagtgattctgagactttttgtgttaatttatgattttcattttttgcctttatttttttaattaatttttttctttttgcttaaaggttatgccttttctttaactctcttttttattttcgcttttataattatttttcagctttttatttttatataaaattgcataaataattatataaatgtatcttttattaaattctattatctattttaattaattatttatattaagttctactgaaacaatttctttaatttatttataattttatatattttcataaaatgttaatgtaattaagtgtcgaattttgttaattaatattaaagcaaataatactattatttttcattaagaatttgattaaaataatcgtttttcatgattatgattattattttcttattaaaattatttattatatgtatttttttgtgctgacttaaaattcattaatttgcaatttaattcagtttatctagcgataatttaaacttaaagattatttgtttatttttgtttctttctcactttattttaatattgtacaatatttcactgattaaaaatcatttttgtaaatatatttatttatttatattggtcgatttcttgctttttatttatttaaattcatgctatcgccgtgtttatctcggccgtatttatctgtctaatatattaattaatattaccaattgtataaatcattattttcattttttagtttattagcattcaattataatattatgtttattctttatattcattttttgattattatcatttgcttgcttttcctcatttgtacatttttatgttgttttcataaattcttaattattaatttatttgttttcggttttttaatttgtattttctgaattttgcaaaaagctattaaatttattaatgagtattaattaaatgctaattaaattaaattgctatttcattaagaatttacaataaaataatcgcaattttctgcgcttgattatattttattatttcctaaaatcattcacatgattataataatatttttctattaattttatctcttatttattttaattaaactcttgtctccctgcctcatcatgagtgaagtctttctccattttaatatgtattattttttatttgtaattatatataaatatcgtttttanaatttataattctttataattttttattttgtatcaaattttaatttattttaatanaaatcatgacacttaaatttagaggataaaacat

SEQ ID NO: 25229 - DNA, 2025 bp, Heterodera glycines
acaattaaaactttcattcttaaaagaatagccatctctctgaaggtaataaagaaacaaatgcccttcttccacggcatgttcttttcctcaccggccaactgcaagtattggtccttgaactcgtcctccacctaaagcacagttttttgcccacaaaatgcatttgcgcactttcgctcgcttttgcagctctctgctcagcttaaatgcggacagaattgggtccgaactcgtcagcgaaatccatgccggacttgccaaagccctgcaaaagtcggaagaagcattgccggggactgttttggtactgcacctgtacttgttgattcgcttcaacgaccggtgcagtccgtcgttgatccgttccgagtcgcacatttcacaagcgctaaaacaaatcggggcaatagtaagaaaggagcagcgaatgacagtctaacaccactaatgcttgtgcggcttctcaatgtttgcatcctttcggagaagcatttgcagaatttcgaattggatcaaatgggcagccataataacgggcgaaatgtcactgaaaaagaaacatatacagagagagagacagacaaagagagcgaagagagggagagagagataagtgggccaagcagtacccgcaacacaacccaacccgggcgaacccaatccgagcagaccaacctcgagtactccgaagtggccgtctccgtcggatccaaatatttggcccacccttcgccgagcatatcccctgaacgaagcttagctgtacatatgtttgtgttgggatttgcctttgtcttacttgtgatggacgggtggttgacgagtacctttttgattcgttgggttttcctttggttttgcccttttgttcccccactcacttcgaccaattcatagacaccctcgcgaatggcacactttggtgggggaaaggtaaagcattgaatggccattgctttcatttggagtgccatccatgtcactttttgaatggcaaaccaaaatttggcacccaccaaaagggcgtttccgatgcgaacgtcgggctgtagagataataattaattgtgcaattattatggaacttttgcggggaaaagtgccgtactcacctgtcgcagcaaaagttgcacaatttctgagattgtttaattaatgttcttctgcttagtgccattttttgccttcccattaagcaaaagattacccaaattttcgttgtccaccgctatttcgatcgccgtccgtcccattgtgtccaccgcattgatattcagcggcgcttttctcttgagatttattttttggcacttttttgggggggggggggtatttcctccatcgaattcgacttctcctttcccacattcctttggcattttttgttttgtttgcttctgtcccaaattcccattgccgccctttgtccccaatttatttttttgctaggctatcctttccaaaatccttttactcaatttccaatctctccgatcggttgctgtcccttggccatgcccaccaattgcttggccaaacacgcttccagcaccggccgattgcctttttcggctgcatcgaggaattgacgctccaacgggttcagcatgtcgtgggttcgaatgtgaacggccggcatcgaattggccaaagtgtgatttatgcaaaaggaggggggatttagtgccaatttggtaattagccagccattcaaattaaacaaaactccactgaccgtgaccgtgccttgcgcgagcggtgccctccgccgcctttggcccctccgccgccgggcgacgaagtcgccgattttgtgaccgcatttttcatgctggaaattagcagaggtggcctttagttttacgctttgacaaaatggtcagtttggaaaagagaaagttttgggaaagtgagcgtttttgggagggcgaaattggcggagaatcaatcggaactcaattaggtgaagaaaagcgcagtcaaagattgaattcggagacggaggcggggcaattggccggg

SEQ ID NO: 25230 - DNA, 1563 bp, Heterodera glycines
tttttcctttcatcccccaattccaatctcctttttactctcctaccttcgtcacccccccccccaagccgacatcctgggaccgtccctgcttccaggctcttttaaaaagataatttgacgctatatttaaaagtgttaatttttgaaatttattataactaaatggggaaccctatttgtttgaaaaattattatgtcataataactaaaaattattcccgagggatttcggaatcctgcacctgacatctattttgaccatttctaagccctaacccgaaccgagcataataaaattcaaatttttcgattaatgatatttttccagatttagaaggaagtcggaaaccaaaagggttccacccacctttggtttttaattaatttcaaaattaacactttgaaagtagtgccataattttcataataaatattcttatacatgttccgccagttttgttggagcatccaccaggccgtacaacatcgtccaccctgaacatgtatcgcccgcggaccatgtgcggcacgccggagcgttgtgccaaaatttttggtgaatttttgtacagttgggttgggtccacgtcaacaaatccggtatgattgccaccattgaaaagtgcctgatttttttttttttattaaaattttattaaaaaataatgcagtttttaaactacaaatggtaatgatttggctttcaaattagttgtatcatttatagttctttgtgtgcacttataaatcataaaatctctaagttttaatgttttgcaaatgagaaatttgtgccaaaaataagttcaaatccgaaaaatttcgtagatttttttactcaattttcttcaaaataaaaattttagctttaatttatattttctcataaaatgatttttcatgccatcattagccattttcgagaatttaacgaatttggagaaaattacgctcacttttggaaaattttatgcccatatttttcgctttttacgtatatattttgcatatttgtacaatttcgcgaaataggatatttatgccagaaagtccaaaaatgtaaattattcggtttttaactcaattttttcaaaattaataaaaattcgcttaatatttttcatattattttcttagctattttcgaggtttaggtttaaattttttggaatttaatttaatttaaaaaaaattattgcatttgctgctaaaatttttcgattttatgtgcatttaattacatgtcctaatggtcactctctgacatttcttacccggcatcgtccgctgcgcgagttggcacgaaaatcagcagcatcaaagcccagcttatcatagttgatgatcacgtagctcaaccttcccggctgatcagtcaaccaaatggcctggtaagtggctaattgtcctccgtccaaatccgatcgacccgacacggctgagcccgtgttgtaccatgtgaccacctataggcatcataataaaatcaataatttactaggcagtaacacaaaaaatcgatattttgaataaaaatggaaaaactcaaaaagtttggtt

SEQ ID NO: 25231 - DNA, 998 bp, Heterodera glycines
ctctgtgaaataaaatggcgattgtgcacagccctccgtctcatacgcaagcgcttttgtgaggtataaaatttctcaaaaaaagagatagacatttttctgggatagagtataaatttaaaaattccctcaaaaataaaaggtctattgcgcaccgccctccctatcatgctcgagagcatttgtatgtgtataaaatttatcaaaaaaagagatagccatttttctgggataacctctaaatataaaaatcctctgtgaaataaaatggcgattgtgcacagccctccgtctcatacgcaagcgcttttgtgaggtataaaatttctcaaaaaaagagatagccatttttctgggatagagtataaatttaaaaattccctcaaaaataaaaggtctattgcgcaccgccctccctatcatgctcgagagcatttgtatgtgtataaaatttatcaaaaaaagagatagccatttttctgggatagagtataaatttaaaaattccctcaaaaataaaaggtctattgcgcaccgccctccctatcatgctcgagagcatttgtatgtgtataaaatttatcaaaaaaagagatatccatttttctgggataacctctaaatataaaaatcctctgtgaaataaaatggcgattgtgcacagccctccgtctcatacgcaagcgcttttgtgaggtataaaatttctcaaaaaaagagatagccatttttctgggatagagtataaatttaaaaattccctcaaaaataaaaggtctattgcgcaccgccctccctatcatgctcgagagcatttgtatgtgtataaaatttatcaaaaaaagagatagccatttttctgggataacctctaaatataaaaatcctctgtaaaataaaatggcgattgtgcacagccctccgtctcatactcaagcgcttttgtgatgtgtaaaatttctcaaaaaagagatagacatttttctgggatagagtat

SEQ ID NO: 25232 - DNA, 1096 bp, Heterodera glycines
gggttaagatttatgttatgaaaaaatagtgtgccctattctattcattttcacactttaacctgttaaaaaacggatttaagcgctttgccgcatattttttgattttacaaatctttttttaacacctaagaaaacctagaatttttggctctgggccatcaaatacaatttccgaattgggggccacagattcaaatttcgtcaaatcgtgaacactgcaaatccaaacggatccattcgatgatttttagcctaaattgttgcttttatgcctcacaaattgctgaagcgctatttttggatatttagcgaactctttattgacttttttaaagttctcgacgagctaagtctaaaaatcaaggaataagtcgaaccggcgccatttaataagcactgggacaactgagtcccagtaaaaatggaaacttcagtaccaaagaaataaaatatgaacaaaaataatttggtcaggtcaatcattttatggtacattttggtgtttttgtttcagtttatatggctaacttttcaaatcaaattgtttgaaacgacaaaactccgcgttgtgcttttgcaattcagcgaattttccctatataaatgggtaaaatgtgaaaaaatttcattgttatcaaattattatttcgttgctctgatcaaagttcaactgtcttctactgctgtacaacaaaatgccccgtcatcgtgcaaagcctcgttcttttcatgccggattgaaattccccgtcggtcgtgtccatcgcaagatgaagaagggtatgttggaatacaggacaacaccatattctgattttgtttcattcacaatcgaatcatacattccctttcctgttcacatccacaggtccgtatgccaaacgtctcgcgaacggagtgccggtctacatgactgctgtgctggaacacatcacgggcgagctgctcaagaaaattggcgagatcacgcaggccgaaggcatgaagcgtctcagtgcatttcacatccgaactgcagcgcgcgatgacgacgaggttgaggaaggtcagtgattgagtgggcagaaggtttttgcgcacaaggacagacagc

SEQ ID NO: 25233 - DNA, 1170 bp, Heterodera glycines
tcccaacagttgtctgctgctattatcaattgttgggacattatcacatgaccctccaaaataaccaccaaattaccacttcctccgacgcgaaaaacccttccgcagtgacatccaacatgttgacctcgtcgttatctttgtacccagcttggtcaaacaacaagtcatcaagggtggccacgtcggcccctttgatgtatacactctccagcacgaatgaaattgccgtttctttgttggagatgtcaccgaatttgtaaaaggttggcgggttcgacttgttgaaggtgtaagtgttctcgcaatgcttgaacattgacggctcgtagtcatccggcgtgtctaaaaaggtgcaatcattcatgcaattaataaaacggcatactctcgtaataagtgagtttcaaataaggcacggccccttttttcaacggctccagattcttagtgaccacactgagcttcttgatgatgtgcttcacttgcattcgaaaaaccttctcccctttgtagccaaatgaaacgatacgattgcctttgtcactgaaagaaaagggagtgatgtgcaaataatggaagatttctttgcgatttactccaagacagtcatcgtgtgctgttcgttgtaacaaaaaccgactgagaaaacttcagttgcgacctgaaggaatgcaagggaataagcaatcgaaatatacaacgatacgtccgggtcctctttgtcctcgttgatcatcacgaatgcttgtttgatgtacttttggtcgatggcctctctgatacctttcatcatctccgacaatttacgtccccaacgcgtgttgccatcgaaacagtaaatagccaaatctaaaaagatgtaaaaaataatgtaaaaattagaaataacatattctgagtgattcaaattactaaactattcgggcatgtaatctagctcctaaaatttaagggtgcgagtgtttacgaaatagcggaagttgatcaacgctaaaaaactgaatatagctgaatgaaggagcttatggcgctctcatttttcaaaattaatgttttttttcgatgggagttcaaacacaattttaacaattaaaatcgtaaaaatgtcatttttggacaaaatccgttaacaaattgcagtaaaattttaaaaaattttcccggcgg

SEQ ID NO: 25234 - DNA, 1628 bp, Heterodera glycines
ttttcggggcagtccccccgaaccgatgcgcccagacttttggggagaccgaatccttcgggaatagcttccctatagcctgtactttaattctgcgttggatttttgctccccataaatgtttgagtaccccaaacggacacttgaaaaaatcgatttttttgtttcataaatatttttttcagaaagtcatgcgcacccgtccgatctggcaagttaagcaacgattgctgactagccaaaaggttcggtgccgtgatgaaacgaaccagcactgcttaccccgcggcacccggcacggtcccccgaaggaatggatttaattaaattctctccttcggggatttttttccattaggtcgtccgttagcgttcgattgctctagtcaatttttcaaaatttttgttgaaatatttgtcgtgctctgaagggcgtgggagggggggggggcgaaggcccaccacgaggccgcgaagaggccgagtgagtaccttcggtgcaggaaaattattaaattttaaaattttttaattgctttttaaatatgccaaaaaatgtaggcttaacttttttagtgaaaattcgatcactcatattttttgctaattgagcagaagcgtaccaaactttgcagggatactccccggtaaaggactaacttacactgaaatgagcgccgagctagctggctcaaaaaaatttttcgaaaatctgagtctttcgtttttatttatttgcaaaattaattcataaatattttttcagaaagggttctgaaacgcaccaaattttatttacatgttagtttaggcactctgatgctttttctatcaataatggaggtgaataaaattttaattgctttttaactttgggaaaaagtttaggcttaactttttagtgaaagtttgatcactcatatttttttagtctaatctactcaaaacggttcagaattcaataaaaataacattcacggtgcgaaaaatggggtttgacaagtttattggggaaaaaaagactttacaaaataatacccctgggagaagggagtgggaaacatgatttcaaaattttcaattttttctagtctaatctactcaaaccggttcagaattcaataaaaataacattcacggtgcgaaaaatggggtttgaaaagtttattttgaaaaaaagactttacaaaataatacccctgggagaagggagtgggaaacatgatttcaaaattttcaattttttctagtctaatctactcaaaacggttcagaattcaataaaaataacattcacggtgcgaaaaatggggtttgaaaagtttattggggaaaaaaagactttacaaaataatacccctgggagaagggagtgggaaacatgatttcaaaattttcaattttttctagtctaatctactcaaaacggctcagaattcaataaaaataacattcacggtgcgaaaaatggggtttgacaagtttattggggaaaaaagactttacaaaataatacccctgggagaagggagtgggaaacatgatttcaaaattttcaattttttctagtctaatctactcaaaacggttcagaattcaataaaaataacattcacggtgcgaaaaat

SEQ ID NO: 25235 - DNA, 1434 bp, Heterodera glycines
aagggtcagttcaacatggacgactacgacttttgcattgcccacacggacatggccaagcacattctgccacttcgcggtgttatcaaaacgcgatttccgactaaaatcaacggtactgacaaagaaaaacaaacaaccatccgatttaaatgctttgtttcctcacaaattcaggaggaattggcgatgatctcaacgaaattttggaaagctttttgtccggaataaatttgaccgtaagaagggacccgaccaacaaggaatggggcctaagtgagcctttgatcggaagagtgagttggcattttggggaatgtcccctcaaattgattgctttcatcagttgagcatgtccgatgagcaaattgaggagaacgtggcggtcattgttgacactctgtgcaaaatgcgcaaggccgtgcttggcccgttcatcaaccgcgcctctctgatcacagcctctgccggccctcaacagtcgtttttccctgtcgacgtgagcccttgggaagcgttgccgacggaagaggaaattgagaaggtgtgccgtcgatgttgggcaaatgcatggaaaataattaatcctttttttgatgtacagcatgagaagacgaaaaagaaaaaggaccagaaaaagatgaagaagaagaaagagacggacgaattggaggaagaggaggacgaagaagaggaggcggaagaggacggacgaatattcccaaatttggacacaattgatcagaaaatactgatgaagcttatgtgatcgatcatcaatcaatcgttgaatcctactaagaatgctttgaaattatgattgattttattttgatggaaaatacaacttaaaaatttaaatgaatgaatcaccaaaaaaaaaaaaaaaaatttttccccttcacctttttaatcagtcagtcacaccattagttaatcgttaatcattggttgaacagaaaagcttttctccccttgtacattttttaattcattcccaattgggtgcgtttattttttgctttttcttgtggggttaaaaatttatttttttaatttaaattttgtttgctacatagtttttttttattaaaaaaaccaataaataaatcttttttgtgcataaacaaaacttaatccactcactaatcgctaaaagagaataataatacctaatttagtaaatccaaatggctttgtccccgtctccgaacaattcccattttgaatggtcgtacacggaggagccgcacgccacaaggtggttcaatggatgaatgagtgtttcgagaaatcgaaaacatttcccttttggactttgcgattgatttatgatttggggaaatggaatttatgattaaagggaaattgaggcgctacttgcaaagagggcctaaagaattctatcaaaaacaaaaggggggggggaccctt

SEQ ID NO: 25236 - DNA, 1292 bp, Heterodera glycines
tatacgatactcattgaattgtattattagtttactaaagttcaaaaattttatttattttttctaaaaagttcaaaccaaaaactgtaaaaattgtcatagcttttgaaaaacttaataaaattttttgaaatttagcatgctaataacgcgtttcaagggctatgttatgataccaagattgtgcaatttggttgagtctgagaaaagttatgagttgatttactcaaaaatttagctaattttgcacttttcgtcggttgacatagcaccaaatttaccatatttttcgaaaatttgaccctcatgctcagaattctgcaatactgtaaagctttaatatgttccaaaagtcccatcaataaataaaaataatttaatcattgatttttttttagacaattcaacccagaaatttggtccgcaaatgtcggggctaacatcccctccacccgccccactgtatcgttcttgaaattttttgcttttctagctttcttagatgttttttcttgaaaaaaatctctatcttttttttcacgagatgcgacgagttttgtttaaaagttgattttattaatcatgactcatcattatgtgccattaattcacataataaatttgaaaccatagtatattctcccgaagtgattaaatgtgattaataatgtaaatttaaatttgaacatttttttaacttttctaactttcttagagattatttccttaaaaaaactgaaaattttttttgaagaattctccaaataaatttaaaaatgtgaattttatttatcaaaattattaatcatttttcaagctaacttattaattacagcagcagatgaacaaacggaccaaaatgaagacaaaaattgcactgatcatttttggcactaccatttgctggctttcggtcagggtcgttttcgtaccgccgttttcgtacgggggacattttcgtacgagttcttgtacaagcgtcaaattcaaatataaaaacttaagaactaataaaaccaaaatttatcattttttgtttcccattcataaaattttgtagaaaattcataactttataataataacaaaatccaggacaaactaggtcgcatctcataatttcggaaaatttttgatttgtaacaccaataaagagcaatgaccatttttgtgcttaaaaatcgttaataaaaaattttatttacctattttggtacctattttggaatttttgtacctatttaatacctattttgagatttttttttacctatttaagtacctattctggg

SEQ ID NO: 25237 - DNA, 1328 bp, Heterodera glycines
aaaaatttttacatttcaaaaaaagaagccaaactataggttttcggggtcgctgatcgcgaatgcggcttccatttcgaccaattccaaatcccggacgcgaatttgaacaaaaaggcatttttcaaggaatgaacggctcgtcgaggttctgagccgtgcccggacctggtcacaatatggaatttgcgccaccgaagttcgtggagccaaaaaagccattaaataagaagactgcagggcggtaagttaaaaagaaatttaatttaaaatcatttgtccattatcgaattctcatccgattataatagtcttggataatagattaagctgaatttctcagattttggcacttgccctcgcggatggcacttctttgatcgactgtcttcggctttatttgcgtctcaaagacgacgtcttcggcccggaggcaaaagcaagccgttttggcggatacaagccggaatgccttgagaagtttttgcaagatcactttggcaagcagcgaaaaatgtccgacattcgatgtggaaaaatgaagtgagttttgaaagaaactgacaaaaaataattggttttaaatatattataaattcatttatatttttatcatttcgtttttattattgctatataattaatattttaatgattgtccaattattgtttttttgcaggattttcgtcactgccacaaaagcggagcaaattcccatcgaattggtgctgttgcgcaacttcaactgcccctttaacggctctgaccatcacgcgcctggcaatgtgtgcatttggcgggcggcgcgctattcgagtgctgcgcccacttactttcccagcatggacggactgatggacggaggtacgaaagcaattatcgttattataaaccattataagctaaaatggtgcttttgctcgagagtcttggcctttttggtctcttttaagcttcaattcttgtgaaactcaacaacattcacttgttaatcaattggaaaactgagctaattaaaattaatttttattacaatttaattaattatttgcgtacattgtattaatgataattaaattttgttccttcttttttgaggtttaatcgctaacaatccgagcaatgagttgttgaaggaagtttatttgtgcaatgagtcagccaaacttagcattgtatggccttgctttactctcttgttttgttaattaattttttgatcattaggaaagtgatcgtcctccaaatgactcaattgcctttcttttgtcccttggcactggcagaacgccaccagtggacgtgggaagcattgacgtggtgttgg

SEQ ID NO: 25238 - DNA, 2002 bp, Heterodera glycines
  unsure (1)..(2002): unsure at all n locations
aaaaaatccaaaaaatccgccccttaaaaattcaacttttcttgccttttttagagggctttttccaaattttttttttttttttttcgttttccgaaattcggattctccattaattcgttactggatatcgaagtttcttgctggcacttactcaactgatggaaaaattatttttaaaaacattttatcaaaaaaggtttaattttccccccaaacacctccgtatgttttttatttgcaattgtgcgggcgaaaatgaaaagaatgagttttttggaatttttatgcaaaaataccattggtttttccaactttgagcacatattttcgcacatattttggcatttttttggcttatagcacatatttcagcattttttagcacatattttattacatatttcaggatttttagcacataaaaatcccagccctaataatgacgggttggttggtgaaggagtggaaagaaatggagaagcgattatcttatataattaatttatgcgtaaatctgaaccttaaaatgcgattattaagggattggcagcggttgatttgtatttcgttggatggatgttggaggagcaacaaaacgacaacaattagagttaattaattaagattaataaaactgaaactgttcgagggcaacgcaaaatggcaaagggaaaagcagcagaaacaatgacggaaacatagaaaacgtttatggagtattttgattaagtgaaaatgctgtatattcccaattaaaataaaactgcaattagcagaaaatttaaaaataattaatcgcggacatatttttaagagaatattagccaaatgatttgttgagtataaacaaactgaaaatatgtacaattccaattgcggaccccaaaaacacacagtttcactattaatgaattttaaataattatcaattcttcaaataaaagaattattatttttttcgtaacattaaagttatttatgcatttaaaattgaagacagatttgtaaatggattaaataaatgtaaaattttatattttcttttattcgatataaagtgtttttaggcaatttttaaatttatttcctgtaccataatatttttaattttggtaattaaggaacatcgattttttaaatcactcacctttttattaattactttggccaaaaaatttgatggaaaggcacaatctcggcggataaaaaaatgatttaattaattacaaaattgctttatttaatgacattaaaatccgattgaattctctctctccttctctgctcccccctctctctccttctctgctctccctctctctatcgctctctctctctctccttctcagcttcctctctctccttctctgctcccccctctctctctctctgcatgtctctttttgttgtatctgtcgtctctgttttttttgatcactctctttttcggcgccatttataatttcactgttgattctaaatgttaatgcattgtttgttgatacctaaattttgattattgtatgtaccaacaaagtgccgacaaaggcatcggggaagcaaaaaaaatggtcagacgggaaaaacatatcagccattgccattgtttcaagcagttcagaagcaacagtctgcaaaaacgcacagtttggaatattaaatttgtatttaattcagggctcccaagttttttcttcaaaaaaaggacaaacgatgctaaaactaagattttgactacaaaaataagattttttgaaaaaaaacaaatgattaaaaatcgccgcttttttgagtttttgaaaataagcacaaaacaaagaggtgttgccaaaaaaaaaggaaaaatcttagaaaaaaggacacttgngagccctgatttaattacatttaaattaaactaattgattgatttttcaccanagtgtccaacaaaagattcatcaataagccgaatctgatgccnaatctcgcagccattttgccattgtttgtgcggcgg

SEQ ID NO: 25239 - DNA, 1176 bp, Heterodera glycines
acacttaccgtagctcggcttgtcgaaccagcaaaatgatgatggtaacagcgatatataggcatttcaatcaacggaaagcttgggaaaattgaaattaaatgggaaacccgagacgaattaatgcggtggtggtgttggcgaaacgcccacataaaacacaattttttaaaacaattagccaagagaatgggcccaaaaaacggaacggcacgccgacggggcacggcactatgttgttaattatgttgaattggtgcagctgctgttgctgttaccataccaacacaaagtaaaagccgccccgaagcaatgtgccaaatttcagccggtcgcagccagttgaacgccgccgtttgggcgccgtataaatttgaaaagagaaagctgagttgggcggttaaaatgccgacaaatttgctggactgggtacgacccattgaagaaacaaagagttgttagtgagctttggtttttaaccttgtttgaatcaacttttgaacaataattatcgagaattagggcgaaagggctgcaatttaaggcgcccgagaaattttttcaaatttatctccactttttctccactaattattacactaacatttctgaactctttcaccaatgtactaaatatttacctgataatttacattgtttttgttattaaagggaaataagtgggactgtttaattttggccagtaattttaaaacaaaatcctagaagaaaagctgaattcaagaaaggccataacgcggttcgaatccaaaatttttatacttgcataatatgtgcttcattcatcccttgatgaaataattcatatttcgcaatataaaattctaaaaataaattattatcatttgacaaactgcagaaagttttagtgaaacgaagttgggcttttaatttcaattgtgaactgttccatttgaatgttacgtaaagattatttttattatgttctccactttttctccactaattattacactaacatttctgaactctttcaccaatgtactaaatatttacctgataatttacattgtttttgttattaaagggaaataagtgggactgtttaattttggccagtaattttaaaacaaaatcctagaagaaaagctgaattcaagaaaggccataacgcggttcgaatccaaaattttt

SEQ ID NO: 25240 - DNA, 570 bp, Heterodera glycines
aaatgaactacgaaaaattaattataattttctttaaaaattcataaataaaataaattacaaaaaaatattaattttatgaaatagtaagttatactcttggatatatgaaataatggtatgattaaagccctagatgccaatttttttcaattttagaggggaaattattaatagaatttagaaaaatggccaaattggaagaatcatttttttttgccacaaaaaatatttaattgtattcaaacaaaaacgcattcgaattgatttattgaattttctaaaatgtgtaaatgaaataaaggacggacattttgcggacaaattcaataaaaaaaattcttaaaaaattataaaaattttttttgaaaaaatggaatcaaagatttgatgtaaaaatatctggagaaaatcctattcggcaaattcaaaaaaaaacgaaaatatcataggtttttttctaaaaataaaaagaagccctctcactcgactcacagagtccgtccttaaattgcatttaatagataccatagaaaattcaataaatcaattcgaatgcgtcattgtttg

SEQ ID NO: 25241 - DNA, 2381 bp, Heterodera glycines
  unsure (1)..(2381): unsure at all n locations
tatatatattcaattaatcattaagcttctaaaaaacataaaaatacctttaattttttaattgaaaaactcatgtaataatagaatataatatttataaaaaaggttcttgaatttaatttttgcctaagtttataataaataaatagttttttttttcttatattntagaatttagatatgatggagacttattcataattattacacacatatcgttacccaatttaggctttggtggttttagatttttcaaattaacgaaattttattattcttttcttattcatggactgtcaaaagaaagataacacttttgttttaatttaaataaaaatattaattatttagatataaaattatgttattcttaaatatgattaaaaggtaggtttttaaatgaagtgactataataattttgtatttatttctcgccaatactttaaaaggattatttttaattagggaatatttaagtttaaatatgtggaagatttttgtctttccaggttactgaattgaaacattaacctttctaataaagcataacaaaattaaaatgttgacgaattatattatatactataaaatctattttaataggtgtcaaatttttatttattttcctttaatagccccaaattaaaaatttaatcatatgtgattggtacaaaacaaataaaaaactgtattagtaatattgttatattgaagttatttctaaaaccgttatcatttattaattccttatattttaatatatccgttaatgtaattttatattgatcttattatttcagaatatttatttaaaagatatttagttgacaattttatgtgattaactctaaaataaaattaaaacatttaaatttattacaaaaaaggaataattctgaatttttatattaaaaattggaaaactgcaatgttcgtttatctaatgacatttcaattgctttacaattcgcgacaacttttctaatgaatatttaattaaaaagtttagacaaaaagagatgtgtccatcggtcgggtttagctttatttaaatttaaataattttttctgatttattattgtaacgagcaatgattttttgttgttttattttcccattaaatttaattatcgattgagttctcacgttaataaaaatgcaaaataataatttataaaatttgttcttcataacaaaagttaaaatagaagattaatttatttaatattatttttaagttctcctttattcgtacacaatcctaaaataagagattttaaattcaatttactacattaataattacatcaaaaataaataatttgttaagtgcatcatatacccctaataattgaaaatttttttcacaaaaactgtcccaaaagttatttatttatctttgagaaaaatttttgtgtccttattcgaaaaatcttcaaaaaatttggaaaaattgaaattttcttggagtaattcatttaatttattgctgaaattattaattatttttttaattcattaatatttttcttaacataaattctccattaaaacaattgttttcgacctattgttcgaatttgggttcggggatcggaatatgcccaaataattgtcatatttatgatcagcgaccttgaaaacccccgggaacttggttttaggactttttaaacagaaaaaaatagactaaaaaagaatttgcaaaagacccctctttgcaactacatagtgccaaatatttaataattgataaatttggtccagcttataaatctatttattacaattaatggacgaaaatcagcgcatttattaattatctctcaaacaattaattaatgttgcatttttatttttttctcaccttttgtatctaaggggtagttttcaaaattgagtctaaacctcaaaattataatattataaattgcaaaatgcttagaattggtcaaaaatagcacaaacaattaagttaatttattgactaagtattctacctaacgaattgttttatttatatctgatactaaagcaaatcaaaaaataaaaatgtcacaaaggtgacgatataaaaacaaaaatttctttttgtgagtattccacagcatctggataaatctttggctggccttgtgagccgaaagtgagtcttaaataagaaaagctcaatatcatattattttactcatattatacatgtcaatataatcgcggtaattaaataaatcttttatcataaattataattaaatacccttttaaaaatattgcataaaattgaaatcattgtatggaaattggtgataatttaaaaaaaaaaattcaagaaaatcaacacattgaacttatatttgaaggaggcctgttcataatttt

SEQ ID NO: 25242 - DNA, 1723 bp, Heterodera glycines
ggtttcattgccagtgtgagtccgccccaagaaaatcaataatagactgggtttggaaattatactcgtggggcggatgaggatcatctatattctaccccgtactttcggaatttagtagcttctgttgtttttacaatatttcaatgaaacgccatactgatggttgagagcagttaaaatacccttcgcagttgcggttgtgcagcctctgcaaaatcgttggtgggattttctcagttgattgtcatagagtagacactccataatcggggggaaaacattggtacggtaagagttccgtcagcacgcagatcacgtccagtgttagtttgtggtgatcatgcaaatgtgttgatttctatttataacgaatatacccaaatgagaattggtcgaagctatggttactgatgcatttccagtgcgagtagagcgcgtgtaagtctccgaaaactttttttgatgcttatttattcggaatccgagcccaactggagtgggaatattgtcaagatggtatagtcagtaagagaatgtatggtcggggtttttggggttggaagtgtaggggtcggggtcgtcggggttggaagtgtcggggtcggggtcggggttgaccaaatggttcggggtcggggtcggggtttttcaatttttaccttatgccaaatagtcaaaaaactttataaatttttgcttaaaaatatttaaatttcgtaataataattttatgtgctttttattattttttttatcataaatattttgtatagaattaattaaaaacacatacctaaggcatttaaaatggccaattttcagcgaaaatctgtataaatctttttttggtcttttttttgcggcgctctttttctaaagacgtttaggagaaatgggttcggcggtgccgataggcgccgccgtgaaaaattttgaaaatttggatgggcctgttaacagattttgtccaaaaaatgatagattttttcgattttgggccaaattttttttaaaaaaaataggttttttttgtggcgccggcgatgccgataggcagcgccgggtgaattttgagatttaaggtctattttgtaacatattttcaccaaaaatttatgaatttctggtaaatttttattttttttctttttttttgtaaattttcatgatttagtcaaaaaattgaatttttattcaaagaaaataaaattgttgttcaatacgtctataaattacgggacaggacggtgtcaatggttttcttttggatttgtaatccaattatttgcccatatttgtgcctattttagattacatcgatctcattgttagtcaatctgtaataaaaaaaccatgccaaaaaataattagaaaaattaaatttttaaaaatttaaaaatatttttttcaaacaataatttttaaaatccattgatgctgttgctatattgctaaggttgttactgctgttgataagtagtttaattgactccgtttcactaaaatcagtaattatttcttcttggtaacaaaaatcgctacaaaaatttaaaaaaatgaaaatttacatagttttaaagttaaaattttttaatatactgtaatccatcataatttatcttttttaattaataacaaattatttaaatttacattttagagaaaatcagtataaaatttaaaattaattaccagatgtaataaaatcaaaatttttttt

SEQ ID NO: 25243 - DNA, 1946 bp, Heterodera glycines
  unsure (1)..(1946): unsure at all n locations
tttcagcggatgcnttaacctgcgcggcgatgtgttctgctcgcaccccattctgatttatgtgatgggaattgtggccacatgtaaaataatattgcaaaacaatttcttctttcttttattcgctattttattttatagccatttggatggccgaaagcactgctgatctggtaataaattaattaattagccaaatgattaatcaatcaactaatttcctgtgattgaattttttggcaaaaatggcgaaaaattttgtaaaatacaccgcataattcgggatttcaaaaaaccaaaaatacacccctaaaaagcgaaagaaaaaagaaaaatacactcctaaaaattgaattttggacttcagccccccccccaaagccaagggtctggctacgcccttgttctttggccatttttaacagattcttttcaaaaccaaggtgttggcattcaatcgctgtctcgagctcacctcgccacatttctcgcgcgttttttttgaagggtaccgtacctccctttggatcgtcggctgctccctctacgccctctattgggccatgttcatcaaaccggtgctgtacagtagcatttatttcggctggttcttctacccttttgtcggctacagtaacgatgaccatcatcaggtggaggatttagcattcgctgatcaaaaaaatgcgttttcaattttaaaatgtaccgtaaaaatattttctttgctgcagtatgaacattggctgcatgtcgttcataatatcgccgtcgcatttctgagtccggccatttaccttttctttgccagcaaattgtttttcaacgtccaaagcaatcggcgacagtttggcgttgtcgcctccgaattaaactcaatgcaaaaaagggtttggaaatttggaaattttaaagcaagcttatgtaaacaatttgcttaacaaaattggctaggacacagtttttttttcggttttcatgcaaatttttgtgcttattttgctatttggtgttttaaatgcttaataacggatttttcatgtggaaaaatccgatcccaagtaattagcaaatgggaataattgaatcattataattctctatttcaaaccgtataatcgttagtgctgtccgagaccaaaaatttcccgagactcgagaccgagactcgaccccgagactcgaccccgaaactcgagaccgagacccaaaaccccgaggccgagaccaaaaaaaccccgagacccgttttttcaaaaaatttcttattcgctttaaaatcgttaaaaaaattttttgtgtatttcctaggccaatttttgtttttttaaatattgattcaattaggtaccataatcaacccaaaaacataattttttcgcggtttttgagtcaatttaaaatttagtcaaaaaatgtccaaatttttgcggttttgagccaactttttataaaagtaaggttttgtgtgccggcggtgtcgataggcgccgccgggaaattttttttttgtaatttcgttctgatttgttaacagattttcaccaaaaaggccaatttgtttaattaaatccaatgccataaaatttcaaaattatgagtttttttttaagaaatcggaataatttcgtcgctaccccaaaatcagaacattcttataaataagaacaaatggaagccctggtttaaaggcgccagcttggactcactcttactggcgctaacgaaatcagatgattaaagtgaaaaaagggaagatttacgagtattgaaaaagaaaaaaaaaatttattttttgtgttaaaataaaatttaatcattccccgatcggggtccccgacccccgacaattgagctcctccccgccccgacccccgacatgtcgccccccgaggtcactggcccccgactttttgcccccgagggctcggggcttaaccctaaat

SEQ ID NO: 25244 - DNA, 1916 bp, Heterodera glycines
  unsure (1)..(1916): unsure at all n locations
aaaatcgcaaaatttggaagtttttgcttaaaatttgttaacaaattgcactcaaattttttaaatttttcccatgtcagcccaaagcattagaaattttttttctgattttcgaccctaaaatctgtttttttattttaagtttctgcatattataatttttctgtatttaataaaaggattgtccttcaaatttgtgcattaaaattatttttgtgagtatttaattgaattatcgaattactcccgctcccgcccgagactcccgcgaaaaatggacgggatttcaacgggatcgggatttttacgggattcccgttccggaaaattttgaactcccgctcccggaaattttttttttaccggactacttttcgcgaaatgacctagcaccttcagaaaatagttggcattctgtcctttcaaagttcaaaaaacccaatgcggatgccggtgcgctattgggattcaaagtttttgcgggaagggatgccgctgtatttatcccgtaaatccctcattttgcaaaattacggactgggatcacgcaaatcagtgcgggattccatcccgcgcgcttcttgttttgatgaactgcagttgctgttcttcgttctgcgtccctttttcgcctttgtactccctccaccgtttcacctcattttccaccgccattaatgggcgcataggcggcgccgctcggattcgacgcagacggccaacgcggagagttggtgatagcgagccgaggaggaggacatttttgagcgtttagcgattttttaaaaatcaaaaaattgctacataaagcattttcatgattaaattacggttgatagttggagtttgaaattgggagaatagtaaaacgttcattatcattaagctaacaataagataaatcggacaattgaaattttgcttattgatagcatggttataactgttcagataacaaaaatgacatgagaaaaactcaaaagttgtgatttcgtcaaattagctgatcatttttatgctgaaagatggattaaacgaactgactgtaattgaattacttctattaaagagacggtaattgcaccattactgctttgaagaatacattcgcatttaattagtcgaaaaaatttttctattatttaaacgcatccgaagaaatctaaaatttttttcttaagtattaaacgcacgaagaagtcgaaaatttttctaaaatatttcatcgcatcagaagaagtcgaacccgattgagtgcattcgaacctacagcattttaattaaagtgcattagcaccatagtctgactctgtactaatccctacccatttctgttttctaaacctaatgatcggcaatcagggttgtatgtgatcgagggaattcttatcgtacttcgttctctaggatttttgaaggaaaatgacacttttcggctgaaaatcgatcacatacaaccccaactacggtagaatttagtaaatgccgaaacgatccaaagcaggaaaagcgcagaaaaggcgttggaggaaatggagcaattttaaaaagggtattgaagaagcccgcagaacaggtgaaacgacacccgcattggtcgctgcgcacgaagcggcacattcaatagtggtcctattgaatgaggacattgcggagagcttcatcagcaccaccatcattggccagaatggtcttgatggccaaacattgtcaacacgnaggccgaatgaagactgcacgccagcgcaattgagagcagcattaatggcaacgatggccggcaaggnccgtggaatcaattnggtnncgtgtagcactggccatgctgatgacctagccgacgctagagcagccgccagagaagtatgacttcagaaagcaaaaaatangctctattgcacttatgagtcccatca

SEQ ID NO: 25245 - DNA, 1291 bp, Heterodera glycines
  unsure (1)..(1291): unsure at all n locations
tttttagtccatacaatttcgagccctaaatataattaataaaattgcgaagtgtttcataaaaaagcatcgtattgtgatttatataaatgattttcatcaaataggctcattactttttttgatgtattctaatgctagaaattgcttgcaattagtaaaagcttctagtatattttgctttattttccattggaatcacaattcttaagaattaacggtcggccaaatgcctttccgtttacttaccgccacttcgttcggttgttcgtcttccgaagaactgctgctgctttcccacctcttccgcgtgtttctcgtcctctttttctcccttccactttttgcttcttttgtgctcgttccgggctcttccacttcgtaggccaatggttttaaagttgcactcaaatttttcaaccgtaagttttgcaactccgactcggaaggtcccttcgtaattggcgtaacttttttggcagctaaagacgatgggtattcccgagcatttcttaaaaagaacataccggcacggggtacacgctcaagtaatttctcagcaaatgtctttaggttattcgtaggaacgacatcctgcagccgtttaagaaaatcgtcgcaatcgttggattttcttgccaatgcaatcatataggcaacagttgatgagtcactatacccaatgactttatgcagctcgtcatttacccaattattcaaggacataattcataaaagtatttgaatgtttgctaaaaattatacactattaaagtagtcgttgttttaattggaaaatgcggtgggggtcaaatagtgctttcgaattatacaatttaatttaggaatttcgtataataaccataattgcaattaaaccaaactttacgattattggggcttgacttggtttgaaacttctacgataacttttatacactatgggtacgccccactgtgcagagaaaagcctagtactatctcgtcgtttctctttttctttgtaatttctctcactttggcgtactatctcttctttttaattatgtaaaaaacaacattcacttcgctacgtttaactttttttctacacgttaaatccaccccaaattttgcatatcgatagagaaaaaaattctgcatcgattcatctgttattttttgattctatctgttagttcaaaagtaacaaaataaaacatacaagatgcatttctttttctctcgttttggcgtactatctttggtgggagctaacaccatgaaaaaccantaaattcgcaaattctaa

SEQ ID NO: 25246 - DNA, 1802 bp, Heterodera glycines
ttaagcttattccagaaaatctcgcatgaattctcatttttaaattttttatagatttttaaatgtttggatttttttggcttaccaaaacttcatcgaacctggttctttctattctctttcaaatcgccgcaaattttttttacagcttaactaggccctattaagcttatttccagaaaatctcgcatgaattctcatttttaaattttttatagatttttaaatgtttggattttttttggcttaccaaaacttcatcgaacctggttctttctattctctttcaaatcgccccaaattttttttacagcttaactaggcgatattaagcttatttccagaaaatctcgcatgaattctcatttttaaattttttatagatttttaaatgtttggattttttttggcttaccaaaacttcatcgaacctggttctttctattctcttttaaatcgccccaaattttttttacagcttaactaggccctattaagcttatttccaaaaaatctcgcatgaattctaatttttaaattttttatagatttttaaatgtttggatttttttttggcttaccaaaacttcatcgaacctggctatttctattctcattcaaatcgccccaaattttttttacagcttaactaggccctattaagcttatttccagaaaatctcgcatgaattctcattttaaaaattttttaattgctttttaaatatgccaaaaaatgtaggcttaacttttttagtgaaaattcgatcactcatattttttgctaattgagcagaagcgtaccaaactttgcagggatactccccggtaaaggactaacttacactgaaatgagcgccgagctagctggctcaaaaaaattttcgaaaatctgagtctttcgtttttatttattttttgcaaaattaattcttaaatattttttcagaaagggttctgaaacgcaccaaattttatttacatgttagtttaggcactctgatgctttttctatcaaaaagggagatgaataaaatttttaaaaatttttaattcctttttaaacaggccaaaaagtttaggcttaacttttttttcagaaactgatcagaagcgcaccaaactttgcagggatactgaaaggaagagaaataacctattttaaatattatctagtcagttcatttaaataatttttatccaaaaaatttttttttgggttttcggggcagtccccctgaaccgatgcgcccagatttatggggagaccgaatccttcgggaatagcttccctatagtctgtactttaattctgcgttggatttttgctccccataaatgtttgagtaccccaaacggacacttgaaaaaatcgatttttttgttttcggggcagtccccccgaaccgatgcgcccagatttatggggagaccgaatccttcgggaatagcttccctatagtctgtactttaattctgcgttggatttttgctccccataaatgtttgagtaccccaaacggacacttgaaaaaatcgatttttttgttttcggggcagtccccccgaaccgatgcgcccagatttatggggagaccgaatccttcgggaatagcttccctatagcctgtactttaattctgcgttggatttttgctccccataaatgtttgagtaccccaaacggacacttgaaaaaatcgatttttttgttttcggggcagtccccccgaaccgatgcgcccagatttatggggagaccgaatccttccggaatagcttccctatagcctgtactttaa

SEQ ID NO: 25247 - DNA, 1159 bp, Heterodera glycines
ggaaacccacgagtatacaaaaaaaaaatgaaaatattctaatttctgtagagggattgacccaggggaaagaagaagggaaagtcaaggagactagccattaggctatttgcacacttaggtcagtgttacttttaaagaatatattaattattattttttatttttccctttgactccaattttcttcactaatttttcactcagacccccattcttaccagtgcttgtttttcccggttgccctaccgggaccgggacctgagcttttcaaaacccgggaccgggaattcccggcccggtcccgtggttctctaatttctagtgaccgatagcttgacattcacaatcgaaaaatttaaacgtagaaatgcgttttttgagctcctttcttcaaatcaattgagcaaaaaaatagttaaaacctaaaattcccagccctacttcatcattgtcattttcactttaatcgagttttgattttggtttcttttttgttatattcacaatagtcatttttttcactatcaaatttatgttcaaataaaatttaaatttatttttatttgttttagcttaatgtaaatgatttaatgtttgaacctattacaatttattgacttcgttctgctggttgtgaatccaattaaaggatattaagtgacacacatcatggtgaaagtgaatccgtgtggtgatgcagtaagttatgagttttattacaacaacattaatcaaatctaataaataattgaaaaaatcgtgatcccttctccatctgatcaatgatcagaaatctgacatatgtttagagaagatggtgctaattaattacacaccgttttctgacatttactggataagtctcgtatccatttttttctgttgttgattggctattaatcacctcttttccctcacaattcactgataatgtctcattttattgtttttactcttttatttctaagttcggttacatttaattgctttattttttattaggtattcgggtctatgtttatttcttcaaaattttcctttataatactctctctctctctctccaccaacaattgaaattattatgcctctgcttcgggtttggaatgaatgtaacgaataattacggaaccgaccgcgggggaggggggggggg

SEQ ID NO: 25248 - DNA, 2279 bp, Heterodera glycines
  unsure (1)..(2279): unsure at all n locations
ttaattacattggctattttttcagaacttttttggatttatttagtgcttttttggcatttttcgtgactttttggcgatttttcatgactttttaagtcgacttttttgagattttttgtgatttaaattcccatccctagtaatgaatggataatttggcggcgaaattgcactgcttaaatacgcagaaaattttcataaatttttcggtcgttttcataaagtataaattgcataaatttggacttttttgtccattttttcattcgaattcactcttctcttctgcccattttcgaccttttgtccttttttaaattgttctatcagtttttttttaaagttagcgcatagaatttcattctcctctctcttttgctatcacaacacaattccaattcgtcaacagcttcttcttccctcatcgacgagatgacttcttcaagatcggtaatccctccccctccctccacattcattcttttctcctcccttcattcagcgaactcgtcgtacgacttcaactgctgttgcaggccgtagtcggagggcagcgcgccgagcgttttgcagtgaagtgcttcgtcgagtctcgcgccgtgcgtcttcttccaggaaaccgtctcgccgacgtcgccggattgtgtcgcgcagagcaacgccaaagaagcggtccaagcagcgtgggcgtggacgtccgagaaagccgcagggcctaaacagaagagttgtcatgactgaagcaatttggcatctgcccgggcatgggccaatgacggaagaacaaatgagaatgttggtgcagacagcagcgacagtgacgaatgaatgacgcgtggtcggacgagacatggtacaacaacggcatggagaaaagcgtgcatcgaaatggacgagaattttgcagaggatactaattaaatcacggatatgtgcccatcacagagagtgtggctcccctttgtatgttgtataatgaaattgatcccccgtcaaatccttccgattgtatgtatataatttacccactgatccaccatttgatattaccaatgtctgaataaatgccattgaatttactacatatatcctgttgattaggaaataaaatagacaaattatccccaatttttttccaaatcgttttagggcataaagtcgaaagtcattattttcgaacgcacttttacccgaaaactgattctgtaaaacaacaagcttaaatttgtcactgtaagtttttgaaccggcttaaaactcgaaaaattttgcatttctaacttttttaaatgaacggatcctgaatttttggcgaaaatctgaaaatccggactccaataattgcctcaaaataatcactacagcgaaaattgacaaacaactttcgtttaaccgagtatcatctttatccaaaacgccggttcccgggccgggttgaattttagaaaacgaccggtttccgggcccagtctctcaaaaaccggtcaaaccggatttttccaaaaatcaccggttccgttttccgagtccggtaaaaaccgggcccggctcggtctctactaatgatgatcaaacctaatcctgaatttaagccttaaactgcttccgttacattttttgccatatgtacaacaaaagggcaatgccgcggataatggcacgcggcgtggcggtgaagcagtgcaaattcgacattggcggaggcggtgaatataaatggggatgagggcattcattggtcattattaatagacggaatgcgaacttttcggcccgaattcctgaatttttgaaatttggatggcatccgtcccattccctttttgtacgtgccatacaaccaaccaaaattattagaaaaacaattaaattttgtgccattccccattttaacagacattcccttcgcttctcccttttcgttcccttctgagccgtcgtcgtcttcgaccagtaacagcagcagcaacgagaacaaccaaagcaacgaaatcaccgccagtggcggcgctctttccgaggctccggcgatcgatggtttttaattttcaaaaaacccccaaaattttaattaattaatttcgttcctttttttgatgagcttgactacgaaattggcaccaaagtgttagtccatcgtgcgcttggcaaagtgttatttgtccaaccggcggccgacgacattcggcaaacgacgctatggagggtcggtttggagaggatttattgacggggtccctgggtggagnaaaaaaatcttcggagggatgaacccg

SEQ ID NO: 25249 - DNA, 991 bp, Heterodera glycines
  unsure (1)..(991): unsure at all n locations
aaatagtggcaaaaatagtggcgaacaagttccaaatttnaggggtgtaattttttaaataggctgttttttaatttgaaaataatttaaaataaggcaaacaactttttcactgattgcagttacaaaatattttcttagcaaatattgaacaagaaaaaaaaatttgggggaagaatttttgtgaaaattttccaattcttagggggtgtatttttgaaaatttttaggtagattcttaggggtgtattttttgaattttttagatcgattcttggggtgtatttttcgtttttattgcattttttgggaaattttccaaaaaatgccaaaatagtggcaaaaataatgacaaaatgccaaaatagtggcaaaaaattattttagtggccaacttccgaaatagttttttttagtggcgaagctccaaaatagtgattcctagtgatgaatagtggcactaaaaacgaaaaattttcgaaaaagaatgtgtttttcgtgcatttctcgtcgagttaaagccgcagaaaaaatagttaaaaaactaagaatccgatccctagtcatcaccaaccatttaactttttatgaagccaaatttctcgaaaaggctagtggtgttaattgttttctttgtcatcatcgcgtgttttttgtttatttttaaagttctgtgctttatcaaaatgcaaacatatggatgggcggagcgagtgagtaattgaaggctaattaatattgctgttcgagattctcggggtcaagtctcgttctcggaaatttttctgtagcgttactaattaaccgtaggtttgggtaaaactgcagaattgcagctcgcgccaattaaaaaaaatgcgaataaggcaatacgagatgcactactctgaattatgcattttattttaattctgcgcataaataaatttttggcattatgattcatccattacattagcataaaatagcggtaggggtcaactgcgtctga

SEQ ID NO: 25250 - DNA, 1284 bp, Heterodera glycines
  unsure (1)..(1284): unsure at all n locations
aaaagtctcagtaatattttttttctccctgtgtcatttgnnaatcttttctattatctacnnacagaaacatacaactattttcccccctttatttatttattttttgcaatttaattcattaaaaattttaaattatgtaaattgggtggcaaaaaaaaatttttttgttgtagcccagtaaaattggtaatgatcaaaagggaaccgcccacttcggcgccggccttttcggcgccgttgctaacaacttttttcctgatcaaccaaattaaaaatttttgttatcattcgatagctcttcagattctctattagcctgtaaaatttcaaaaaatttcgtcagtttacaaaaaagttatggccaaaaaacctcaaaaattaactttttcttggctttttcggcgccgcgtggcataacttttatttttgaatcattcatttctttttttacatgtaaatatagagcacacatagagctttcaaatgatgccagattggctaaagctaactgacaaataaaaaagttatagcatttcaaaatttgcggcgccgaaatggtccgcgccgaagtgaccccgaccctgatcaaaatgggcaaaatgggtttgccaaatgtgcgcaaatccatgagtttgctaggagcttattcctctgatcaaactccagcagcagttcatcttccctgcccttatttgttaggggggggggtgatcaatttggggaggaccatcttcccccgtgggaatgggagggatgcttccaagcggaccttgcgcgggggatcaataaaaaaaattccatctcacgacggtgggattaatgggcaaccgatggacgacgacgattggtgctgaaatattagcaatttagtgagccaatcaaaaccatagagggttcctaactaatttgttagcaattttttcgactttttttttttgccaaaaactatcatttattttccaaatgtgaacaattcgtatcaatgttccatcaaaaatatatatgggtcaaattgtgccttctgttctctccaaataaatttcacttttacgtgcacatgttcactaaaaacgtgaaattacaattcattttttggtttttacacaataaaacgtgaagtcgagattaggtaattttctgtgtttttgtacactaaaaacgtgaaattacaattttgtgggtctaaaacgatttgacgggtacgtgcatctacacaagacaacgtgaacggcggattacgattcatttttgggtagatttcacttttacgtgcacatgttc

SEQ ID NO: 25251 - DNA, 1529 bp, Heterodera glycines
tgaaaaaagcaatgtatgtaaaaggaaattttaaaatattacaaaaattaaaaaaattctttttttgaaaattttttatagtagtttatattgaaataaacaaaaacgattaaaagaaatcaatatttgctttattttaaaaacaaatattttctttcgtggaaaaattttaatatatcattttatattatctatatttatttttaataattattaaatgagacaatttatttaagacaaattattaacttaccaatttaatcacaaattattatttttacgccaattttttttcatatatttaaatataaaaaaattattttggcaattaaaaatcataaaataattttttaaattttttttttgtaccaattggccacatcacaattactatctgattgactgacctttgccacgtcaatagcctgtttgtacatttcacgcggatacggggaggggaacagtgtgaagggtgcaaaaacggacatgttactcctaaattaattaaattattaatttaaattgtctaaattaattaaaatatcaatttcaaattaattttttaaaattttaattacttgtctttcgcagtaggcaatcttgtaatcagaaaaactttgtgagaatagtcaattgcatcttccaccaaggtttgcacattttcttcatcaagaacaaaagttggagctgtacttggttgaggcgttgtcactaaaaattattttattttaaattgtttaaatatataaatagaaatatgtatttacctaattagtgataatttttcgaaaattttaaagtttttttgacttatgatttcgttaaaaaaatacaaaaaaaattatgtttatatcaaatttttaatgatattagtaacaaaaaataattctaaaattaattaaacaaatgattggttttgaaaattgctattttttgattttttaactaataaattttcaatatttattttaaatatataaaatatttaatttttttttatttataaatataaaatttaaaaaaaaaaccttgcaattgttcagttgtttcctctttttgttcttcattagcagttgtaccatttgttgcgttacaacaaatggtacagaataaaagcacaaaagacaatttaaacattttggcaaaaatatttaaaaaatatatttgttttcttagaataatattttatttaaatttgcgtttgcttttataataaaatttttgtttacattattataatatattttgcctactttgtttcctcgtaaaaattcatttccgtcaatgatgtaatcatatgcatggaatatccggtctatgctaagataataatttttttataaacatatgccattcattaacatccggatataagttgtagattagaaatatagcttgtatacatttttaataataataatataataatgttaataataaataaataatagatatgcaatttatatgcaacaaatttcacacaatcctggggatcttaaaacggtcacaaaccaccttttttcggcacg

SEQ ID NO: 25252 - DNA, 1283 bp, Heterodera glycines
tagttttaaaaatgaaaaatctaggggaaaatattagaccatattcgcccagagtaaaaaaaggtcatatactatcattttattcttctcgtattaaatcaagaatccggaagaattttttggggtttttaacattgtcgctgagcacgcgcggctccaagtcgacgagcagcgcacggggcacccatttttggccggaattctgcagaagacaaaaaattagaaatagaaatttttcaaaacgcaaatttttaatttccccccccccaaaaaaaaatcggtgaaaaagctttcatttttatagcttcttatttcatttacctatttgacaatttcatcagtttttaactgttaaaaaattctcggggggggggcgtggatgagctgcacccgactatttgcttcatcacctgtctaggcaaatttgttgggaagactgatcatgccatccacccatccccaaaacctcgtcagaattcgtctcttgtttatcctcttccctcgatttgtcccgccgtcctccatccgttgatccatcgcgtcagattataagtgtgggtgccatgccgtcatgtttgtacatgaaattaagtccattacgactcaaacaaaaacaaaaatacgtagaaaatattaccgttttaccattacacgaccatgtgctgattataattgtgggtgcactgctccaaaatcgggttgggttatagcgcgggcgggcgggagggggggggggttatcttctttttagctgggggcgtgaatttaaggcataaaaagacccaccaacagtgtttgtacttcattctcctcttttattcctatcaattcgtccaaaacctctatcaattgaccaaattatgtcgctaccgttaaaggaattcctaatcagggaatttgaaaaggcaagacagcatatagacaagcgagttcacgaagaagttgctgagaaggacgagctggccaaacaactgaaggatctgaagcgaaaacgaagatcaatccgcagcagacgaacatcgatccacagcagaacattcaaaaggactctttcaaagttagttgtgggtgccaaaggaactgattttggatgatttggcccaccaaaaaagtcaccgattttttgattataattgtgggtgcccggttttttccacccccccccccaacattgtcaaattcgaccctccgttcgtcctctgccgcgatttgcccctcaatgtgaaatgcaattttataaattttgatgaatgaagacagatttgaaaatttaggttaaaaaa

SEQ ID NO: 25253 - DNA, 1316 bp, Heterodera glycines
aaaaaattttgaaaattgtcttttggatttgttaacagattttattcaaaaaatgaccaaaacttgttttttaaattttttgtttttaagtcgctttttttgtggcgctgtttttccaaaaaaaattttttggaacattgggtgcggggtccggcggtgccgaatcggcaccgccgataggcgccgccggaaaaattctaaaattttgagtgtaatatattaacagaacttgtcaaaaaatgatcaaagttttggttaaatttgcagttttaggctgtttaaaaaaagaaaaaataataatttttaaattgaaatattttttattaattaaaatttcaattgaaaataatttaaagaaattattaaaaaaattctgtaccgttggggaattgaacccaagagaaaaataatgaaaggcagaaggtttagccagcagaccatatttgaattggagctatccaaaaatagagaaaacattaaggaaggaaagaaagagatttaagattttttttcgcgtaaatttgaaaatttttctggctgctcaaaagttcaatctttaggggtgtattttcaactctcgcctctcgtcccaaaaaacgagaggcgagagacgagaggcgagagtacaaaaaatggcgagagttggcgagaggcgagagacgagaggcgagagttgtcccacccctgctgcataactcaatcggacaaacaaatgtccaaattggcatggaattggcactggcaccgaacaatggcgcaaacagtggcccgtcaaaatgggccgaaccggactcagtacggcatgcgacaagacaaagccgagggggcccggtgcggggtagggaaagtgccccccccccccccccaactttacggatttagcatgaaatcagctaacaattcaccgcaaatttcagtgcttgggcgatgtaaaattgtgaaaatagctacgaattacccttgaaaaatgcacaaaaaaagtcgtcgcttggttttaaatagagattttattttcgattttcagattttggcgcagaaaaatttcgcgggttttattttgctgaaacatttgctggaaattgagcagaaagtgcgcaagattcgggactcgcagacgcaagttcccgaattcttttacgatcaatgcaaatcattcgaggcgatttttggacggaagttgaatttgctcgaatgttcgaccaaattttcggttttttgtattcatctgaaaaataagacctgtaaatttaagccaaaattgcccagtccccctccggcgccattttacgaggcaattcgtcagtatgggccattct

SEQ ID NO: 25254 - DNA, 2278 bp, Heterodera glycines
tcacattcacaaacaacgcatccccttaattgtgcttccccccacgttttatttaatttcgtataaaggtacataaagccctttctttcatcgaaagtcgtctttttcgcaattttctgtagttgaacagcatccatcgttaatattgcctagttttctttaattaattttccgtttccaaattcttattcgattgtaagttttaaaaaaaattggttttaagtccgagtccgcctgattaccctaatcctaattaggtacttgaaaacgaaaaacattgacaaaaacacatttacgtgcataaataaattcattttttcaattcttttcttttatttgttagcctatatttaattttcttcttctcaaaatggcttcagaagatgcttccaaagttcgtcgctcttccatttctattttcattcatttttacttagatcgtcacagagcaacgtaattttttcaaaaccggcgcaactcgtgccgcggcatttcgcaaggaacagctgaagaaaatgcgcgaaatgattgttcaaaacaaagacaaaatttgcgaggccatttacaaggacttgcgacgtaacaaggagacaaatatgaaaatggaggtgaatttcgtattatttgcggtattttttgttaacttttagtaaagatgtttaatcgcgcttattaattttaaaatatcatttagttttctcgtttttcaggttgatgggcctttgcaagccattgactattgtctgtctgagttggacgaatggatgaaaccccaaaaggtacattagaaaaaacggaattttgctgaaacacactgatacatttgcatattttagctggatgaccaccaattgggcaagccgttggtcatttttgagccgaagggcgttgcgttggtgatcaccgcttggaattatcctgcagccctcgcttttcaaccggccattgaagcaattgctgctggcaagaaaacttcgaaattttggaaccttacattttcaatttcaggaaacaccgtggtgatcaaaccgtcggaagtgtcgccgaacacttccaaattgttgaaggaaatgtttgatgccacttttgacaaagtgagtttgagttgaaatttaaataaaacacttacaattaaattgttcaataaatcaaataattaaaatgatatttattataatccgtagaaattcatcgccgttgtggagggggcggcccccgaaacgcaggcgcttctcgaccaacgctttgaccacattttctacaccggaagctcgtcaattgccaagctgataatgcaagcggccgccaaaaatttgactcccgtcactttggaactcggcggaaaatggttggtcgttatgcttcattctgattttacttttcaactgatttagtccggtggtcgtggagaatgacgccgacttggagaaggctgctttgcgtatcgcagaagggaagtggttgaacagcggacagacttgcctggcgccggactacgtcatgaccacggccgagatgaaaccgaagctggtgaacgcactgcagaagagcattcagacgctctacggagagaatcccaagaagagcgagcagtattcgagaatggtcaatcaacgccatttcgaccgagtgaaggcgttgctggacaagacgaatgggaaagtgctgtacaagaatggggagccggaccgagacgatgtgttcattccgccggtcttggtggatacggacttgaaggacgcactgatgcaggaagaagtgtttggacccgtgctgcccatcctcaccgtgaagggacttgacgaggcgatggacgtgatcaacgacggagaaaaggcaaatgcttcgagaccaaatatcaaaataaatttgaccctttagccgcttggggcgtatttgttcacgaatgaccaacaaaaggtggacaaatttctgaacgaaacttcgagtggaggggtcacaattaacgacattctcaagcatgtctttggttagcaattgaaaaatgaagaaagtctatcggggttttaaatgcactttatgagtccattcgacttatatgagtccaatcgacttttatgagtccaaagatattttatgagtccaatcaattgacaattccgggtttttatacaataatttggttcatgttcgaacaaaccctatctttttggtatcattcgaaagcacaaagtctaacgaagctaaaatatataaaatcgcagcgttcatgcaattaccaaaaaagatttgattaattaagtaattgctgattatt

SEQ ID NO: 25255 - DNA, 1422 bp, Heterodera glycines
gggactcaaccctcactagttcaatctctgggactcaaataaccggcattccagacactgggactcaacccaccaacatttcaatgtcattccaatctctgggactcaatccaccagcatttcaatctctgagactcaattctcaggctttccaatcgctgggactcaacccaccaacatttcaatctctgggactcaaatctccggcattccaaacactgggactcaacccaccaactttcaatggcattccaatctctgggactcaacccaccagcatttcaatctctgggactcaacccaccagcatttcaatctcggtgactcaaatctccggcattccagacactgggactcaacccaccagcatttcaatctctgggactcaattctcaggctttccaatcactggaactcaaatctctggcattccaaacactgggactcaaatctccggcattccaaacactggaactcaacccaccaactttcaatgacattccaatcactgaaaatcaagccaccagcattccaatacttggactcaacccaccagcatttcaatctctgggactcaattctccggcattccaaacaatgaaatctccggcattccagacactgggactcaacccaccagcatttcaatctctgggactcaattctcaggctttccaatcactggaactcaaatctctggcattccaaacactgggactcaaatctccggcattccaaacactgggactcaaatctgcggcattctaaacattgggactcagcccaacaactttcaatgacattccaatcactgaaaatcaggccaccagcattccaatactgggactcaattctccggcattccaatctctgggactcaaatctccggcattccaaacaatgggactcaaatctccggcattctaaacactgggactcaacccaccaactttcaatgacattccaatcactgaaaatcaagccaccagcattccaatactgggactcaacccagcagcatttcaatctctgggactcaattctccgacattccaaacaatgaaatctccagcattccaaacactgggactcaacccaccaactttcaatgacattcaaatcactgaaaatcaggccaccagcattccaatactgggactcaattctccggcattccaatctctgggactaaaatctccggcattccaaacaaatgggactcaacccaccaactttcaatgacattccaatctctgggactcaacccaccagcatttcaatctctgagactcaattctcaggctttccatcgctgggactcaacccaccagcatttcaatctctgggactcaaatctctggcattccaaacactgagacttaaccccccaaatttcaatggcattccaaatctctgggactc

SEQ ID NO: 25256 - DNA, 876 bp, Heterodera glycines
tttttctgggatagagtataaatttaaaaattccctcaaaaataaaaggtaaattgcgcaccgccctccctatcatgctcgagagcatttgtatgtgtataaaatttctcaaaaaaagagatagacatttttctgggatagagtataaatttaaaaattccctcaaaaataaaaggtctattgcgcaccgccctccctatcatgctcgagagcatttgtatgtgtataaaatttatcaaaaaaagagatagccatttttctgggatagagtataaatttaaaaattccctcaaaaataaaaggtctattgcgcaccgccctccctatcatgctcgagagcatttgtatgtgtataaaatttatcaaaaaaagagatagccatttttctgggataacctctaaatataaaaatcctctgtgaaataaaatggcgattgtgcacagccctccgtctcatacgcaagcgcttttgtgaggtataaaatttctcaaaaaaagagatagccatttttctgggatagagtataaatttaaaaattccctcaaaaataaaaggtctattgcgcaccgccctccctatcatgctcgagagcatttgtatgtgtataaaatttatcaaaaaaagagatagccatttttctgggataacctctaaatataaaaatcctctgtgaaataaaatggcgattgtgcacagccctccgtctcatacgcaagcgcttttgtgaggtataaaatttctcaaaaaaagagatagccatttttctgggatagagtataaatttaaaaattccctcaaaaataaaaggtaattgcgcaccgccctccctatcatgctcgagagcatttgtatgtgtataaaatttatcaaaaaaa

SEQ ID NO: 25257 - DNA, 1446 bp, Heterodera glycines
taattgcccaaattaacgaatcggaataattaagtccaaccaaattgccaatcgaatgctttttcactttatttctgacgcttggtaagaggggaccaatcaaaggcagggggagcacatttttccaattgttgtgtgtttttaagaagtgaaggaaaaaaagtgatcgacaagggggagtccatccggcggatatgtgaaacgggaaaaatgagtaaattttatcgccgtgggaaatctcgaggatcggccgattcaatgattgtggtgcatgggaaaatgtgtagggagagtgaccaagtattgtggcaatggggtgggagcaagggggacacggacacagaccaaattagggaaattgttcgcagttcgcgacactcccggcagggtattggtggcaccatttgggctgttggatgagacggccaaaaaaggaggaatgggacaagggggggttgtgaaacgaatttggttcaacggcacgggctttccgagtttggcaaattccttccattctttaacggaagacagctgttcgattcgtcctgagtccatgattcgcgttcggttgaccatcatcggttgtccgcgtgccggtgtttgggaagtgtgattgtgcatgtgtgtggccaatgatgctagagatgaattatatttacttaatttttcttatattaaataatatgaaatatattatctcgcaacgaatacgaggacgaagaaaaatttaacgaagcagagatgtgtaaaaactcgtgcatctttcttccgcatttaattatttattcatgtagttatttaaagttaaataatttattaagatcaatataataaaacaattattttatattaaagtttatttcaattttgaaataaaaaaaataataaaaattattatatatttttttatgaaaataaaaaacgattgcctacgattgaattaaagctcacaatctaatcaattttttttatgcgcaataattaattaaataaaacaaattaaattacttgtatctaaaattttcataaataaattataagaaactaaaaaatcattttgtaaaatgcttaaatattaaatgtaaatatttaattaatttatttaatgaacattataaatttgtacaatttatattattttgttataaaattgatttaattattaataatttaaagttttcatacgataaaaatttgtaagaacaaagattaaaatgtccccgaccttggaagaacgaaaaggaagagaattaaaaaaaaattagaaacatttgatgcaatttttttgtataaaataaaatttatattaattaatttgtttgcaaataattaattaaagaatgcaactcaattatttacaataattattaaaataaaataactttccatttatgagaaatacaaataattataaattaatacaaaataaatttgctcacattaata

SEQ ID NO: 25258 - DNA, 2570 bp, Heterodera glycines
  unsure (1)..(2570): unsure at all n locations
tgcatattttgccatttttcgtcaaatattttccgattcttttatcccnttcggaaaaaaatttgattgcctaaaattaaatccaaatctgaatgggtgcgcgagtgggtcaactgtgagtttcactgccgaaaaccttgagaaatttttgatttgaaattgcaaaaacaaccggtaaattatgagaaataaaattttttaaaattattttgcacccctaattttcaagtttttttgtgcatatttggtgcatattttacgatttttatgcatatttgatgcatatttcacgactttatttgcatatttatgagcatattttggccacttttcgtgcatatttttggcagccctggtgacaataaatcaagctcttctatcttacttaaattattttttgcgttcaattttattattctttaattaattttttcctttaaaaaattttgactcaaaaatcgcaaaattttcgacttttttgaacagggtctgccaaaattattttactactctatcgatactttaattatttttaggcaaaaacgatttaattttttaaaaatcttatttttggagtcaaaacttagatttttgattttttaagtcttttgtattctaaatgtcttttcttgtttgttaccttttcagtaaatttttgttctcgaattggccaatttatgtccgctgtttctctgattttttcgcgcgctgaaaatttaaataaatttgaattgcaaatttggcggtttgcctttggccatttcccatcggatgatttttccggtggataaattcgtttttgaagcggcgttttgctctgggaatattggcgttatgacaaccatcgccgtctccttgcgaatgcttttcatcacattttcctctgccatttgcctcttccaaaaccattctctgctcgttgtccaattcaaaaattcagccctccgatttcgttcaatgggcgccaattggacgggcatttgccaatcccttcaaataaaagtcaaaatgaaatggaaataaatgtaccaaagtgaaaaagtgagaaagaatttgtcgattatgaagggaatggacgaatttggaaaaagcaaaaatattttggccagcaaaacgagaagcattttccgattgaacaggccaaattggtcggaataaatgtgcttatctgaggaaagcaattttaataatttaaattatttatttttattaataattccgttaatatttcaatttaactcactcttgcccactgctccaaataaatcaaaacgactcgaaatttccccacagaattttcgctgtcattttcttcaatgttttctttttgcgaagtttcatccgtcaaaatttccacgattttcttccaaatcccaaagtctgaatgaatacggtactttgtctcgattctcctactgtacggctcggccccaccggcaataattcgtatggcaccagtccattccttcacttttcctcgttgttctaatgccattgcgcgctcatgagaaagcattgcgctgtttccgttcagcaattcgatttccatgacaatttccgccttttcatccgctccttaattaattaattaattacaattggttcgttaatcattaatcgcttttcctaattgccacccgtagctttgttcagcttttcgtgcattcggttcttctcgctctcgtgccattcctggtcattccaataaactccctcatcaaaaatgtggtcggctctgatcacttgtgccgtttttatagtcaaaaatctcagaacattgctgatttgggttggcccccataggggggagtctggcaatggtgggaacgataattagcggaagtgccatttgcaggcccatgaaagtgagtcggagcatcggcaccgaactgacgcggtccctccaggatttttgcattgctgtcacccgcaaatcctttgaaatgaaaaaacacagtgataattcgaccccaccccgctaaactcaaaaaacaaaaaaatcgctaccgtacccggcacagtacacagtaaaacgattcgtcgccacatttttctcgattttcccttccatttaaattgcaaaaatgctttccgataatattttcgatgctaaacacactgggaaagagacaaaacgaatcgaagcgaccgccaaaagattgggagacgacaaattgggcaaagggggactgaaatgggaaaggggaaatggcaaatggaaatttggaaatggcacccatttggtgatcagctcctctatttggctcaatacattttgcaaattttgatcagattccgttgaaattaagccttttttcacctgaatttaatttccttcacaattttcctttcccaatttaccaattcgctttttcccattctttcatttttctgatctttgctaaaattcacttcttgccaatgttcggctattttggtcacttccgtctctttttcggctttttctctgtcgtttatggttccaaaaataattctccatcttaatccaagccctgggaggagaattaatgataattattttctatttccccacccaatttgactctaga

SEQ ID NO: 25259 - DNA, 1219 bp, Heterodera glycines
atccgatccagacggggtcgatgatttctttgccgtccccttaatgtcctctagcgtagttgttggccgcgtcttcttttccagtgatgagctgttcagggtggaagagatgcttgtaagtcccagtgcggatctcgtctaaaacagcggataatccaacgaaaaacaacaaatggcaaccgatcactgttggctccaagtcgaccataaccgcacgcggaacatgacgcccattgcctgtttccgagaagaaggtgctgaacgaatcgtcttggttgttttggtcggatggcatttttccatcgggctgaatgccatgttccaagcagtacaattcccaacaagcatttccaatttgcacgcccgcttgtcccacatgaatagagatcacttcacgcttaacaactcgagtaagcgcttatttacatactaaattaaaacacgtaccatttttgatgttttctctcactaagatttgacttgattaaataggtcaggtttagtttgtggaaggctaaaatttataaaagaattaaagttttaaaaacaacactgatcgataaaaagaaaagctttagaaaatgaaggtagtattaaataaacgagcatgaacatgatggttgacgaacgggaccgctgcccattgagttattttgttctatacaactccaagtgtcactattgggtcactccactagcaaagtaaagcctaatacacaatgggtccgctccatgtcagacaaaattgttcataacgccaagtagtataatttgcgtaattttttgcgcgctatttcaaaaaattagctggtcaatgccttttttgacaaaaaatttttttttaggaaaaaaggccaaatcacaaaatacagtcaggtgcaaaagtaaaagaaaaaggcatcccgattggtcatcaaaaagttatggtgtcaaaaccaaattgacccaatttttggcggtgcaaaagtatggaagcaaaatctttaatacactaaaactattttatacggagaaaaaattcagaaaatcctctacgctaacttttgatgaacaaaaaagtcttttggaccaacatgatcagatcactccttcatggtgacctgaataccccaaaatatatttaaaatcggtaaaattttcgaaaaaaattcctaggggttgggaaaatttttctggaaaatttgattaggcctatcataaagaggacaaaatattctac

SEQ ID NO: 25260 - DNA, 1693 bp, Heterodera glycines
gttacccgatcagggacttttggtgccctttatggttgtttagtaggctccggcggcaaatgactgataaaatttggtagtttttacaccgttccggaggccaggcgagtaccaaatcggatattaaataataaaataatttggttgatgattaaatttataaattaatatattaaaataattaacttaattattcgaataatttttccggactgaaacggccattccctccaaattgcgcacattcattcttttttcgcttcgcccacacttattcttttttcacttcttcatagcaccattttgttgcatttacattcagattctctctttttcccctccaatgcgtttcgagcggcggaaacagcgaaactgacaacgccgcttcaatttcacaacagcagcagcagaacttttttccgcttggccaagtaatttttccgattttcttttgctaccgtaatccaccaatcgtttagcaattaccgtctttcgcgatggaccaacaacacgcccacgcccaccagcaacacccgacggataacagccagcccaagcagcagtttcagccccagcagttggacctccacttggggcagatggtcgacccgtcctttctgctccaggacttccaattggcacaatccgtcacggtcggcgtcaatggccaagttggcatggtgccctttttgggctttgaccttcaacaacaactgaactcattggccacggcaccagcaactgatcaccagcagatgaatgctgtttctgtggatgtgagtcatcaacggcactttcacaattccgttgcatttcaacatttgaaatgcatgtcaaaaatgccttggctttccttccatctaatggcctcataatgtcccgttctgtcctccagcgcacttcgtccgcgcgttcttcggccgtccccgcgtcggtctctgtgattttctcggccccttccgccgtcccctgcatttcttccgccccctcctccaattgctttacaaatgcttgtccctcttccgctgaattgttgctcaacgggtacactcatcagcagcaacattcgcaggtgccttctcccccccccccccttttttctccactcattttgctctttttcagattggtccaaatgccacgcgctttttgccctcggtgacaaaagtgcaacaagaaaagaatatgtcggctgagtttgtcaacgaccggcagcacatcggctacgatttgttctgtacaacggtaaacagagggacggcggtggtcgaattggaagaattcgaagttcggaacggcgcatcactgccgacttatgggcagcaccatttcacatctgctgaccaattcggacagctcggaatcgaccaacatcgatttgtccatttgtcagcagggcaaattttggaaggcaaacaaatcaaagcggaggagcagcaacagccgccggggaccaccgtggccatgtcctactgaggagaacgaggaaaagcatcgacccgccgatcgctgctccgtccgttgcccttccgccgccgatcagtcatttcccaacctcggccattctcgccgattcactcattggctgtgccacgaacttttccttatcattcatttcaaaattatttttgtacattccttctgtagattagttatcatcccttattgcatatggcataaattgctttgattc

SEQ ID NO: 25261 - DNA, 1828 bp, Heterodera glycines
tgaggacactggggtcacaactgttcccaaaaagactctttatttcatggatgcatatcatgatgcgaccaataatcaatttagttatctcatgattaacatgcacccaaattctgaggaggaattcagattatgtagcaaaatttttccagatgagactctggaaatttatttaccaattgaatagtatataagaatatgaatttaaattaaattaaaaatgtataaatttagctccgaagtgaaggagaatacagcattcctaaagaagcttgcctccaccagatcagaacaaaagaagaacgaattaatcgaaaacgctacagctgaccaaattttggcaatcgttgaaatttgtgcaaatatattgagttttagttttaaactaacgaacaaacaaaaaagaaggttggcacaatacgccgatttttatagagaaattgccaaatctcgttcagagaaaacggcaagaaaaaggatacaacaggggagtggtatagccctgggagctgtcttgatacctgtactgagtgttttagcccaacatttattagaaaaaataacatcatgaaatttgcaaagaaaatgttaatgattcccgaggcggaatatttggctctacggagtgcgatgaatagtggtgattatctccaaaatgaaaaagcgagtttagacgcaaaaatttctcagaatttacaagaccccgacataagcgaggacctcaaggcgaagagacatgattggctctataaagaaagacgtacggtaaaggggatacttgaaaatagaccacagaaggtagtgattgagaatcatgtacccggtccgaatgttgcaccatatctaggcctcaacactcaatccaaaccacaggagaccgatgaacaccggaaaataattattcctaggaaaagacttgaagagcaaactcctgatcctgaatcagataatgatacaataaatgagttaactccggagccccaaacaacatccacattaaaacccattccgatcaaaactattatacacccgacccttttaaacggtctttttaggtacgtgaaggaaaacaaagatttatttaaaattacggcggccggaaaggtacagtcgaacatgaatttgccgattgaaaacagtaattatagagatgttttgttgtatctcgcagggaagaaagatgaaacgccgcgcggtgcaaaatttctcaaagatcggttactgaaggatccaacagtaaaagacatggttgataaatcaaaggtcatgtggggacgtggaaggaaaaaggcaataaaatctataaaaacacccggcatagtgcgagagaagaaacccttcaaaccactaatatgggcaagactgtagagaaaattttatcgaaaatttattttaatttaaaatctccggcaagttttgctggaattcaaaaaattttaaatgaggccaaaaagattgacccgaaaattacgaccgatgacgttaataaattcctagaaaagcagaaaacatacacgattcacaagcccatcaggaaaagattcccgagactaaagacgataccaagtggcttccataccgattggcagtgcgatttgtgcatatttgaccagttgaaaaagcataacgacggttataaatatttattggtctgcatcgacgtgctgagccgaatgatcttcagtgcaccggccaagtcaaagaagagtgaggacatgatcgaggcttttgatcgggtgttcgaaaagtctaaaattatcccgcatgaaaatatatagtgacagtagaagggaattccaagcaggaaaaatgaaaaaatattttgagg

SEQ ID NO: 25262 - DNA, 1118 bp, Heterodera glycines
  unsure (1)..(1118): unsure at all n locations
agtaaaaacaatttataaataaaattaattaaaatgatcatttgaaaatttataanttttgaggaaaataatcaaaaaatgtgtgcaatttggaaatgatatggcaagaaaaatgttcaattgtcgcaaaggaatgaatttaaaagttaataggaaaaatctttagggatttgacaggacctgaaattataattgacaaaaaaaaatgccaaaaaaccataaaattttgctctataatttcaggcattgacagtaacatacatacatacagtatgcaaaatacagtatgaatacggatatgtaaaatggaaataaaaaaaaataaaaaaagaacaatatgcaaaaaagaaaaagaatcccattaattgaaaacagaataaaatttgggaaatctccgatcaaatgagcggaagcatttaatgaggaatcaaatgattgatcatatttctcctttgattgttttcaaggattgatcatttaaggtgactgactgatcagtgtacaaaaaggggagaattatgagcgatcagttcaaaattgatccatgggttcaaataaaaccaaaccgtatccattttttcaaaataaaatgatgcccaaccttagatatttggctcatccctcggattagttttcaaaacaaaaacattgcgcccagtataaccaccccaatttctgattgatcacgttgcttctttctaatcagtcgtcattggcactggtgctgttctgctggtgattggtgggcccaattgtttttgattgatcagcgccgctgggagtgattggaagttgcagcgttgtgaacggcttggcgccaccgcgtccaatggacttgggacgacggctgatctgccgcatggacaactccaacggtgatgggaagaacattgggcgtgccaatggatgacgaaaatggtgggatgaagcatcggaaggtgaggaggaggacgagccttaaattaatgactccaaatgacaatgataaaaggacagggtaattaaaatattattgattgaccaaaaattagactcctaatgacaatgaacaaagacaagcattaaattacagaaaattttgatcaaatttaagcacaaaatgccaacatcgaagaaaa

SEQ ID NO: 25263 - DNA, 1371 bp, Heterodera glycines
gggggggggagggtccgagcgggtcaagaaggtcctccttttccttctcctcccgctgcttttgctgctgcgactcgctttcgcttgcctgtccgtttgatccaccagagaattattttgcggcaaatgatccaaataatgttcagcagaaaagacgcggcacagaaaacaatggcagcgagacatgagccgagaaaaagagagccgggctcaagagcgtaccaagaggagaagtcgagacgaaaaaggagcacgtggaggaggggtggcacggtgccattggtgaagacaacgcaatggtacctgaaaagggagttaccaaatgaaaatgaaggaaagtatcgggaagaaagggaaagtgaaatatgcaagaggggagatccatttaaattggattttgtaacgagggagaagcaaagaaaatcgtttaaaatacgcaggaaggaatacttacaatagccgctgaaattttggacccattagcgtacattttgctccaatttacccaaaaagcagtgccattccaacctttccaccaacgctctcctcgcccttcgaattgccaatgttccgttgtccatcacttcgtagtcgccttccctggcccattttgtctgtgcagttttattacgcgcatcggaaaagccaataaacgtttggccgtatcctttgtaccaccattcgatgcgatcaaaatcaatctcatcagaagcattgagaaaacacggcaaaacggagtcatgcataagacggacagaaaaaatgtttgtggagagagggctcaaaacggaatgggcagaaagcgaagggaaaagcatcgaaacagagacgaagaaaaaagtgaagaaacatcgaacggacaaagaacgacggcgagtcattcactgctgcagaaattatacaaagaaaaaacaactgtatgaaaaagtgaggaaagaaaaatacgaagagaaaaataaacttaaaattcgaaaaaacgaaagaccataatccgtttacgtttatcaaatgaaataaagagaattcacaataaatcactctctctcaatgtcaggaatttcgtcggctttgaatgggcggtactctcgaattcgtggattgtaccgtttgatgtaaaaccaactgccagggtgcaatttgtacttcagccgaaacattgccaaatcgtcgtcccaatgtcggttgaatcgcttgtacccagcacggtcaaattccggtatagtccgatccgggaaaagtcccgaccaatgcgcttgcatcacacaccgctcaagtcgttgttgctggtcatggcaaagacctgtttttggtaaaatgcttgacaataaccaaaggaacagaaaatgccaatcatatatcggaacaagaaag

SEQ ID NO: 25264 - DNA, 2667 bp, Heterodera glycines
  unsure (1)..(2667): unsure at all n locations
attatgattacagcactgagatggtttcggaccaaaactatctcaattttgtttcattcgttatatgaaaatgtcgaaaaaatagtaattaatttaatattttaataacgtggttcactaatttttaagggtaaatgtgtaattattatagggaattttcatttggcgcttaaaaacttttatgtgctattttttacacaaattttaaataaaaatttgcccaatttaaaatggtgtgtgccaaaaaattaagcattgtaaacggattccaccaaataaggaagtaaagcaaaaattcttttttttttttggtctttggtggcggcattaaatggtaactcacacacattgaggcgcgtcaaatcaaatccaacaaaaagtttggccaattccctttaggctaatgtcattttaggcaattggccattttttgttcgagaaaacagtgccgtaaaacaaagaatgcatgaatggatggatgcttaatccacttttattggaatatttttattttatttaaattataaatttttaaaatattttattacaatttttcgtaatttcctaccataatattttgtaaaaacattaaatttattttttatttttttaattaaaaattggccgaatacacaatttttcacaagacaaatataaaattctgacaaaatttaattgtcgtcactcacattgacaatccgccaagtcattcattcatttctaatgaacattgagaataccatagcttaattattattattattatttattattattatatattaaggcaaatgcaaaaaggtaattaaatgccaaaattttcagaatgccaatcagactgacatttaaacaatgaatttaaattaatattttgaacactgatttggactaattttaaagtccggtcctttctctacccaagtccggcacatttttgggcttttccacccgaatgtgaatacaaaatgccaaccatcgccgttatcataaacctaaaaaaaagttttttcaaaattcaattacagtaaaatntaaaaaaagcaatttttttttgtttattgcattccatttttttaacaattacggtcttccgacaaatttttgtgccaacaaaaaagtctcgtctttgaattttggtatgccgacgacccttgtgccctccacaaaccaaccagccgcagtgaaatcgcaaacaaattctttattcaaattgttctcataaaacttttcttctcctcccccccccaacccattccaatgcgccaatttgccattctcgagtcaattacttctcgaaaaattcccaaggggttgttattttatcccttaaaggcaaatttttgcgtgggaaccatttggctcaaatgataaataaaattttgtgcagggcaatgtgaagcgcgttttgtgttcgttgctcagctgataaaatgtgaaatgtgtaccatacacatttttgtgaagttggaataaaaatttaaaattatttaaatttcttttttgaattggaaaaattttttaatttactttaatttctttttgtgaagaattggataaattaaattgttaagtttatttaaataaaaaaagaatttttacttttttttctttttattataaagtttaacaaactgaatcttttttaatatttaaaatgaataaaaaaaattttataatcacaattttttttacttttaattaggtttagggtgtgggtttttattgggaatagtttccatttttgaaaaattgaaaaaatttcaaattatatcacattattatgaaaaaaaaaaattagtcaatgaacaaaaattgtacaaaattttttttaaaaaacaaaaactctttcnatagcattgttatttgttggccaaagcttataaagtgcatcggaaattcatttttaaaaacaattggaccattaaaaattttagccacttaatgaatatgaattggtgggccttttcagcctcatttcatcgaaagtgctttttcactatttttttctcctctcatttttttccaaaaatttgtgagtctattgaaactgacaaaattcatttttcaatctggaaaaaaatttacaaatttttttttgtctgactaaaaaaaggaaaatttctcatactgaaaattatgataattagactaataaagtatctcttattttttcgaacgaatacaattaaagaaattaaaaaaaaaattttccttaaaactgcgtttcaattttactttacgccaaacattgtttttttttttgtttaccagcgttggatgccgtattattaacgctttcttgtcttaggcttttattgtttataatcaagcattgggttaggataatgaattaataatttggtttttttttgtctctgagaatgttacaatgaattcatctaaatcataatgaaatgaaaaataattttctaaaccaaaatatatttttaatttattgtttttaatgaaatttggcaacaatttaaatatataataaatattctctatttcaaaaaaaattttaaattttcataaagctattataaaaattacttttccattaaaatttttctaagctattaattatgttctaagaataaataaattttctctgtcttgatcaagggaggtttttttgaatttttggcactttatgcattacgcaac

SEQ ID NO: 25265 - DNA, 1185 bp, Heterodera glycines
caaaatgggaaaatgattaaattttccaattcaattccaattgcttcccgttttcgggattggtcccaatgttggcattttcaccgttggtctcattgtcggcattcccctccaatccgttgttctgtgccgtcgccgccttagatcaaaatgggaaaatgattaaaatttaaaaatttaattacaattgcttaccgtttcggcatttgtcccattgttggcattggcaccgccgtcgctcatccccgctgctgccttaaatcaaaggggaaaattaatcaaaatttagaaattaatcacaattacttaccccttgacaattggtttcattgttggcattggcatcgccgtcgctcaccgccgctgccgccttaaatcaaaatggaaaaattttttaaattattaaatttcaattataatacctcacctcatcaccattaatcccattgttggcattggcgttggcactgatgttgatcacattgtccaattcctcaaaaaaaaaaaatttaattttgaatttaaaaaaatttcaaaaaaaaacccacttcgttggctgttcgatcagcttcattcatttcaacattgcctttcagcttgaacaccttaaatgtgagcgggaaattattaaaaatttaaaaaaaaagaagaaaaaatacccttcgtttttgtcctcgtcgagcatttactgccgctgttgtttctgtgcctcccggtgtataaaactgtaaaaaagcgaaattgaaagaaattttgaactaaaaaaaaaagttacattttttacaaggtggatggccacccgcgcagccattcttttttgatggcaaggcgcgccaccagtacgcctcgcaaagtttggcatgtcaaaaaaaaaataacacaatttagagaaaaaaaagttaagcaattgatgggggggggaggaaagtttgcattaaacggcaaatgcagaaggaatgtggtgcccgttgacccttgcaatgaaaacagtgcaagggaagggcttgggaatggattgacatatcgacccactcctccccaattttctctgcctgtctgctgtctcatctcttcccctccctttcgcactctccatctctctccctctcacactctctcttatttccactgcctctccctctctctcatttgttctctctctctcatatattctctctctctctc

SEQ ID NO: 25266 - DNA, 1387 bp, Heterodera glycines
aattttgtctgtcaaaattgcgatttcacgtgaattgttcaattgaggaaagaatgaatgtgagtaaattattatacataaaattgttaaaatgtgcggacagacaaaacataaacaaaacgaatattttttattgggaaggaaagggatttttttgggatttgccgagagaatcggacgaatggacgacaaaatggcacaatttgtccaattgcaggaaaaagacggagacggaacagaaggaaggacaaccacggaaggggacggcaccaccagcagaagcaaaaagtgagggactaatggggggggggtacggtaattagtattacggtatttgtcaatgactgaccggtcatctgctgtaagaaggaaatcaagcaaatcattaaaagtcctaaaactgaagccaaattcccataaatttttaaaattcggctaaaaaagtgtcattgatcattttattgacacttaaactaaattttaagaattttttcctacggcgcctatcggcaccgtcgtatattgaatttttaaaaattgaaaaaggtaaaaatttgaattaacatttttgttataaggttgaaaaaagcgagcccaactttaagcagtcggttggctttgtcttcgccttatgctgccagtgccaagtgcgaagtgccgacgaccattggcactttttcatttcaacattttggacattttttcgtgccctgttcagaaatgacagacaaaaagaaacaaccgcaaaacggtaactgaaggaaaaagctgaaaggcataacaaatgcataataatcagaagcaattggtcgtagtgaaagtgcaaagtcgcggacgacgttcaaacgacgtcaacgccaaatggcgtcaagttcatcgattgtgtttgatcaggcaggaaaacaaacataaccattgaaattggaaaattttgggtgatttgactatggcaaatgccaataagcaaagattcactaatgacatttggcatttgcctaacaaatgtctttcagcatccaagtcgaattcaaatcactcacaagaatttcatgtccattgtggacttcagcccgacaacaccatcaaaatgtgccaaattcccgaacaacacacatttaatcgaggatcgtccgccgaagtcggccaactgctgattaacatttaagctctaaaatgctttaaggtatacgactgtcctcggcacaaaagtgccggtcatttcaccgctcctttgctctcgacaacgttatgatcaaaaaatggccaaaagcagcacggaattggtgttgaaaacagccgatgaaggcgaaaatcgcgaggcggaaggaacggagcgggagacatggggtaaaaggagagaatgagagggggaagagagagaatgcct

SEQ ID NO: 25267 - DNA, 1669 bp, Heterodera glycines
  unsure (1)..(1669): unsure at all n locations
aataatatttttaaattatccaattaggcatatttcccaacaagctctgttggntggttantggtgtgggaagaacctctaagagggnggngntgaagaaaaggggnaatggggngaagaggagatttggatgatattagtagnattagtgtattaganaanatattnttatgatattaatganattnggaagttttgaatgggttngataattaatttttattggatatggagaaattagggtgaaagtgatagaatgagaggagagtttgaagtgnattgataatgaatttagttaatgtgtttggagtagttgaaagaaatggggggttgagaggtggaatggttagggagtggtgagtgatttggtgtttatggaataaaaataggtgaagttgaaaggttaagagaagaattgttgggaatgatttgtagagagatgttgagataaggtgtgatattgtgaaggagtgaatggttggagttgaggtgttcgggcgtggcggcggggtcgaattcgggaaggatcagacggcacggcctaagagacagaagaaaaagattgcaaaagcaaacaatgagaagaaagccccgtaaagccaaagcaattctcaaccttttggcattttttgaattaaattcttcaacatgcaataaagaatgattttttattgatgcgatcacatctttttgccgactttaaaattttaaaaatttatgcatttaagttttttttcttaaatcaaaatttttgattttttataatttaattaattttggaaaatttttcatttttcttaaatattttgctcagtatttcggacttttttcaatattttttaaataaaataatttccatccctattgatcagcccatttcagtaaagcattacagcgcgagaggggtaatcgaatgttggtagacgagcgcagccaaagtgccgaagacgggttcgttggagcagcccttcagccgaacgcccttcggcgacggttcgatcagaaagtgccgcaccaactcattgccatccgctgaatggtgtaaaaatgattgacatcctctcaccagtgattagtcagtacaacctgaagatggaacccccgccggcggttgtgccactttcagcgccaaaccgaaggcgccggggaaggaattgctgtcgcggacaatgaaagtgcccgggggtttgtccttcagcatagcgattgcttaagggatgatcctttgaccaaaaccgatcaatcactgatcggtaatagccactgatcagaaaaaggactctcaccttcctccctactgatggtcggcttgtaccaatagcgggaggtgtctttgacaaacaccggatgatgatggatcacatcggaactgtctgaaaggcatttccgatcagaaaatgtgcttttccttttgtttgatgcctcgagcactttggcatttctcttttcaaattcctttggcatttttttgttgcaatttttgaccttttccatccgtctccatcacaacgttaagtcgttttatccgactcagtgttttcggggaaagtctccactcgtcgtcctccgccggtggctcaagcccaaagggcgagtggggacccggcgatcgggcgatcagtgaagctgatgctgtgccgttttggagatgaggggacggtgagtaatg

SEQ ID NO: 25268 - DNA, 1275 bp, Heterodera glycines
aaaaaaaaattccgttttttcggctggatttattaagggaaaaatttttgaattttttttgcacatgtccccaaaaatgtccatctcgtcaaaaaataattttttattgcattttttgttacagaatttcttaattttacatgaaaaattccatatatttaccaatggaatctttttgctgcgtttgtaaagcaatttatgagaggaagccacacctgttccgtcacctatcgacaccgccggaccccattgaaccatttttttttaatttgaccccaaaatggcaaaaatcttgtcattttttgcgcaagaccggtacaaattcctagcttttcccggttttggtttatttggaggatcaagattatcataaacgatttaaataaatttgtaatgctaattgtaagcatatgaccagggcccggatttttaggttttcacctatttttttttacggatagcatatggtgagataaacgcaaaaaacacattttcttcgatcaattttcgatttcgggtgactttttagcaactatttaggtacctatttcggggtttttagcgcctaaaaatccgggccctgcaatgaccattcaaatacatcgataaaatagaatcactgacaaatgagtgatttttctgtattttttcatgtttaataaacatttaaacaagtttcaatttagaattaaataatttttgttaaaattttaaaaaattttagaaatggagactgggggattatttttcaacctcctcagaaaggggggggggggataattggagactgcgggattaatagagactgggcgataattagagaatatacggtatataagagagagtgttctaatcaggagagagtgctagagaaaaattggcgtactatttttcttggcaatgtgtactaaaatttgaaaaacttttcgaatgataccaatttttgattgtgggagccaaggctccaaaatttcctgaatttcaaattccggtctctagaaaagaatatgtgccaaaaatagttcatttttcatttttgaaagggaccttttttaaattatttctaaatatttatgaaattggaatatcattttttttaaatttgtgatatactaaaattccaatgaacccaaataatttcttttttttgtcagaaacagtccccccccccccacccctccctaaatcggtgtgacgacgtttccttccttccttatctttccaatcaagtggcggggtgaattgtgatgatgatgatttgatgggggggggggg

SEQ ID NO: 25269 - DNA, 420 bp, Heterodera glycines
ttttctttgtcaactaaatctaacattgttggtatcattcgaaagcccttcgggtgctctattagtctgcaaaattccaaaaaatttcgttaagttttaaaaaaggttcgagccaaaaaagttgtaaaatctgattgtatgaattcttctggccataacttttttgaaccttagcgagatttttcgaaattttgcaggctaatagagaacatttggtaatagtgcagtttgtccccccccccctttttcgaaaaattttttatgttttcaaaagtcataaaaacactttttatggggttttcggggtcgctgatcatgaattcggcacccatttcgaccaatttcggtccccggacccgaattcgaacaaaaagtcgaaaattcaaatttttcgattttctatttttagtctaaaaatgg

SEQ ID NO: 25270 - DNA, 941 bp, Heterodera glycines
gggaccaaaaatccaacccgggaattaaagtccaggctaaggggaaccttttcccgaaagaattgggtctccccataaatttggggccattggttggggggggctcccccgaaaacaaaaaaattcatttttttaaagggccctttgggggtccccaaccatttagggggcccaaaatcggccaccccgaaataaaagtctcaggttataggaaagctattccgaaggatttggtttcccccataatttggggcgcatcggtttgggggggcttcccccgaaaacaaaaaaatcgattttttcaagtgtccgtttggggtactcaaacaattatggggagcaaaaatccaacgcagaattaaagtacaggctatagggaagctattcccgaaggattcggtctccccataaatctgggcgcatcggttcggggggactgccccgaaaacaaaaaaatcgattttttcaagtgtccgtttggggtactcaaacaattatggggagcaaaaatccaacgcagaattaaagtacaggctatagggaagctattcccgaaggattcggtctccccataaatctgggcgcatcggttcggggggactgccccgaaaacaaaaaaatcgattttttcaagtgtccgtttggggtactcaaacaattatggggagcaaaaatccaacgcagaattaaagtacaggctatagggaagctattcccgaaggattcggtctccccataaatctgggcgcatcggttcggggggactgccccgaaaacaaaaaaatcgattttttcaagtgtccgtttggggtactcaaacatttatggggagcaaaaatccaacgcagaattaaagtacagactatagggaagctattcccgaaggattcggtctccccataaatctgggcgcatcggttcagggggactgccccgaaaac

SEQ ID NO: 25271 - DNA, 1677 bp, Heterodera glycines
aaaaatttttgcttataatacatttagttggtcaaaccaccaatccaattaatttttttaatttttcctggttttggtataattttctggttttttttatttctggttttttattatttctggttttttttaaaagatgctcaatcgagccaatgatcaattccttttgtggtaagtcaaaatgacagaacccccccccccctatcaacgtaaattaataattacttgacaatttttaaaattcaaatttaagtttcatattaaaaattaaagatgaagaggaataccaaagaaataaaatgagaccacatgaaattgaccagacacgtccagtagctgaagtaccccgcaccaaaaaatatttggaaaatgatcgagccatcaaaaatctgattgaacaatttgatcagcttggtcctgatcagcgtgatgatcaaagatggattacacatttacacgcactgtcatttcgacttaccacaaaaggaattcaaatgcatttatcggctggccacctgctaggctaatcaattttcaatgatttgttttcgcctcatttctcattaaatcaattgaaatcctaggaattcctacggaaattctttattaatcatccttacaattagaaaagcgaatgccaacattgacagaaacagacaaagtgaattaattctcaaattgataaatctttagggtttggaatttccccgagccgttaattggttttttagagaatgtcgcgcaaaaaacgattttctatttggcctttgaaaatacggtgtgctccgaatatgtgacggagaaattttggaacgctttgcgcagtttgacagtgccggttgtgctgtgtagggaagtggtgcgcgagtcgggcattccggacgatttgtacatcgcagcggacgattttgacaattaaatataattttccacgttttgccatgacaccgtcgaccaaaaagtgttggttgaactgttccttatttacaattcccacttctttctgtagcattttgacaattttttttgtcattgtcaactttggcactgccgaattaatgaattttaggcgccaactttaactgtttggcaattaaattttgctatttttgaattttgtttttaaccaaagcattagaatggagaaattatttgatcgtttatggcgagttttttccggcgcaagtggaacttaatggtttttttaaattaaaaattcgattgactttttttaaactaaatttctacaagcggaggtggagaaagaaattataatatctttttttctttttcaaatcaattttttgccgaagaccattagagagttgtgattttttcatttgaataaaaggctcttaattgacttaaattaataatgtgaatttatttaagaaaaaaaacataatatagattcatatttggaagataataccggaaaaatgaaattattgttattattctttttgattttaattctaattgccctaattagtcctattggatcaaaagaaaaaaaactacaagaaaaatcattcgatgaaatatttggagaaaaatgggaagaaaaagaagaaaagcgcaaaatgaacagaagaaacgggaataataagaaatatataaaataaagaaaaaataaaggaaaaggaagaaatattcacaaaaaaatgggataaaatt

SEQ ID NO: 25272 - DNA, 982 bp, Heterodera glycines
gtatttttccggcttccatccctttccccttttctacacaataattcgttccgcttctttctctttctcattatttttttgccttttttcactttgtccctccgttttcctctttcgcttttcctcctttctctcctctctcttttccttttcctccttttttttttcatttttgccttttttctttgacattattttttttttcttcattaaatattccatttatttcttcgaaagtttgatcgctttctgtagacgatcctcctcctcctccttttcctctttctttccttttctctttttctcctcctccttcctcctcttcctttcctacgccttttccgacttctttttcttcctttttctcttttcctttttctccttcttcctcctcctctttttcttcctcttcttctgatgttgatgagtcacttttcaaattttcacttgccgaaaaatattcattctgaaagagaaaatgtgcgaattttctgtaattctttttactaattccaaaaatgacctcgtaattgagcagttcttttatctttctaatgccatcagtatccaacaattctccaaggaatcgttctgaattaatttccatttaaattattaattagggcaaatattccccgaatttccccccccccttaaattatgtttttcaattcgctggtttgcccttacttcgttttttcaaaaattccccgaatttctccctctccctctcctccccctccgcttcttcctccaatattttggccattctttccgccctcaatttggccacaatttcgtcccttcggttcgcatttcgcagctgtttccccacacaaattatcattttgatttgctccgtttgcgttaattcgtccattctctgcccattttttaaacttttacaaaattcgttaaatgccatcggaacgcaaatggccaaagcgcgcagaagggaagtgtcgtcggggccattctccca

SEQ ID NO: 25273 - DNA, 1136 bp, Heterodera glycines
aaaacgtctgtactaaactgacccggtccggtcacatcatgctggactagccattaggccatttgcacacttgggcagtgttacttttaaagaatatattaattattaatgaaattttttaaaaataatcagcgatctttgctggtttaattttagttgtttttttagttatttttttatttgttattttataatattaatttattgttattttgaatctgtgcttattattcttaattttatgtgattttagattatgtaaatttttgagtttatttgattctatcatttataagcaaatcagcagagattattacattttaatttggccctttttaatatttatttggttaattattaaactcttttgaaattttttgctgtcaaccatcattaggcctacttcaggtgtttaatttgtctatcgaaaacccaaataaactattgttagggttagcatgccgggtcgtcattaatttctttttttccaaataggtagtttaaaaacaaaaatttctccaaaataaatgtaaataagttgtttaatttttaaaattttttattagcactttatttttatgttttaattattaattaattttccttaatctattactataaaacttttgttctgcatttcttttgcatttatttcatacatattgaattcacgcaaaaaatttgttagacccattttcgtcgaattttgtaatttgattccaaacaatacatttatttatcttattaacatttatttgtcttctaaatccaactgtctctttgattttctatgtacatttttgttttttattattcataaatgtctgaaaaactaaatatcaaaatcttaaattaagcaacgaaaccctatatataattttatttttatatatatgaagcttagtaagttttatttaatgttgtaatttcactaagctataatttttttgtgtttgagtttatggtttagtcccttgagttgggctactacttttttcgccttaaatagttttggtttgaaataatttgttctttgaggtttatctttgttaatgaagtttttgatttttaatattagcggtttgtgacgaaaaataaaaaagttatggggcctcaaaaatagaaatttagaccaa

SEQ ID NO: 25274 - DNA, 1323 bp, Heterodera glycines
ttttcatttgttctcagcacataattagggggaatgcggtggggtcggactgcttcttctgctgctcactttggtgccatttgcacatggaatggccaagggttgtcgattcacggcccaccccctccccccctttcattacaacccaaaatgtttgttgattaaaccgggctggatttctaatcagaaattccaatccaaccaattttcaatgattttgttgtaatctcctatttcccaccatttccaattcgtcgtcgttgtcttttgtggcactgtcagcgctccgttcggattccgtccgttcgttttgttgcgtttgttttttggcgttcagtacggagacgcgcgttgaacggcgcaacggacaattcggagacaattgctgctgctgctgctgctccgttaagtcactgtcgtcgtttgactgttgttggcttctcagacttttgtcctctgtcgtttttgttggcttttcgatgggattacggtcggaatagtcaatgctcgttgcggaggacactttctggattatgcagaattattttaaactatttaaaaattcaaattagttaacgaaccagtgcccgtagggcactgaaagtaattgattttaatttatttttttaaaattgaaatagcttcgctatttaacactgtctctagagggcgctacgcgccaaaaaacttttatatgtaagaaggcaaccgatttttttaatggccgggaattcagttaactttttcttaaaattcaaatttttaatacgatcacttaaaatctcttacttttcctctttctcatcccctttctccctcctttctaccttcccatttcacttcatcactctcgctttctcttcctctcttctttttttgttccttcctcattccctttgttgctttttctcttcctctttatctttctcttccactttctgttcctcatccactttctcttccgctttctgttcctcttccactttctgttcctcttccactttctgttcctcttccactttctcttccactttctgttcctcatccactttctcttccgctttctgttcctcttccactttctgttcctcttccactttctgttcctcttccactttctcttccactttctgtttcttccactttctcttccactttctgttcctcttcttctcttccgctttctgttcctcttccactttctcttccacttccacttcctctttatctttctcttccactttctgttcctcatccactttctcttccgctttctgttcctcttccactttctcttccactttctgttcctcttccactttc

SEQ ID NO: 25275 - DNA, 1589 bp, Heterodera glycines
aatttaaatagaaatggagagagtgataaatagaattgagacccgagtattgaagcctagagaaatagaattatatagtaaggttcctccccaaccccattagtgaatttgagaattttgtcaagagcttttcataatcggttgagttgatccacatctttttccccctacagttggggaagtaagcccaattagtactgataccaagagtatagaaaattttggaaattcctgacacgagaatagcgatttaattaaaaattttattttggaccaaaaaataaccaaaataaaagatcgatgataattttcaaaaacaaaatctgaatctgtgaccgagaatgataaatgccaaaagcaacaaaactcaagactgagaatgtgataaatgcccaaaaaacaagagacccagaaaagtcaagactctcctccgtacttgactattaattgccgagaattggcctcatcaatttcggtcacagtgtcaagcatatttttgagaaaacttcgcagtttttcaattaatgtcgtagcaattggctgatcatttccgaccacagcaccgatcagcaacagttgggtgatcagaaacaaaaataaaggagttgcaagcatcttttttttatattgaatttggggacaaaaaaaaataaataaataattattttggtgcctgaaaaagttatgaaatttttacaagatttttaactgcttaaaaagaagaattttgtaggatttagatctcataaaaagtataaattcattaataataattaacacatacaattttataaaattatatacaaaacactttatgacgaaacactgaattactatcggaaatgagtcattaaaatatatttttaaaaatatatattggatcaataactgagaaatagaaacttttattacatttataactagggcttatatttttagatgctaaaaactggcgaaaaaaatttaaaaaataaaaattcaaaaaaaaaaaaccaagttcgtttttaggttctaaaaaaccccaaaatagtttctaaaaacgagaaaataagtgctaaaaagtttcaaattttggggtgtaaaaggaaacaaaatttcattcaaaaaatcaacaaaattatgccaaataaatcttattgagatttatatataatttaaaaaagaaaaaatccttgtcaagaaaataaatttatgtagatttttgagagaatttttcatatgcatttaaggtacatgccataggaagctcaggaaaaaaactaggtgaaaatttaaaaccataagcactatttataactgcgaaaaataaacatttttttagggtttaaacaacaaataaaaaaaacagaaatttattactaataattaacacattcaattttattgaattatatatatacaaatcgcttctgacgacagtgaattatgaccggaaatgagtaatttataaacaaataacatttccggctaaaaaatcggtaacaattttttgtcaatctattcaacttattattaacgaattattttttaatgaatttagccaattaaatgtattgattaattcgatttatgatatttattcgctatta

SEQ ID NO: 25276 - DNA, 1643 bp, Heterodera glycines
  unsure (1)..(1643): unsure at all n locations
tgttgtcgactgcatatngtgtaatgccgcccttgttctaccagcctctcacacattgtaagcgcactatcccaacggacacataccatctgaatgacaatagatataaataaagtgtgttttgttttagctttaacctgcaaaagagtatgagaaggggcatcgagtaatttttgaatttttttcaattcgctgaaggctgtgttgctgtgtttgaaacgcccaacaatatgacgagttttggccaataaactgctgattgattcatctctcttcaatgcctcctgtatagccaaattcaataaatgagcagcgcaaggtccgttcggcattggcaaaatgcgattttcgttttcatccctctcgacgaaagcctgcaaataaaaacaaatgaaaagaaaaataaataaatttatcacccttttcatatttgctgccgaatctgacatgattatatgaacacattccttaggaatgccccatttgatcaataaatcctcgattttgaggcgatatttttccctgtgtgtgattccgaaaattccgtgattgccaaaatacgtgataacgacttccattttgaaattgagtgcgcggttaagctgtaattaaaccagtcataattaaaaaaaaaaacataaattgtaccacaaaaggtgcaagtgcttcgctnccacaaatcagtcgtcagagtaataaatgcgcattctnntnaatcatctctgattttcttggtgactcgtgataacaaaatnggcaaggcaatttttcttagaaaatntaaaaaaattatatcttggtttatgaaaattacctataaaaactttcactcttgactttttgatggggaaacaaagaatgaaatgtttggtcatccacagcgccgaaggaaatgttttttgtcaccaaaaaatgaagaatcttcttatccaacgaggagagttgtgctaaaacaaaaattaaatatttaaagaaaatgattgaattacagtctgaaagagtcggtccggtggatgactgaaagtctgagattgttttctgtttttgtttgtcctttttggctttcgattcaagagcattcagcttttcagtgaattcggagttttcatgaatggcgtcaagatggactttcagacttttaactgatcctttggtaagcgtgtattcgaatttaggcttttcatttgcttgacactcgagacaaattgctgtagtcttggacgtttttttaaataaaccaatttgccatatgagactcatatttataaagctaaaccaaaaagacataaaatatcaagtaaaaagttttagattataaaacgttgaattaaattcaacctgaaaaattaccaaaatgattaaaaagttaaagacattatgccaaatagatatttttcaaagaaaaacgaacaaaagtgaaggttttttggttgagaccgagccggaccggatccggttaaaaattcgccggaccggaccggattggcattttaaaaaatgacctgattccggatccggtctctcataatccggtcaatctatgtaatccggtgaatccctatttttccaaaaaagcgccggaccggattccggatccaggaaaatccggtaccggatccggtccggtccgctctctagtttag

SEQ ID NO: 25277 - DNA, 1120 bp, Heterodera glycines
taattaatgattttttcaaaaattaatttactgacttcaaattatcaggcacaatcgctttctatcacatatatatatataaggcttgttcaaccgatcgggaattgaaaaaaacttaattttgaatccgattttggacaaaggcgcaaatgtcgggacacggagaaacccatgtactttttgatcagcttttgttcagctcatggtcattctgacaatcattgtgtactctctgatgactccgttcgggtctttggtcggcgttctcgtcacggtgagtcataaatcataatcaacggtcatcgattgatcaaatctcaaattattgaaaaactgatcactgtagcttgtaaaccagggatcgtatttttatttttggtttggcacctaaccttttagcacctaacaaaaaaaatgcaaacatttttaaacggcggctcctaaaggcacagccgaagccgaaaataaaccaaatttataaaaattttaaacatattttgcgatttaaacgcctaaaatcaaaaaaaaaattaggtaatcttgtttcggttttcagccaaatgtgtctattttggattgattctggttcctaattgaatcaaaattttaaaaaaaccaaaaatttgttaagaaatacgcaaaaaattttttaaaaagatttttaagctaataagaaaatttttttgaaaaaagtctcggggttttgggtctcggtctcgagaaatttttggtctcggatagcactagcagtaatcccaaattgtccaaacagaacatggaaattgatgagctgttgaaggatgccatttcggtggtgctcgaggcattggccggcggcacattcatttacgtcacctttttcgaagtgcttgcgcaggaaagggtgagcaaaagagcagaaaacaaattaacacacaaatccgcgagaagcgaaaattgggcaaatttccaaatttgccacctcatttgtcagactaattaaactcggtgctaattatgaaacttaattttggaatatgaaatgtggcaaaaatattacaggccaaccatcactcaaatctggtccaattgagcgccattgtgctcggcttccttgtgatctgcgcactccaagttaatg

SEQ ID NO: 25278 - DNA, 1143 bp, Heterodera glycines
agcggattttggtataaaaaagtgaaatattttaatatttattttttctttattcagttggtgcatcttcggattcgctgttaaacagcagacaaaattggatgtagacattcatcttgaaaagggcacttatgcatatgccaattatggctatttatgtatcaacggaaaaggaaagggaacaaatgcccaatattcctacggtgttggcgataccgtaggaattggcgtcaattcggctactcgacagatcattttcacaaaaaatggacttcgtttgggttagcaaataataaataatataattttacgattttaaattacaatttggttaattgtctattttatctaatttattttatgtttaaaataatcaaaaatcccttaaccttttcacagatacctctgattttttcgttgatccatcttttgttgatggttctttttatccattcgtttctttgttttattctggtgacaaaattgaggcgaattttgggcccaatttcaaattcgatttggcgactctctgaaggaagaattaacaattaattcactaatgttttcgatcaatttgctcgtttttatcatttttatgtttttcttcttcaattaaaatttggttttttgcattaatcggaaaattttgtcgtttcccgggtatttaagactaaaaagatgaaaatttgcaaaaaaatagggtttttttccaattatatgctaaaattcatattaaatatctgctcatatgctatgaagaaatgggctcaaaaaagcatttctacgttaaaattttgatttgatgaggttttttagtccatataaatccatatttagcgtttttagtttatatttcggccatttttaggaaagtttcacaaaattcaaatgcatcgctaagattaaaattcgcaaaacaaatcgtccttccagtgttttgacttgaaaagtgatgatgcaaaaagtgccgatgccgtcgctcggatggcatttcgaattccgtcgcctttcgccgtcgccgcgttgcaaaagtcgccgaagcaccagcaggtggactcctcgacggagctgaactggtccagacagaccaacgcgcgttgcgtgtgtttgcattcggtgttgattttcaatttccagacagag

SEQ ID NO: 25279 - DNA, 1322 bp, Heterodera glycines
  unsure (1)..(1322): unsure at all n locations
ggctcgattgggtctggggggaccantcggcgccacaccattggttcgatcggctatcgtgatcagcatcgccgtggttcgggctcgattggtctgggtgaccatcgtcgccatacgttcggaggaagagcccaccgagatcgccaccacccgtacagcagtggagacaaccgcgtcttctggccgaaccgtggatcgtcgtcgagaatcaccacaattacaacgttatagttctactcgaatcaccacaactttcgatcgaacggcagggacgccttttttgttgtgatggggatgtaatgatcagttgacttttgaccatttgctattattttaaattatatttgtttggcattttatttatgattttttttgttattttgttttgtgtaatttttttagttcgttgttctatgtaatttggagaataattggatatgtgctgtgctgtgccgatttgagttttaatattaatttgacggagttggataatttgtgaacaataatcattggtcaaagccctaaacaattgtccccacccttccgacctaattaaaagactgtccccgtgtgtccctccttgcctaattaattaaaagcaactaaaagcagcggaaaaaagtgactattatactaaataaaattgcaattcataatgagtttcaaaaaatccagcccatttactattaaaaaacaaaaagaaaatacaaataaatgaaaataaatgaaataattcaacgtaatgaaaagccaggaaaacatgagacgaataattaaataatgaaagcataaggaatgggaaacaaagtaattaagagagtaactttatagttactcaataactttgatgaattttatatgattaacgtcatcaaaccattactaagtgacaaattaccccaatctttcaaaacattcataagaagtgaaatatttgttgaagtttttggcataatgcttttgcttttcctccgatgccaaacattttaacactttaaaagtttgaatggagttgcaaatgtgctccaatttttccatgtcaacatcagatccgataatgctaaaattggagattttattaataaattagagagacttttttaaatatatataaaaatcgaacaattaaataaacaagccataaaaattcataaaattcactaataattcatgaaaattgaataaataatttaatttacatttttttgaccctttgaaattctttgggaaaatttctttgtcaatttggcaaaaagtttttttgcttnttgcattttcattttctgcttggaaagctttgtcaaaacgaatttcattattgt

SEQ ID NO: 25280 - DNA, 1146 bp, Heterodera glycines
aaattaaatggcgattgcgcccccccttccctttccacgctggagcgcttttgtacgtattaaatttttccaaaataagagatagtcatttttcttggatattaagaaaaaattaaaaatttctctggaaaattaaaagggcgattgcgcaccgcacttcctatcatgctcgagagcatttgtacgtataaaatttctcaaaataagagatagtcatttttcttggatataagataaatttaaaaattctctgagaaattaaatggcgattgcgcaccgccctccctatcacgctcgagagcatttgtaacgtataaaatttctcaaaataagagatagtcatttttcttggatataagataaatttaaaaattctctgagaaattaaatggcgattgcgcaccgccctccctctcacgctcgagcgcttttgtaacgtataaaatttctcaaaataagagatagtcatttttcttggatataagataaatttaaaaattctctgtgaaattaaatggcgattgcgcaccgcacttcctatcatgctcgagagcatttgtaacgtataaaatttctcaaaataagagatagtcatttttcttggatataagataaatttaaaaattctctgagaaattaaatggcgattgcgcaccgccctccctctcacgctcgagcgcttttgtaacgtataaaatttctcaaaataagagatagtcatttttcttggatataagataaatttaaaaattctctgtgaaattaaatggcgattgcgcaccgcacttcctatcatgctcgagagcatttgtaacgtataaaatttctcaaaataagagatagtcatttttcttggatataagataaatttaaaaattctctgtgaaattaaatggcgattgcgcaccgcactccctatcatgctcgagagcatttgtaacgtataaaatttctcaaaataaaaaatagtcatttttcttggatataagataaatttaaaaattctctgagaaattaaatggcgattgcgcaccgccccccctctcatgctcgagcgcttttgtaacgtataaaatttctcaaaataagagatagtcatttttcttggatatacgataaaattaaaaaattctctgtgaaataaaa

SEQ ID NO: 25281 - DNA, 1376 bp, Heterodera glycines
  unsure (1)..(1376): unsure at all n locations
gttggcattttcgagtctgacaataagctaagccccccccctttcttcccatggaccgagatcaaatgcatttccggtcaaaaacaaaatgttcaccatttgcactgcggacaaaagcaaaatcaaattcaaggcacaggacatgtcaatcaatcaggcactgattcataaattattttaaatttttaagctattataaatgggggaggctgtggcatgacgcccggctgtgctttgattcgattttcacgaaaatggaactgaattttgcaattcccaaataacccgggacattaattatgcctttgttcaatttcaaatttaaataattttttattaatttggaacaatttccggggaccggtaaattggactctcgaaaaatccccgcgctggatccctcccgttccgggaaatctgttgttttaattttttttttttctgatattttccaattaaatattcaccggttatgtcccagtcaccgtcttccatgtcatcgtcctcatcttctgcagagtcttcgcactccgcagggaacaaagggggacaacccaatgtttgtgctttggttgcaaagacggggtttcaaaaaacgggggttaattcgcccagtttttcatttgtttgtgaattagtttaaattcccaagcttcagcatgtcgaaagccatggtgaccacgtgggcaaaatgcttggcaatgtgtccgacgattctgaggagggcgaggaggaagaagcagcacaacaacaacacgcggaagtagcggtggcggcgatggacgacgcctcttccgactcaccggcgacctcatcagacgaagaaatgccaatggaacagcgccagcaaaagcaaagggacgcggaggggacggaagtgcgtggagaggtggaaatgcattggcattccccaaattattatttttttgcccaaatttgttactggacccctttgaatttttgccgccgattcccttgcaaaaatttctgtcgtcctcgtcccccgcccttttttaagtgtggttttggatttgatttaaatattttgcgtcgattaagggcaacactgaagaggcggaggaggacgacgaaggacaaattggacgtcgaaaagcccaactgcagcgaaatgagcaggatgaggaagaagacgacatggacgaaatgtttgctcgggacgacgacgtcgaaatgcatggaattgaaggggaagaagaggaaggggcacagtcgacgagtcaaagggacgcggagggcgaggaggaacggcagatggacaccacgctgggcgaaggtcgcatttttttttgggtggattttgatcgaaaatgggagtttttcaggggatggacccccgnaaaaccgcanaattttat

SEQ ID NO: 25282 - DNA, 1029 bp, Heterodera glycines
taaatgttcggtgttcttaagaagacgggttttgtcgcttttaggtggaggcgggatttttcgtttttggctgagacgggattttgtctgggcgggattttgtcgtttttaggtggaggcgggattttgtcgtttttggctgaggcgggattttgtccgcgcgcccgcgccgctctggcgctatgtaatttcgacactgagtattttcgacactaagtaatttcgcactacgggaatgccggagatttgagtcccagtgtttggaatgccgaagaattgagtcccaaagattgaattgcttgtgggttgagtcccagagattggagaaaaagccaagaaaatgatgcgaggccgcgaagcggccgagccagtcgattttatcattcataattctataacacaatcgtactgcctagcgggggatgcgccgaaggcgctgaccccgctagtacaccccaataatcggtccgaaaattttcaaaaataaacgggactaacgggactaaatttcaccactgaaactgccccaaatttaaattcgacactgagtattttcgacactaagtaatttcgacactacgttttcgacatagagaaatttcgacactgaactatttcaaaaactttcactgttttccagcattttcgacactggaccatttcgacagtgagtaaattcgacactattgagaattttttaaaattaataagaaattttggtgttagtattaggtatgataaattttcctatttcattttctaattcgtactttttaaaaggttaggttggtataactgagtaaaacgtcaaacccagtgtcagtgttagacaatgactcataatgccaaatagcgatattttggggcgataattcaaaaaaacctgatcagtcagtgatcactgatcattgcaattttttgcattggttgttctgatcatccgaacttggtttagtctccaactaataataataaaattttaatgacccattattactttttcgttactctaaggaaaaatttttaaaa

SEQ ID NO: 25283 - DNA, 1062 bp, Heterodera glycines
  unsure (1)..(1062): unsure at all n locations
tgcagtttttcgggtgccaaaattttggaattttcattcggcgcgtcataagcggatggtttggtggcaaatacaaacaaattttgtgtaattcgaatgcgctatgcgggctcaacatttccaaatgtatcaacaaagggtctatctccactctctggcaaggtatggccagccaaagcagagtggggcataaacaagaattttttaatctttggtatttcctctattttgtgcctgctctacatttatgtcttgtgccaatatgcctattgcaacagaaatttattcagctttcccgataaattgttgagataattattctagacgatttttttatatctcaatgcttaactatcgcctttttgtttggcaactggtagaaattggcagtgaaaaaaagtttgtttgtaactatttacaataaaaatttatgtagcatttctaaaaaggatgtaaaaataagttcttgcgtaatatttttatattgtgtgttgaagaatttgagtctgcttctgatgcaagtggaaaatttttcagcttttctcgaaaagttttttcccagaaaaaggatgggacaaataaaaaactaaacatctctcatgaccaatttaaatttccttacattttgggtttactttattatgctggcccatgaaaaaatgcagtttttccggtgccaaatttttgtgaattttcattcggcgcgtcataagcggattgtttggtggcaaatgcaaacaaattttgtgttattcgaatgcgctaggcgggctcgacatttccaaatgtatcaacaaagggtctatctccactctctggcaaggtatggccagccaaagcagagtggggcataaacaagaattttttaatctttggtatttcctctattttgtgcctgctctacatttatgtcttgtgccaatatgcctattgcaacagaaatttattcagctttcccgacaaattgttgagataattattctagacgatttttttatatctcaatgcttaactatcgcctttttgtttggcaactgngtagaaattggcccagtgaaaaaa

SEQ ID NO: 25284 - DNA, 544 bp, Heterodera glycines
agtgctctatttccttctatatttttttcacttgttcccttatcccacacacaatgctgttgcacagcgagcacatgtcttactgtctacccttccacccgccacggccccacgtagacagacagtcagacagtgcactatttcttcctttctccagtggttatgcggaagaaaagaaggaaatagtgcactgtctgactgtctggttacgcttttgaaaaatttgaggatacaaactgcattagtaccacatattaattaatttattgaacttaaaaatggtagtaggcgaaaagcttaaaatttagtgtggttgatgtcattcatggccatggccatagtcaattagtgtcgagccaaatttttatgtaagtgcattggcgaaagaaaaaatttaaatttttaatttattttaacatcttttcattcaattcagaatcaattgaaaaaataggattttcgatttttatgttcgagttcgggttagggattggtaaaaattgatcggattcatgatctgaatactctcgactccagataatat

SEQ ID NO: 25285 - DNA, 1404 bp, Heterodera glycines
tgtgccattctttggttttattgggaccgcttcaaaacatcaaaaaagcaaatgtaaaaaagaaaaataattatttggaatttgaaatttcaattttaaattttgttttcccttttttcagctttatctccgccgattgttggctttgtgtcttcgaattgcttgcgccttctcaactaggcctcggaattgcgctgatcagccaccgttttgacgtttacattggcgaacacttcaagacgcgcaaatgggcactgaaatttattcaaattctactcaaaattggcgagaatggcaccaaggaaatggaaattaccaatttggatggagaaacattgccaattccaaaaattcaattgccacgcaaagtcatcggattcaaacgaatcatcatcaagtaaaattggcgattattcaaaagatttaattagacaatattcccattttcagttacatcgaccacaatgtcatctcttttctcgaccgattgagtccacttttcgcctcatttccgattaatttggcattcggcacgaacaaaatgggcattttggatttggttgtacgcaacacttggccaatgctcggaaaaaacattcatggcatcgaatcgtaccccagttttttacactgtttgcgacatttcgtcccgtcatttctcaacgaatgtccaccacttcgctttgtcttcttctgttttggcgaactattccccgaattccctgccgatgacaatgccatggcatcggaaagacaagcggtggccaaatggcttttcaccccacttcaaaacgatgtgccaaaagtgttcaaatttgaatttgtcaggaatgaatgggagaattggccgtcgaaaattgacgccttcaaagcggtgatttcgatttgattaattcatgcatttcatatttcttaaccaattttcctttgttttattaggcttttgccaatgcttcatcgcccgtcaatttcatcgtttccatttggtttcttttgccttttgctgcctccgttgtgccctttgatctgacgaatgaagtgactcgtgaacaattgacgttgaaaaagatgaacgatatccgccgtgttctgctgatccgttgtccgattgcgcgagacgaaagcaaatgggccaaatgggagaaagaagcgattgactggaaattttttgatcagtgtaacagaattgacattcatatcaataaagaggacaacatcggggacgggtaagcgaatgcatattcaaaaattcaattttattattgtgtttttgtttttaggcttcttgacgaaactcccggcccaagtgatcagccgaagaagtgaatgaatcaattgttgagaagtgatcaaccaaattgaaagatggaattgaataatgttgagcccatatgacgtatatat

SEQ ID NO: 25286 - DNA, 1464 bp, Heterodera glycines
  unsure (1)..(1464): unsure at all n locations
caacaaagggcgcactgaaggcattttacaatagtatgcgccctattttgggggcataaatgcaacaatctgaagcaaaatttcttcaaaagggtccacatcagggatggcacggaattccgatttccgatttccgaaaatttttggggcctcggaatgccatccctggtccacattgcgtcttttgcaatcctcgcgccaaaggaactcgcacaaataggagttaagcatttgccgatgggttccatgttgttttttgttgcgcgcttttgctgaccgccaagtgcgctcaattgcctgaacctttaccgttccgttaatttatgctatgagaatagtaattgtaaaaaatgccttcagcgcgcccttgttgacatttttttaaattttgaggtgcaggcacaaaaccgaaaagtaccgttttgtcttcgggtcgttccaaaacctttctttctcatcatttagcataataattttgtgatacggtatgatttatacaatatcttcataagttgtatatcttgtcttccacctttgactaataaagaatgaaatgctcctttttctatcaaagtttgtttaggcattggatgcaaaatttgcactcaaagggctgctctttctgcacgaaatgtccaaatatgttgaaaatcagaaacatgaaatggctcaacaggatgaaggtgggatgggcaattccactacaaattggaaaaaaaagcttcgccgtcggttttttcagtgttcgaaatgccgagggtcgtccaactgatttcttggccccacctcggatcccccggtttcgtcgcagcgcccgcacatttcggggccgaatttgaccaccgtactcaattcactggtcaacttgcattcgccgacccttttgaggtgtctgactacaaaagaattcaaatgataaaaccgcggaaaattcccttaattaaggcttgcgatgggcttcgaaatttgagggaaatgcgtggacgtgttgcggtggtacgtcgcggctcgtgcatgtttgaggagaaggcgttcaacgtgcagcgggcgggggcgatcggaatggtggtgattggtcagttggaggggggggggttgattgaacgtgatcggaaatggttgactgtcgatacatttggtccatatactctccccaattcgctttcatttagacaaccgaaatgacacaaattcgtccgaccaaaatgcctttcttttcgcaatgagtggctctccagcagaagacgggggcaaagtgaccgttgttgaggaagtgcaaattccttgcgtgtttttgttccatgccgaggccattctgttgatggaacaaatgttctcccaccccgaggcgctcgtccgtttggcggactccgacctcagccccggcatttaatagaaacaaaaaccaaatttatgttttaaagttagctttttgtttcgagcaaancgttgcgacagaatcca

SEQ ID NO: 25287 - DNA, 2086 bp, Heterodera glycines
  unsure (1)..(2086): unsure at all n locations
tgtaggcacaaatttggctttttaaacaaatgatctcatgcttatgaatatatannatatctaaataaacaacggtaccaacaacaaatcatccagggacgaagatcaagttgaaagtacttacaggtaagtaaattttaaacacttaatttaaataaagcaaatttaaaaaatcgacaatttcggcgccgagttttgcggcgcccgtaggataaatagtgatttatccttttatttattatttttcatgacgattgttttagcttaatttccccatttaaatattatttgttgtcaattttatcttttttatgtttgtctcttcattcgaaaattgtatttgaattttgtattaggctttttcgcattcattttggatatcaaataaaaataataattttgctttcatatagcaattaaaacttaaatgttagaatattttaattaaaatatggattagataataaagaaaataatgtgtttgaaaaaactttaaagataaaaaaattcaaaaaatataaagccatgcaggaaagtttctttttttaaatagatataaaaatagatatttattgattttttaattttcaaaaaattgattctcgtttggatatagttagaaaatgattaattattgctgcattcatttttatataattactaaattcttgtacccaatccttcatagtttttattttttgcttcgctttaactaattatattgctaataaatcaacctttttcatttgaaatttttgctcaataatgctttattttattttctgcattgtagaattgaataaattatttttaccagttaattctttattttataacctttcttaaaaaaattattgaataaaaattacattttaaaatatatttattttaattatggttttagttttaaaattcattaattacgtttgctgaaatcttttaaattaatttatatgctatatctaaaaacaatatatgtcgccatatttacatgtaatattttttttaatatttggaatttttttaaattctaaattaatgaataaataaaaatatatgaagaaaataattaattataaaaaatttatatttattattatttcaaattcagtaattaaataattacttatctccaataaaaatttttaccaaaattctagttaacaaataatataaatgttgttaacattaatgttaataaaaacacacagtgtttcttaaacacaacatttgagttcaattgatgaaccaattgtttatgattttatacaatcattcgttcaattggttgcccaattaattaatggtcagcaaattattattgtatgcattaataaagaattaataatttaatttcaatgtttattttctgaataattttctagtaaagttttaaaaatttattctttaatacaaataataaaaaaaagtatcaaatattgaaaaaataaactaaaataaatatttttaaaattattgaaaatagcaatagaataacggacaaattcattaaatttataaaattattgaaaatagcaataccatagcggataatttttttttaaattattgaaatagcaataacatagcggacaaattcattaatttttttaattattgaaaatagcaatgttttcgtacattttttctggcattttgtacatatttcatacatatttcgtggattcttttacatatttttcaaattttcttaaaaaattttcatcgctaatattacatatttttttagtaaaattgctgtaaaatattcaaaactgttaatttacgtgaagtttaatcatcagataatagaaatatttcgaatagcgaacaatattgaaaatattcgggaaagttaaattcggtgttaaatttaaatctttataattacttttaagactaaaacataaactaaattaatcagcttttatttaaattacaattcgtaaaaattattatctacgtcatcaatcaaaaccttcaaaatttgaataaattttggcantattcgcctnataaatttttaatgaataagcagcaaaaggaggacccatcgcaagaacnngnaatatttttatcatccagg

SEQ ID NO: 25288 - DNA, 1551 bp, Heterodera glycines
ttctataacttttttcaaaaagtgataaaaagctaaacttttatttataaaatagagcaaaaaattgcggattttttgagtatattatttttataaaatacttttttagaagggagttctgaatttttttctgaaaaatcgaatttttccagaaattctggaataacttttttatttaggaagttagaaattccaaataaatttcataaaattctcctaattttttgctatttttcaaactttattccactaaatttgaccaaaaacgaagagagttatgaattttcaaaatttcactggattttccggggctcaaattttgacgatttttcaaaaatttataaccaccttccaaaaagtctgaaacgcaaaataaagcgtatatacgtattcagcacctcaaattatgccataaaaatgcattttggctaatttaggagcaaaaaaatttttcatgaaatgcaaaaccatggggtcccccctatggttttgagtttcaaaatcacaattaattttataactttttttaaattcatgataaaaacatgagataaagcacattagatagagcttaaaattctctacaaaaatgctctaagacaaatttccgctaaaatcaacgcctgacgagttataagccttgaacggaaatggggagctcaattccggaaaatttttctatttccggaaaattttgaaattttttcaaaaatgccaccaatcgatagagctcgaaaaacggttgcatgaaagtggtctccgttttcctgggaaaaatctgcaaaaaataataaaattcaaaaacgaaaaattttcgagggggcctagctcgaaaaattttgaaaattttcaaaatctgaaaacgccatcggatgcagctttaaaaactacacaaatgctcaagcggcgccaacccgctccgcttaacccccagcgagttattcacgaaaagccaaaaccggcattttgagcgccgttcagtcgccaatttctacaggctcggcatttgatctgatcaaaaagtgatcagtgacaaagttgtagccaacatgtctggggtgtgccctctcagcggactttttccgctcccggttccctgagaaaagttacagcccgaaaaccgcgacgattttttttatttggccgtttcagcgccgctggcgctcaactggccgccggaccgaaaaatccttatttttcccagatgcgcctcaaaaagttgcttaagcaatgccgcactttcaggagcctccgggcaaaccacggggacttataattttttctacgagttgcaccttttctctatatatagtagaaactagagctgcctttttttctgcgcactagtttcgatatattaagcataaatgaaccgtcggctatttagctggaaaaaagcgcttcgcgctttcggagcttcgctacctaggctgtaaagcgattcaaatttatcgaatttggttggagaggtttttttaaatttttaaaaaattattaggggtttttagtccacatcgagcttcaaggacgggcgcttcacgaccgtttttt

SEQ ID NO: 25289 - DNA, 1354 bp, Heterodera glycines
ggcgcatcggttcggggggactgcccgaaaaacaaaaaaatcgaatttttcaagtgtcgtttggggtactcaaacaattatggggacaaaaatccaccgcagattaaagtacaggctatagggaagctattcgggaaggattcggtctccccataaatctgggcgcatcggtcggggggactgccccgaaacaaaaaaatcgattttttcaagtgtccgtttggggtactcaaacaattatggggagcaaaaatccaacgcagaattaaagtacaggctatagggaagctattcccgaaggattcggtctccccataaatctgggcgcatcggttcggggggactgccccgaaaacaaaaaaaatcgattttttcaagtgtccgtttggggtactcaaacaattatggggagcaaaaatccaacgcagaattaaagtacaggctatagggaagctattcccgaaggattcggtctccccataaatctgggcgcatcggttcggggggactgccccgaaaacaaaaaaatcgattttttcaagtgtccgtttggggtactcaaacaattatggggagcaaaaatccaacgcagaattaaagtacaggctatagggaagctattcccgaaggattcggtctccccataaatctgggcgcatcggttcggggggactgccccgaaaacaaaaaaatcgattttttcaagtgtccgtttggggtactcaaacaattatggggagcaaaaatccaacgcagaattaaagtacaggctatagggaagctattcccgaaggattcggtctccccataaatctgggcgcatcggttcggggggactgccccgaaaacaaaaaaatcgattttttcaagtgtccgtttggggtactcaaacaattatggggagcaaaaatccaacgcagaattaaagtacaggctatagggaagctattcccgaaggattcggtctccccataaatctgggcgcatcggttcggggggactgccccgaaaacaaaaataaatcgattttttcaagtgtccgtttggggtactcaaacaattatggggagcaaaaatccaacgcagaattaaagtacaggctatagggaagctattccggaaggattcggtctccccataaatctgggcgcatcggttcggggggactgcccgaaaacaaaaaatcgattttttaagtgtccgtttggggactcaaaaatttttgggagcaaaaatcaacgcaaaaataaagacaaggtttaaggaaagtatttcccaagggttcggctccccataaatttggggggctttggttcggggggaattgccccaaaaacaaaaaaattgatttttt

SEQ ID NO: 25290 - DNA, 2001 bp, Heterodera glycines
  unsure (1)..(2001): unsure at all n locations
tcctccgtcatcatcttgctcatcttccatcaacgttgtttccggggactttttttcgggaaaacggggatggaccaattcaattccgtccccgtctcctcacacaaccaacagggacccaaatgtctccgagaaatgatgagaaattgtggcggtgacggtggcgggggtcgatgatggtttatttattcttgcccgcgtccccgtcgtccccatcaccagctccgattgccatggcaaatgcaaatcgtcttccatcatcatcatcatcatccttctcgcgtcctcgtcgtggtcccattttttggtgaaataaatgtgtggtgtcctccgcggttttcgctcatctgtctgtctcatcgagacgggactgaacttgagactttaaacacacagtcttggttctcaagtggataaattctcggggttttgagtctcggttctcgaaagttttggaaaatttcgactctcgaggcagctctagagacttttcaaaacataccagtttagcaacaagaattccattgcggaaaagtttgcattgagtgaataaatttgaattttgtggaatcatcgaaagtcccaaggattcagatggttaggaatattttaggaaatttaaattctagttaggacacgaaaaggagagacccttgaaattttctcaaaattttttgttgattttttcaatttctttgcagaaagaactctgaggccttaaactaaaaaaaaatccctggtgcatcttaagtccttaaaaccgtcgttggctctccctggtgcaccaccaccctatctctctcattttcatcagtgttttggagtggggtgtgctgctgttgctcacaaattgggccccagggaatttttgtgaggcgatgaaaatccggccttgagactgacctcaattagccacccgccgacccctcccggcattccaccctcctccgttcttgggtgacgcaatgccatgccaataatggcggtgccgcgcccaattggcaccgccgtcggcggcggcatttggagagggatgggacccctctgggcggtttaattgatggaatgatgatgaagcggttggataaaaaagagaggagggaaaatgggggaggtggagggggcggctgcctgactatttgatgaatgaaaatgaattttgggatggcaaaaaatgaaaatggatcaaaaaggagatattattgaaaaagaagagaaggcagagaaaaaaagaaaattagagagactattgaaaaggaggagacagcagagaaaatgaagaaaacaataacattaaatgttagattgaagaggaaaaaggagcaaagagagagagagagagaaaattaattcatatttttggccaagaacatttaattgttattaaaagtcattaattcaaagttttagaagaaaaatttaaatttaaaaggaggcaaaatatgcataggctttgggagagaaagaaaaaataaaataatcatgaagaaacgagacaaacagagatagggcgagatagtaagatattaagaagcaataactgattaagcaaagaaatcaaacacaaaatagagacaaaaaatgaaagaatcagagaaagcagaagcaaataactgattaagcagagaaatcaaacacaaaacagagacaaaaatgaaaagaatcagagaagaagaagagcacccatcccaagacagagacgcagagacatgcgcctttggggcgcagcagcggaaggnggcgtgtcttcaaggagggaattgtgcgccttcttcaagaagcagcgaattggagacggcggattacggtagcggacggnggggcaccctccgggcgatgccttgaagaaatgctccgccgccggcgcatcatttccattcttttcaaattcacttcgccggtcggaggcgggcgactgacggacgattcccattcacccaattcacctttctccgttctgtgctacccaccaccttncaccgcctacaaaattttttggtt

SEQ ID NO: 25291 - DNA, 1627 bp, Heterodera glycines
  unsure (1)..(1627): unsure at all n locations
ttaaataaatttattttggaaaattttgtaaaaaattccaggattttaagaaaatccggtgaaaatcaattggattttaaaaaaaatagatattgtaaaagaaagtgagggttaaacccccagagatttttgatctcgtggatttccaaaaccgggccccctagccccatctgataccaatttggctttttcgagcccaatttttggcctcaatagcccggaaagtaattttaagtgcnccgccggtctttggcattctataaatctctggcaaccacccaattttgtttcaggaagggcagcaattttaataaaaattcatggaatgaaaaattggggttcaatcctgggccgaaccggccacaatttaccaagccttgaaaaattcaatgagggaaaaataaaaccaaaaaaaaaaattaaaaaaattcgccttgagaccggaattttgacaattctggatgccccggacaggattttgaaattaaaacctgatttttgcgggaccccgatccgtttcatcatttaaaaacccgcccggattccggggttcgggatcttgtaacctgaccgggtcccgaccccgtccaccacagcacggcgtacttacatagttccccggtcggtccactggcacccactcgtcgtgcctgcttcccgtccgtgccgtccaacaagtgggccaagaaagtgccaaccccgcacaccagccacacccagcgcgggatgttcagctcggccggcccggtggccgaattggcgctcagcccggggtcaaagcacaccacgagcccatagcaacacatcacaatcagtgcaccggcaaatgtcagcacattgggggccaaccaacgggggtaaaactgaaaaaaaaaattttttgaaaaattttgcaaattttgggcgcactgaaccgaccaaataattggtttttttcaaaattggactaaagcaccaaaattcggtcatgtaggcccttaggtctgttaattatttccggtagaaccagttttggtaatactgcggagcccccccccccccgtttttgaaaaaagttgctttaaaagtcgtgaaaacatgtttatggttgttttcggggtcgctggtcatgaatctgacattcattttggcttattccaaattcccagacccgaattcgaacaaaaaatgccagaaattcaatttttaaaaattcgtgattcggaaaaggcaaaaataaatgtcaaatccgtgaggcgctccaaaaatccccctaaacatgctttcacattttacaacaccctaaaaaaatttctaccaaaaaggagggaggggcaacggcagtttttttttttttgaaaatctttaaatttttgaaattaaggcctatctttaagcaaagaatgcattttaaaccaattaaaattcgaatgaatttatcattcataatgatgcgattattaagaataaacctcaaaaaccaacttggaccacccaattccagaagggatgcgaaatgtatgtggaaattggcgagttgtcaatgcagctgtacttgtactggtcgaacccggcgagttgctgttgcgacaaataattgaccccgaaaagtttagacacaaccataataatattgtacaacagatac

SEQ ID NO: 25292 - DNA, 1539 bp, Heterodera glycines
  unsure (1)..(1539): unsure at all n locations
tgccatttgaaacaataaaatgatgagcaaaaattagacccccactattgacaaagaaaatattcatcagattttattaatgcataaaatattattgtttaatatgttaacaaaatgtgtaaagtgaaatgatttcatttttagccagtggatttttgtgataaaaaatgaatcatcgacggattgacaggaaataataattttagtttacattgactataaaaaacggactaatgagaaaagaaaaaaatttttatggcttttttggaaattcaaataacatagaataattaatttttaaagtttttatgagagattaaaaataagttcgaaaattttaaacagtcttgcatctcatctaacatcatttttgaatggatgttgttgaaaataaaaaaaggacgatgtgaataaacattaaactgcaacttttatttcaagaatttaaaatttcataaaaattttcagagtttacattgattaaacacgagaataagcaagctattcgtttaattttctaaccaaaaatatattctttggggngggggggatgtaaattaggcttttcacggtgtttaactgaaccaaaaaccggctttttggaggaaaaattgaaatccgcggccctttgagctataattttaaaaaataatagacaaaaccatgtgaattttttttttaaatgttataacatgatagcgcaggacctggtaaaacttcaactcgtactaggcaaactcgtactgccctactcgtaacataaaaaatcgtcataaaatcgtaataattttttcaaagttgaccaaattaaaaattttttttaaaatttgttttttgaaaggtgttatgaacatttactcacttctcgacggctgttggattgagaaaattgctcgtgtccaatgcggcatttaattggtatatattttctgtgacaattttattagtaaaatttagtataatttattaaattttattaatatatacacatttatactcataaaaattttgccaatatttttcttgcaatatattaaaaaaatttacttctgaaaaaacaatattttatttatttttctgtcgagttgcccatctgccgaattattttcagtttggtgctcgagagtctctgtctcgagaaaagtctcgggctttttttgggtctcggtcttcgaaactcgccgagattcgagaccgataattttttacaccgcctaatgattggcttttggcatttattgtaattgtgtgaagtcaacaaaaagttaaaaatatattaataataaatttttaaaatattatatcagtaaaaattaaaaaataattaaaataaaataatataaatcagaaaaagaggattatcaaatccaaaacaaagtcacatgcattccttcccgaaatttttctctcaattttttttatcagcatttacttttctaaaacaaactctaattggcggttttattctttttttatcagtgtcaacgagagtacatcaaattaagtaagctgattggaaacaatcacaacaattggtat

SEQ ID NO: 25293 - DNA, 569 bp, Heterodera glycines
catttttcaaaaaaaacttggtgaatgtgcgagcgtagaggtccggcggtgccgataggcgccgccgggaaaattttttgaaaactgatggatctgttaatagattttgtccaaaaaatgataggtttttgcaatttttagagaatttttttaataagatttacgaatttttgggccctgcgatgccgataggcagcgccaggcgaattttaaaatttaaaaaaataattaaaaaagaaaccgtcaacctgaatcgaactcgtgacaaaagtactgttagtattgaagcactatccaccaatccacaaataaaataaaaaacaagtaaaatttatttcatttcataaaaatttctcgatagttaaaaaaaaatcaaaattgtataaattttttgccttttatccatgaatatgtcattcttaggggtgtattttcacccccgcgcccccgcgggggcgaaggtcgcgggggcgggggtcagagtcacgggggcggggacgggggtgagccccaaaaacctgtcccgcccccgggggcgggggcggggtccgaaccctattataaactca

SEQ ID NO: 25294 - DNA, 1426 bp, Heterodera glycines
aaaatatgtacaaaaaccccaaatatgtaaataaaatttttttaatggtattttttgggaaagaaaatccccgtaaaatatgaaatagccacaaaatgacataaaaattacttttttttggtatttttaggcaacattttcaaacttattttttctttataaattttcaaaatatgtaaaaaaaatgaaaatatgtagaaaaatatttgccgaaatttatcgcgaagcagaccgccgaattctcacgatggttcaaaattatttaccacttaacaacgtagacactaacattttcccaattcatcagccttttaatcatcattttattattgcttttttgattggaatttctcgaaattatgaaatgagaccgtgatttgaaacagataaaatgttattttttcttggatttttaatttcaatgtcttttaaacttttggtatggaaatggtctaaataccttggtatggaaacggctggtatggaaacggcggtatggaaatggcggtatgtaaatggcagtatggaactgaccccaacccgaaaaaatccaaaatatgtacaaatatgtaagaaaatcccgaaatatgtataaaaaccctgaaatatgtaaataaaagtcccgatttttgttcgcaaacacaaaaaagaaagtgtttttcctgctatttagagcaaggagaagccaggaaaaaaatatgtaggtatttacataaaattggcagccctaataattagtaaacgcaatccaatgctttttaggacggacgattcgattcacaatttttaaggttttaatcaaagtgtgaattaggtatgtataaaaaaattcctaacatttcaaaaattcatcataatttttttgaaaacaataaaagaattgggttttatttatcaagaattttacaatgattattttattattcgtttttttgtaaatcttttcagcaactgaaaaacgaaattttataccgaagcttctgtatacaaccttaaaatttaggtgttgtctgattctgtttattatgaattttgcttgttgctgtcatttttcaagagttgcacaacgttatttttcgagcagtcgtaaacaaacggaacaatatttggaacgacaggccaacgaccaatactcgaggcgggccagagaacactcataccgtgcaaggagtgcctttaaactcatgcaaatcaatgacaaaatgcacttcatcaggccgggtaccaataataattgtgagtcagcaaatgctcggctcaaacactcattgcaggactcgttgcgattgacgcgggtgcaggttcatttctgttactcttttctgttgaaactcgctctttgcccagcgcccggctcgtggtgccaagtgctcagcgagttattttcactgacaatttcgcaccaaaaaaaagaaccaaagcggat

SEQ ID NO: 25295 - DNA, 1710 bp, Heterodera glycines
  unsure (1)..(1710): unsure at all n locations
attaatagtacattttttaaactataattatcaacactttaaaacaaaaaaaaaatttgcaaaagtntaggtatcattttctttgtacaaaaaaatttctttgacaataatntattactagggtgngagaaagtatggatttctatatttttctgagtgtttattttaggctaataagcatataatagtatttgtagtttagtttgaaggttctaggacatattttttatttccatattccatatttttgtccatatttcacagttttgtccatattttatccatatttcaacatttttttcggaaagtatctaaaaaaattcccaacttaatcaattttttcaattttcaaaatgcataatttcttaataatgccaaaaaaacgtcaaaataacactaaaacctcgagatgtatttgatctgtcaacaagagaaggaaaattattgattttttgattcaaaataaatgtttttatgtaattttacccatgaattttacataaatattttggcaatttcgtccatatttttagagttcttcgtccatataatccatatttttaatcgtttttgtaatccaggaaaagtttgagatgctttgatctgtctataagagaagaaaaaaagttaattattttattgaaataaatatttaaaatgagtctacttgtccatatttcctagaactctatttattacttatattaatgcataaaaaaatttttgatctaaatataattttaggataaacagcactttccccatatgttcaacaaatcatcaaactacgataaggtcctccagcacctccctccacgtgaagactactgtcctgatcaaatgaaaaaagccgatttacagaaatttgataattggtataactacaatcgcagtcaaccattcgacctcaaagagaaactacctgaatactgctgcaacgacgtccgaatcctcacccacgcccttgtagaactacgccgggaattcaaacaacttacacaaagggacggaaaacacggtggaatcgacattttgtggcaagccatgaccatcgccagtgcctgcgtcaaaaattttgccctcaatcatctgaagcctaactcacttgccatcgtccctgaaaaaggctatactccacaacagaatcaaagtgcactggccatcaaattttttgactggtactcccacatcaataacgtcaacattcaaacggcacactctcggtacggcgaatatgtctttaaacgcgaaggggaggtttaccaagtcgacggatacatcaaaggcacgaatggaaggcgggacaaaattattgaagttaatgggtgtgtttggcatgggtgtgagatatgtttcggtaatatggatgaggaatcgaggatgccgaacggaaagacgctgagggaaataagagagagggagaaaaggaagcacaaaacattgaggcgttacgttgacttggagttatatgggagcacgaaatcaatgaggagctgaggagaaacaagaagatgcggngatttttcaataattggaaggataattcacccattcgaatacgcgacgcctttcatggtgggaggactgatgttaaaaaactactgcatactgcnaaacctggacaaaaaatcagctacaaggacttcaccagcctctacccgtggaccaacttcacaacggactacccactaggacacccaaaaatcatca

SEQ ID NO: 25296 - DNA, 1749 bp, Heterodera glycines
  unsure (1)..(1749): unsure at all n locations
attaatcacttaatttattggattctttttcctttccattaatttatttaatttaccattcaaaaattcatttagaatgtttttagcgacagaaggctgaattttgttggccatatttgtgtaaggaactactggcgaaatgattggcatttccatccaaatttgggcatggccaacttcgctttgctttctctcaaaccattctcgttcaggggaccaattcagaaatgcttcttctttggcataattaatttcttttaattgcaatggcattggccaaacccttaaatggattttgcgattaattcactcttgaatttcataatttcgcaatttcatcaattcggcacaacccaaacacttaccaaaacgaataaataaggaaaaacttttccaatagaaatgccaccgaagtttcgccggggaacagaaggaacactttggtgaccatggtgaggatcacttgcgaattaaagtgaccagcactttcgttgaacaatttcttttctaaattttcattgaatttaaatgcaaattttgtaattaaaacactttataaaaatatggcaaattttaatttaatttttaattaaaactaattaattattcttccgttttgtcgccaccttttgcccataattcgacaaatgcataaaatgttctaaacctcctcaaagtgcttccattcagcacattttcgtcgtccgtttggtgcaaaatatacaattcgtttggtgacaataagtgctcaagaagagccaagggaagcgaatgctctgaaatttaaaatggtaataaaagttaatggatttaaatttaattaaaataaaaatcaaagaaaaatacaatttacgttttattaatgtaaataataaactaaatgaataaattgaaaattaccccacaaaacattcagattttccatcaattgccaaatggtttttcgcttcatttccgcctttttcacttcctctttcattgaatcactttgtgccgttgtccgttcttcataacttaccattttttccaacttttccataattctcgcagctttatcatcatcatcccctaaaaaaattccataaaatgtttaatacttttattaatttttaaatgaattaattttattcctttttaaatttcataccaattgcaaaaagttcgtcctccaattccattcgaaatttctcatgcttttccctaccaattttctcatccttttcattggtataaacgtcaacaaaactttctttgagtaaagtaccaattttcttcccgaatttagtgagaattatttgaattaatttcccattgaaattaagcttcggcgggacttggcccatttgcggaatgacaataaaattcacattgaaatgattgcccataaattttatttccaattttggcacagtcaaatgattctttttcaaaaagttcaccaaaggattctgaagaaaatatttaaaaattttaacaatttttatttatttatttttcatattttttgccttgcaaaagatgcaataaattgaattgtcactgcataactttcctttggtcaaatcgcattgaaattgtcccaaaattttggcgtggatatcaaatccatgcggcacaaagcaaattgtgctcagtgatttgttatccggttttatgtaaaacattggtggcaattggaattggacatcaccagacttaaatgccagaaattaaattaattaaaaaattaattatttttcaaantttatt

SEQ ID NO: 25297 - DNA, 1533 bp, Heterodera glycines
gacttacattgtgccacaccgaatgggccagaatatacttctcggcaccgacatccaaccaggaacggagcagcacaaagtcacgactccgaaagggcggcagaccgccgactgaacacggcacggacaaatgccaacaataattattaatgagtaacaatttcccattccctacgggcgtaatagcaaatgtcgttgttcgggttcaaaaagccgacaggcaccgtcttcagcatgtatttgtcccactgtgatggtacggtagggaattacggcatcaaattgtttggtggaagaataaatgaaaaatcgattgattggactcacttttaaccggtagtcggtgtcctgtggaaaatgaattaattagcactgtaaaagcttaaaagagatgctcgagaatcatgtcgagaatggcatttctcaacatttgcttccattttcaaatgccaatttccgagcctcgcgcaaatggcaaaactcaaattcccgagcactgttcgcttcgttctcgggactcaattaactctcgggcattttcagcctttttctctcacctgaagcatgtcataacaaagtgcggccggcacatcggcgaattcgctgcgcgttttgatcatttgcagcgttgactgtttcccaccgttgccgccaccgctggcgtcgtccacgcggcgtgtccaaacgcgggtccgtttccgctcgtacgccaacgtccaatcagagtgcgcgtcacacaattctctgataaatgataacaaagaaaatcagtacaatgtttgcactgactatacagtaactgttggaccaactgataaaataaactgatcggtgtctaaaagttgtaaaaaacactcaaatggcaaaacattgagtgatcagcgataattaacgagactttgattgactctcgagccgaatctgggtggaatttgaatctgccgggctgtagccgccgtcctatcagcaaaagcgtttttagtccagttaagcaagtgaccagttagtctaacccgtattcaaattttgtcaccaacaaaatttcggataataaaagtaaaacaatgattgcctataggaaataacattggatttaagcgctaactttgcgtaacgaaaatcgacatcctccagcacttcaactgcattcagtcgcattgcatcggacggcagaatgccattgaccggaggaagggtaactgaatggaatggcattggcatgacattcttgatggcattttggggatgtggccaatcccgatccccggccattcatattgaaatttcaaattcttttcgctaattaccttttctcgttcccatcaatgcatgtgaacggacggacacaaaagcgcacctttgcacaattttaaaatcaattgaatttcaaattattgtccctaaaaatttggacaaattaaattttttgaaatacaataaaattcgaataaattaaattggcggaaggggcaaaaaaaggatggatgaacaaatgaatgaatgggaacaaagcggaagaagaggggggggggg

SEQ ID NO: 25298 - DNA, 2103 bp, Heterodera glycines
  unsure (1)..(2103): unsure at all n locations
caacgcagaattaaagtacagactatnagggaagctattcccgaaggattcggtctccccataaatctgggcgcatcggttcagggggactgccccgaaaacccaaaaaaaaattttttggataaaaattatttaaatgaactgactagataatatttaaaataggttatttctcttcctttcagtatccctgcaaagtttggtgcgcttctgatcagtttctgaaaaaaaagttaagcctaaactttttggcctgtttaaaaaggaattaaaaatttttaaaaattttattcatctccctttttgatagaaaaagcatcagagtgcctaaactaacatgtaaataaaatttggtgcgtttcagaaccctttctgaaaaaatatttaagaattaattttgcaaaaaataaataaaaacgaaagactcagattttcgaaaatttttttgagccagctagctcggcgctcatttcagtgtaagttagtcctttaccggggagtatccctgcaaagtttggtacgcttctgctcaattagcaaaaaatatgagtgatcgaattttcactaaaaaagttaagcctacattttttggcatatttaaaaagcaattaaaaaatttttaaaatttaataattttcctgcaccgaaggtactcactcggcctcttcgcggcctcgtggtggaaaaatttcggcaatcggaacttgttccgaaggctcaaaatattttggcaatcggaactccaaaggctcaaaaaattttggcaattggagtttttccgagggcttaaaaatttcggcaatcggaacttgttccgaaggctcaaaatattttggcaatcggaactccgaaggctcaaaaaatttcggcaatcggaatttatttcgagggctcaaaaaatttcgctaatcggcaatcggaaattggcattctgacatattcctggtaaaatattttttttaatagagagtattttgcatccaaaaaacttatttttttttctcagaaataaccaatttatgatatgaagcgccccactaatttcagggccctaattatgtaatgttatcaattaggagcaaattttaaaaaatattcttaaaagtgtttatatctcaagaaaattataaaaaaaatgaatgataccaatttcttctgaagattttgattcatttgaaatcccattaattaactgtagacaatttgtcaaaaagaatagactaattaagaagtggagcataattatctataaaaaaactgaggaaaacctattttaatagaataataatttttttattcgtatttgatcatatatattaaatattttttttttaattaaaaatatctctatacatttgctttatttttaatttataaaaattcaataattgattgtatagatatgaatacaattgtctcaaatcccatattatagaattaccaaaattatattttttgtgaaaattttattacgtcagattttattttatagaattattgtaaagtaaggggaataaattatacaagcaatattacatttttatgagaaatatagaaagtttaattaaatttatatttttttccatttttaaattaaatagacaataaaatctaacctaaaattttaaagaaatttgtagtgtcgaaatacataacgccagatttctgcggacttgatacgcttgtataagcacgaaaaatgcattttccgcttggtttgggggtgtttacgattacatttataatgcctatttttgcttattccggtgtttttgtgcctaatgtgcctattttcggaattcaaaaaaatcactaacaaaaatgcaataaaaacaaaaaatacacccctaagaaattgcacgaaaaattcagaataaacaccctcagaattggaaaatttttgcccaaaaactgaaccacaaaatttaattttttttttttcttaataaaaatttttggtttaaattttgtccttatttgaaaaaacctttaaaatatttgattagttcattacaaaaatttttatgtgttttgcaacctaaaaagccttaataaaaaaatttatttgcctatttttgtgcctatttgaggatttttgtgcct

SEQ ID NO: 25299 - DNA, 1843 bp, Heterodera glycines
tttggcaatatgtaaacttttctgaattagataactaaatgattagctaagataataaaaaggcaatttggcagcaataagaataatttatgtgggattataagcattggttagaatagtgcgaacgtaccggcagtgctaagtcaattcgggcaaagtaattggccatttgaagacaatttgacaaggttagcacacaataataagcagaaataaactggcggataaataacaacaaaagatttggtcaaattagcaatgaataagtagtttgaatttaaaattaagtgagggattcattaaaacaatcagttgatgagaattagttaatgaaatttgttacgcaattttatttaggtttgatatattagtaaattgaagcaagagatgaaatagaagtgttggggtaacttttgcagtaattacttcaaaatacagcagcaaatttaagtgttaggaaatgaatagtggtagtcaatttgacagaatgattgggaaattgacgtggcactcaaaaattctcctaatccgtaactgttcattttgattgggaagcgacatggctctcatagattctttctcctaatccgtaattgtcattttgttattttttaattccagcatgaactttgattttttcgattagactaggacctggattttctgtaacaaaaatcaaggaaaattaatatctaactgattgccgaaaatagaagatgagtaactaaatcccaaatgatgttttttgtccccaagtgtcgggtcccttcggagtcctaaaatgtgtgccacgggtgaaaatctattcaattttatatgtttcaagtttttcctgcggagccgaccattcgtattagaagccgaaaagagaattggaaaaatttttacgaaaatttcgaaattttataacaaatttcattaaaatggcctatttttccaggcttcactgattgcgatattgttatttaggaaaaagctgatagaacgacttgaaaatataattataagatttaatttttttacaaagtataaactttcgagttttattttttgtttaaattttcttgcttttttgaaatgtataaaaaatgttttaactttataatatttcacttaaaatttaaaaaatttcgaatagttttttacaaatttatgaatgtgttatgaatagggctgccaattttatgtaaatatatattttttcctggcttcttcatgctctaaatagtaggaaaaacactttcatttttctgtttccgaacaaaaatcgggacatttatttatccaccatttgtcccttttctgctacagtccatgtccattcttttcgacatcattcctgttgatcatcaacaaccacccttaattggacaatatctgaggcgcatttattttttgtttcttcgatttaacaatgaatttgttctatttttgcactacagtaaattatttatatctctctctctctttatccatacggtttcagctcctgctggtcattgtggtgcaacagcagggcttccgcccggcaattgtcatgaatgtgcccctgttgcgctggccgacacccccagcagttcaacaactcattttgcaacggatgaacaagtgatgccgggattttttgtacctttatctttcaaattttaattttatatgaattagtatttgaaaaacgaaaagtgccataggtccttgaaaagatcaaatttgttgtaaagaatgatcaatgtgtaacatgggcataattcaaaagctcgctatttttaaaacgatttctgctgggtaattaagcaattccaaaaaaaaaaagtttaaatatgaagcagtcaaaatttgagcg

SEQ ID NO: 25300 - DNA, 2471 bp, Heterodera glycines
  unsure (1)..(2471): unsure at all n locations
tttatttttaaaaaatttcaacccttttttttaaattttctaaaaaatttaagaaaattcttcattcaaacattgaaatttttaaatttgattttttaaaaaccattttggcatttttagaaaaaatttgaaattttattggataaaaaatatatacaggatgttatgaaagatggacaaaacccaaacgcctttccattaagcatgtaaaaatccaatgaaaaataaacgagataaccgatgagaataacaaagatagaatcaacatacgcagtcgtgcacacaattntaacatcaaaaaaagcaattccaaaataaagcgagaccgctgcttcagcacggcatgaacgcgcagagtctgaatgaaatcncatgaattcggaaccgcaataaaaatgtaaattagatntaaggattcttaacccatgtgggttttgggaattggttttattaggtctttaaaaaacgaggttttttattttttaacaaaaggtaaaagaaaaataactaatcaaaattaatttattccaatcgcaaataaaatgagagaattgaaaattcgagtccgcccatttgaaattttttctggctacgggcccgcccctaaattgtctttttcgaaattccttaaattggaaaatttacacttttttcgttttttgtattttttattctgggtttggtttttaatggctcacctgctgaagaaaagcgtaagtcgataaacaaaattgttgtaaaaaaagagtatcgtgaattttattgctaaatttttacgtttgacgaaataatttaaagcgcaaaaaacaaaatttcaatagtttttgaagaaatcaaaaatatttcaaataacattttctttgtcaccaaaatccccaaactatatcattcattcaaaaataaacaagaaaaatcacagagttactgacagacatgctccattgaggaaagtttttgctttgaatgcattaaatgaaaattggtaactcatattggacataaaaataaaattcaggccattcattgatgagaaaatgtgaagaaaatgataaaggggcgggctccttttatttgaacaaaaattgtgagtgggagagagtaagaccatccgtaatctttaatctattttgagtatttgaaagcattttacaatttcttttcgttttttttaattctttttccttcttttccaacttcatttccaaaaaaacttatcccatatccactttattacaagtggcacccaacaaaactttttttacttttttttatccttctcgttaagtttttccaatttcgttttcctgcttccattttattttaaaaaatgcttttctctcccccctccccctcatccacttcatttttttaggaaagcaaacaaataatatttgagaaaaggaagcattttgattaatttgcacgactcacggaaaaataaatttgaggcaatggaatttggaaaacaatataaaatggcataatgatgaaaaatattaggggaatttttaaaaatttaaattaattaaaattaaaatttattatagaaattgtatttgtttaaaattgaataagcagttgatgaaatcaataacagagctaccgaattcatcgataaacgccaaacggggaaaacataggaaaagccgaagaataaaaagtaacaattaatttttttttaattgttttgttttttgggtggcacctcatagctgtctgattctaatcgatcggaaaagcaaaaaggggaaaaagcatttaaaatgccggggggcagggagggaggataaaagcggggggggggcggggggggggactgatattgctgctgtagtagtggaatcaattaaaaaaacactgaatgagcgtagggatgagcgccttggagccggaaagaggttggagatcgagaaataagaaaaatcccgataaatccgacagtccagagccaagactcttgcacatccctaggcttaaaaattagggtgggatagagtacgggaagtgagcaaggagaagtgggacaggagaggtggaggagacagatcgaatgacccgtccaagagttccgaactctctgaggcattgatgggagatgaggaggagacagagacagggattgaattgcaaatgactcccgcgggggttgggtagcggaggagaggggaggggaacagaaatttacaaatgacccccccccccgtcgagggattgaagggagggcgggagaggggagatagaaatgaaggggaatagagagaggagggaatgggagtggagggaagagagaagagaaccagagattgttgcaaatgaccccccacctggggttgagtggagagaagaaagcgggagcggaacacctttttgagggagaggagatggggaccaaaattgttgcaaatgaccccctcccacagaagggattgaggggagggcgagagagggcgggaggggagtggggggaggag

SEQ ID NO: 25301 - DNA, 1481 bp, Heterodera glycines
  unsure (1)..(1481): unsure at all n locations
gtagtcggctttcctctctccaaatgctcgagactggcttttccccatataaagcgaattcttcagtcggctnttccttctcctcctccaccgactgctgctgtccatcatcttcgcccaacaaatccgtgccaatgccgtcgccgtcaatggcaccgtcagctgatgttttcggcacgaatttcggcttcatctcagacggcactttttctcccccgctttcctctacgtctctgtccctttcatgtttcccatgaactgtctcactttgtgttctttctctgcccatcatattcttgttgctggtgcttgtgtgggcgttcatctcctccgcctcctctgacgacgcgtcttcgcatggcaccaacgcgtgctgcgactcgcacgcgcgtatcgtacttaaaaaatgatgataaaataaatcaatgaattagtttattgattttttatcgaatcgatcaataatagggagctagctgtacattggcctctgcgcaggttcgcagttccgcccggccggcttgcgcgtgccgtgccacacgcagcgcaacagtcgcatctgtttgggtttgatcgggatcagtcattgaggtcgggaaggatcccatctgatcactttttatcggtatcccatctgctgatcactttttaagttttatctcacgcattatcctttccagggatatgtgccgatgccctcaaaatttcggcaatcggaattccgagcccaaaaatgtaggaaattcgcaatcagaaatcgacattccgacccatccctgatttacacagaaaattggtccagtaaaaaacaaattacagtagaccactgttacgatgtttttgattttttagtattcgaaaataaataaaaagatcaaatataaacttctgctgacagaatttcaactttaaattaaggattaaaatgtacggcacccatcataaaacaataccgtataactgacccattttccgggaatctacaagattgcttaaacaatttttggcatcaaatagagcaactgactggtgccataaatataaaaatacttttaaaatgccaaaaaatacaattttaaaacttgtccggacgacctgtacgcctccgtctccgcacattttgctgcagcgaccccacacggaggggcgccattctgcagaacaattcgctgcaaaatagcagagattaaaaattaaactgattacagggtgctaaatttgaatgcacccgagaaatttttgattttttaatgaaatttattaaaaaatatggaaaaaaattcccgaatttctagggtcccctaaattcgaggccaatccgcgcgcgacttcgtccgtccactgaccgttctcacactcgcgcttcagtttcggcctggcgcgccggtcgcacagtgccgccgcggtggccaatgtgccgttacggaacgcgcagcgaacatcgcgccgcatcttcaaacaattttaaaaatttattttta

SEQ ID NO: 25302 - DNA, 1469 bp, Heterodera glycines
aaaatgtaataaaaaagaatttaagaaaaaaaaaaagattattgtgaacaattggttaaatatttcaattttccctgctctttaatcaaaaaaaaaaaaatttaaaaaattatcttctgcggattgggtcaaaaattaatgaaaaatttaaaaaatgttgcttgtgcgcgctgcactgacccgacggcagatggtacttcaggtagtgcatgtacatggtcatcgaacatttggacgactcgaccggcctgaccagcagcatcgacttgcccaccgagcggacctggtcgcacagaatgcgtggcaccggcaatttggcggcgcaaattgcgtcgatgatggtgtccatggtcacctggaaaaaatattttctactcggccgaacatgtcctcgggagcaggttgattcccgcccggaaaattttcaaaaacccttagttgtttttgtaagaaatttccaaaaaacttttgaaaaatttttccaaaaaatcgatgaaaaattttcaaaccattatcttgaattcatgaaaaaatttagaagtttttggttccatttgtttgaatttttatgtttttaattgaattaattgttgaatcccaaaattgtaaattcttttttttttaaataaacacctccaattgcattgctctgattcgccgggtgttcagtttgatcagcacgaacaggtcgtccggcaaaaacacttgctccacatagtcactgatatcgcctaaaatttatattttgttttttgaaattttcagggcggaaatgctcctgaaatttacattttttgggaaaaattggaaaatggaaaacaaattttagctaatttaaaagggggggggggatttgatttaaaaaagctacccaatgtggtcttctcaatccgtgccttcacccgtcgtgccaacttttcgtcccgctcatcggccaatgccacggtgatgataggcgttgaaatggagcggaccgcgttgatgattctatacaaatttgtaattttttttaaaaatgccaaaaaaatatttttattttttgcttactcttttatcctgggcacgccttgggtgatgttcatggacgcaacgccagcaaagtgaaaggtttttagtgtcatctgagtggagggttcaccttaaaagtgaaaaatgcttttaaagatgggcgcacaacgacaaaaattataggacaaaaaaacctatccggatgtaaatgtgtaatggaaaaaagttgggttggctatttttgggttttgttgcattttgttaaaaaattttatcccctatggagcggaagaacaggtcgcgcccctccaagaaattgaaatttaccaaaacctaagaatttttcaagacaccgaatttaaaaaaaactttttaaaacgccgaaaaagttgtgatcccggagtttttaagaatcttagaagtttaacaatttatgagaactgtttttgttatatttcgag

SEQ ID NO: 25303 - DNA, 2027 bp, Heterodera glycines
cagataattgtcggatggtccgtggccaaattcggtctgttcggaaccaaaccgcagcacatccaaagtccgctgatcaattatttgggcgtactgatcaccctgatcagtggagtgatgttcgtcttcgtttacaacagtggccagcaaaaagaaaaatcggcagcgaataatggccacggggatggcgacgatgaagcagctgcagagcgtgccattcaaaatgatgggcgaagtgcttctgtgccgttgcgcgacgatgggtgtacaaggccaacggggtgggcaatccatcggtgtgacatgccattcaaattaatcggaggaggtcaatcaataaaatgccgcaattcaaagccactaattaccccccccccccccccgcctttttcatcgcgaaatggcacaacacaaaatatattgtaattacagagatccaccgtatgggagtgtgagcagcagaaatgaaaattgttcaacgacggcggaagggcacagcgtcggacggaggacaacaacgaccgttgggacggaagaaaaattggcaaatggccaacccaaaaaagggcagagctttttcaccgggaaaggccgaaaagtgttgtaagaattgtgcattttttgaatttcttggcgtttttcactgcttcttcatttgtcagttttgtttcgctcgccgtttgtttgggctttctccacggacttatgctaacaccgattgtttatgtgcaggacaatgaccaaaacgcatccgaaaatggtaaaatttgaaggaaattgaaaagagcctataaaaaatgccaaaaaattggaattacagtactaattttttaagtacgttttatgatcagtagagactggcgcgggacgtgataccttgcgggaatttgagagcccagtccgcaatcccgtatttttggcactctggacaaatttttttaattcccgacagcgcctagaattttcctggcggcgcctataggtaccaccggctggcttcgccctccattcaaattttttgtaggaggcgcgacgaaaaattaaatggaaaaaaataaagatttttcccaggaaaaattatattaaatatgtatatttttaggattttatccttacattccttctttttaccttattttaataaaaagcgctacaaaattagtagtatttaatttttgaaggttttttttatttaattcaaaagtttttcaaagtttcaaaaatcccacaattctcgcgagggatcccacaaatctgaaatgcgagatttgcgggataaatccggcgcgggattccgtcacaaaattgtttttagttccaatcccgcaacgggatccacaaatctgaaatttccggtctctaatgatcatttccatcacagataattattttcaaaaaactttttcggattttagcttttgaatacttttaaatcttctcaaaacaaattttttttttttgctatgaatttgcttcagtgctcgactttgtgttctcgcatttctgcgccgtcttctttttctccaccctttattttgtgctctattcgctgttccgtcgcgggcgcccctttgtccattcgtcgctggtgagatgaaattgcgcgttaattttgagattaatgctcgagaggcttgatctcgagtttagactcgagaaaagctgtgggcttatcgcgaatctcggggtcttgaaagaattgaagtgtaaggtattgggttctcggtgtccactctcggggtcaaaggtcagccgcccgtctcggactttgcaaagcccaagtcattcattgtccgccttttcaattctaatcggcacgtgctcaggtgcttccgtcggtcgcctatgggctgctttggtcggtgggaatgacccttttcatcgtgtccaaccgcgtcctctcccaaccgatcagttttccggtcactgttcgggtcagtgcttttttgagtggtgccaaaattgcgatcttttctttggcactgccattatctctttcctttagttgcctgccattattggtgccg

SEQ ID NO: 25304 - DNA, 1560 bp, Heterodera glycines
  unsure (1)..(1560): unsure at all n locations
gcgcccgttttttaaaatttgtgagctcagacgggcgcttcgcgnccgttttttanacttgtgagatcggacgggcgcttcgcgcccgttttttaaatttgtgagctcagacgggcgcttcgcgcccgtttttaaatttatttgggccttttcggccgcttcgcggcatcagacgggcgcttcgcgcccgttttttaaacttgttgagatcggacgtgcgcttcgcgcccgtttttcatattttgttttctttgacgggcgctccgcgcccgttttttaaatttgttaagctcagacgggcgcttcgcgcccgttttaaaatttagttgggccttttcggccgcttcgcggcctcagaaagaggtacaaaagtgataaaagaggtacaacagtgatcagaagaggtacaacagtgatcagaagaggtacaactgtgattagaagaggtacaactgtgattagaagaggtacaacagtaattagaagaagtacaaaagtgattagaagaggtacaaaagtgattagaagaggtacaaaagtgattagaagaggtacaaaagtgattagaggaggtacaaaagtgattagaagaggtacaacagtaattagaagaggtacaaaagtgattagatgaggtgcaacagtgattagaagaggttcaacagtgattagaagaggtacaaaagtgatttaataaatttttaaaaataaaataaatttccttttattaattaaaaagagtgtttgaaaagtacaaggatttaatatttatttaaattgaaattaatattacaaattctaatttaaaaatacaggagttctttaataaaagtaaaacagacacggagactcagttaatttttttttcccacttcagtaccaggcgaataactcattagggtttgacctcagcgcagggtggccagcagacttattgtagagttcaataagctcgatttttccagattttaaaatttcgaaaattttcaaaatttttcgagttaggcctaaaaaacggttttcgggttttttaattttatgattttttaacgaattttcacagaaaaacggagaccacttttaagcaacagtttttcgagctctatcgactggtatttttttcggaaaaatttcgattttttcccggaaagaaaaaaaatttggcctgagcgggacatttgagtcccgggtccataactcgttaggggttgattttatcgaaaaaacgccttagggcaaaattgtagagcttttaaaatgctatcgaatagtgtattatatggccggaaattttcaaaaattttcgagctaggccccctagaaattttaaaaattcataacaaatcgaagggttgatcaattttacagaaataaagccttaaaaatagataaaaatcagggagaattttatggactttatttggaatttctatcttaaaaaggaaaaaaagtattccagaatttctggaaattttccatttttcagaaaaaaatttctaactcgggtctgaaaaagtatactgtaaaagtaaaatactacaaaaatccacaaattttttt

SEQ ID NO: 25305 - DNA, 2090 bp, Heterodera glycines
  unsure (1)..(2090): unsure at all n locations
ctgtgtgtgattgccatctctgatgacncaatggattaagtcttcgggtcttctcnnccgcttttcacccnccattttaagctcatcctcaatagtttcgcattcaaattaataaaataattttgaagcaaatttgttgcaatttctccgtgtttttcatatgaaaagcttaaaagcccacaaagtccggtgcttttgtatgaaaaatgtcggtgaatttagtaccaaaaaagttttttcctttttcctccatttttttttgtccttttccccgcggcgcataatttcttctccgatcacaaaaaaaggcgcccgtccgtccgccgtccgctgcattttgcccgaggcgaaatgagggcggagtaaaaaaggtccgccccccttttttttacaaatgcgcatctgttgccccccattaataaagtgcccttcccccgcttttacctcttttgccattttccgaccgtcgcaatttttgccgaccaatgcattcattcgtttgtacagtaattccttcttaccattttcagtttaaatttatttgctactctctctcataataaattctttgtcaaattttaatgcaaagatattttctgtgattttgtacgtatgagcccataaatatcagtgatttccttttttaaatgacaaatttatttcgcgttaaaatgccgtgccaaatttggctagagattggacgggcccgggggcccggcaggcttttaccgggccgcccggtctcgtttttttggacaaacaaccgggcccggcgggaggcccgtttaaacgggggctatttttacggaccgcccggctcggtcaattgtgtaagcccgtcctggtactttcaaaattcaaagtctctattacccagttggtgtgctttaaaatgatattattaaatttatgctttgaattggaaattttctagaaaagccggggacaaaggaaaagccacccaaaagagggaccaaccaacagcagaaggaccagacgaaacttgttggtttttgactaaaaaatgtttgaatttggctccaaagttgatcactatcgccccaccattcccagcccatccttggcacagtttaatggcagtgttatggtcccagggtttaggatctctccccctgggaccgtccctgctagtttcgttttttaatactaaagaaatattttaaattagatataattagtgttttaatgtttccaatcattcgtattttttcctaaaaagtaaatttgagtattaaatatatttgtgtatttatttgattaaatttttgaattactcccgcccgtaagaaatgacgggatttttacgggggtcccggaaaacttttgactcccgcaatttttcaccggtacctattaaataaaattattttggcatcgaatgagcttccaatatttggcaaaattcgtataattttaatttttgatcacattttgaggtttttagtcgcttccaatagcaaattccctccctttcgaccatttaaccaatttcctccaataagcaattggccgcgccgcgggggcgggggagttacagtaagcaaccgaagacagtgaaaagcgagcgaaacaatcgcacggtttttatatattacctacttttaattcatttaaaatgtatttcataaaattcttagtttatttgcaatattaaaattattcacacaaaaagaaaatgacacttaagttgttggacaatttgatatgaaagaggataaaatcacaatttatgtgccgctttttacattcggaaaacgccgaatttcgtttccgccgcctttccttcccttttttgtgcggaaagtgtcgcctgaagggcgaggccaagcacacggcgagtgtccacgggatcaatcacacctgancaatgangggggtactccgtgaaaaatgcttaatttcnnccttttccgcgttttaaaaacggagtttcgtcgactgtttccccccgggcattttcctattntcatcacaaatgtccaacgtgaagattctgctggaccgatggatcccaacctggggtctttttcgggcggttttaaaatctggaaaaccatacaaaataattt

SEQ ID NO: 25306 - DNA, 2308 bp, Heterodera glycines
  unsure (1)..(2308): unsure at all n locations
tttcttttttttgtaattctcaatctcntggtaaaaaaaatatattggataaaattagctcctttttattgatatgataacaattttcgtcgtttattgaggtggaaaatgaataaaaagcaccataaaatttttattaaaaaattcacttaaagaatgatatgaaaaaagaacgatgtttttttgttttgtgataatttatttttcatatttttttgtaattttttatttttacatttttttaattcctaacaaaaagtcacctttgcttgtagatgaatgagctgtaaatgaacaagtgttgtcccgttacattctcctcttttgccatatttgattttgattggcgcaatgccaaccaaatgcgcctgtactgatcccattggagcaaatacaaaaacagaaaataatacaatacggtcaatggaattcttttacaacaatttttgatgtaagagaaagccaaatttacagataatattagcatgatgcttcaaataaatttaaaataattatctgctttggaataaaaacaaatgaacgttgccctaatgtccttatttctaagattttcccttatttctgagatttgaccttatttctaatgtttgtccccatttctgagtttccttatttttaagatgtgtccttattgctaagatttgcccatatttctgagaaatgtccttatttggggtgtccaatcttagaaatgtaacaatgtttctgaatttgtcctatcgagtgttgtagtgacttaaaaattttaatatgagagtccttggactgaaatacacaaaaatttaattgtataaaaatcttgcaaatgaaaatatgaaataacatgtgggtctgagcgcatccattcgtcgaattatcggaatttaaatcttttagcgatcaattcctcgataaactcaattaagtacaatcccactgttacataagtttactattgattaaataacattaaaaaaaataaattaaactttactgtaaactagagaccggaaatttcaaatttgcggatcccgctgcgggatgggaatccaaaattttttgcgggacgggatcccacgggattaatcccgcaaatcccgcaatcccgcaaatcctgcatttaaaatttgcgagatcccgcgcgggattgcgggattttggataattcgaaaaatttcaattaaatttcaaaaaatttccaaaaatcaaaaaatacctgaagtttttaaaaataaatttttaggggctggcgggatgcattaaaaggggcgaccaagatttttcgaatggatcagacggtaaaaagagatcaggaatcaaatctgttaatggtccaaaaatttgactattttttgcttttcaaaacccttttttcggcgcaattttttcaaaactaggaacaaaggggtccggcggtgccgataggcgccgccggaatttttttttttattttttttgaaaattttgtcaatttcttaactgattttgtccaaaaaatgaccaaatgtcgcactttttgactcgtatctacaggattaataagtaaaagccgatccgacgggccgatagacgccgccgggaaatttttttgcaaatcctagatgaaatttgagatgaaaattgaatttattttgattgattttattataaatttattcaaaaattttggcattccgtcttttaaaattttcaaagaatgtatgcggatcctgccggatcccgcacaaaaatcaaatttgcggatcctgttgcaggattggaattcaaaattttttgccggaccggatccggccggattaatcctacaaatcctgcattttccaaaaatgcaggattgcggactgggatcctgcaaaatcctgcacaggatccggtcctgctccgggctctagtatcgggtattgttgcgcgaaacgtttcaattttggacagctagcagggaaatccaaaaaattttgggttgttaattagggatctgtttaccaatcccgcaatttcgttggattagggatgaacaatcagccccaattttaacactggtacagtagtcatggttaaaagagttgtacatccattcatccttcattaatgattaatgatattgttgaaaaaataaaataaagtttttgcattcacaaaaaaatatggggtttcaaatgatacagaccacagggcaagagatgatttggctccataattctaatcgaatttaggtatataattaaaattaaaaaatatataaaaataaaagtgcatgcatttttctaaaggccacaaaaattttttggatacatttcaaaaatttagt

SEQ ID NO: 25307 - DNA, 926 bp, Heterodera glycines
agggttctccctggcagtccgctcacataactctcttgggagttaggagcatttttcatggtattttcaagaaaattgtgcaatgtgggcgatcccggatcattttagccagtttacaaaccaaacactcatagtaaaaaattatttcgttagaatacgagaaatagtttgatacgaaacgctgtttattaatttgcatatatctgtgcgaaaattacagatccagaaaaaatcagctataccattcgaaagctgctttcaggcgctctcagaaatcagtaaatcggctcctattcatgcactagcatttgacatatatacacgtgtctttctccatatactaggcgcgattcgcgcccaaacgcgtgggtcggccgaaaaaaaagaattttggcgaacaatttttgtgaaaatttttcatttcataaaggtatattctctgaatttttttagatcatttcttaggggtgtatttttccgatttttttgaattttggaatttttcggaaaaaaaacgtcaaaaagggcaccaaatcgctaaatctttgtggtttttttagaatcaaggagcaaacacatgttttttgactgccttttctatcattttccaaactttagtacaccattcaatagagcttcaatagctttacaatttagttcagaggtgatctttagctttttctgttaataaaaatgttttattgctttttttggaaaaaatataaaaattcaaaaaaaaccgaaaccgaaacgatataccgaaaatttttcttcggtttttttcggttcggtttttttcggttttttaaccgaaaccgttcgaccgagaattttttgagtttttcggtttttttcggtttcggttttttttcggtttttaaccgaaaccgttcgaccgaccctcttgtccggtctctaaagaaaat

SEQ ID NO: 25308 - DNA, 1862 bp, Heterodera glycines
caatttaaaagttgcattcacctgtttctgcttggcccgtctgaatgccaacagttcgtcttgaatgccaacaaaaaagtttgtgccgactgctttgtccaatgcctttcgcttcgtttggtatttcgcaattttggccaaacattggcccctcagttcggcaccgtcaattggctcaatggcgaaactgccctcgcattcggcatccttaaacacaacatgaacattggggaaattaagaaattggtgggcctcgagtcggaattggtctcacccaattcgaaaagccgggaatcattttttgtaaatttatcgtgcccaggtttttccacacctaaaaaattagaaccccccagatttttaattctaacaatgatcccttcttggataaattttttgtaaatttattggaattcactcatccgccgcggcgattggcaccgccggaaaatatttttttcaaaattaatttgttgaaaaaaattcagcgattctttggaaaagctaaaaaacggggtcatggcagttcgcacaatgggcagttcgtacaaaggcagttcgtacaatttgcagttcgtacaataggcagttcgtacaatgggcagttcgtataataggcagttcgtacaatggagtttcgtacaaaagccggttcgtacaacgtttcaattttgcgtttcgtacaataatcaaattaaaaaaaaataagtgatagtgacacataatttcatcaaaataacaaaaataaagcaaattataaataagtaatgagctaataattataaaaataacaatagtaataaccaaaacaataataattcattcgagctttttcggagaatttgcatcacttcaactgaacttggccaatgaagttttcgacaaactttaaatttacataacattttattccattccccaatatttttttgcagaaaggggttagcccgtcattattttttactaaataagaatttttttgtacgaaacgccaaattgaaacgttcgttgtacgaaccggcttttatacgaaacaccattgtacgtaactccattgtgcgaaactcctattgtacgaactgctattgacccggatgtcctcatttacgcctcacaaaaaaaaacactgattgattacagcagtccaacgtctttttggggaaattggcgctgacccttggcgagttggttggatgtgcggcccattcgccctccattctctccattttgaggtgactgttcggtcctctccctcccctcccttccccgtctctccattttcccttttctttcttactccctcagctcctccttcgcttggctgtccgtcctccgtcgtttcggtgcccttcgccaccctttcgtccgccactgttccatctgcgcttatttggccatttgtgatacattttggccatcgtcggaagtgctgcgcgaacatttcactgacgaactaagagattgcagagaatggttgggagagatggcgacggaatttgtacttggcgaaatggacgaaacaattcgacaatccatcggaattttgtccgttaaaattgacaacattctcagactgatttaacttttgtttaatccaattaataaatggaaataaaatttcttcatttatgaaacaaaaaaccttactattcattttggtgaaatttctttaatttatttctaattttaaattttataaattatatttccgcctttacagaccctttatctcccaatttccatgcacttcaaattggccttcgtctccattttgctcattcatttcggtgctttttctgtcaaggttatgccacaaaaccgtggccatggccagcagaagcaattaatcgtcgttttctttg

SEQ ID NO: 25309 - DNA, 1700 bp, Heterodera glycines
  unsure (1)..(1700): unsure at all n locations
aggtcaatgggcccggctaatcaattaatgccatttttccaaagaaaaaattccctttctgtcgtgggaggatcccttttagccggcacgcgcgtcatcatcccaccgctgcttcgacaaagagtgctgacaacacttcactttgctcatcctggcattgtgagaatgaaagagttggcccgtcgacatgtattttggcctggtcttgacaaggacattgagaacatggtcgaacaatgtaaagactgccaaaattctgcaaaaatgccacgtaaggcaccgcttcacccatggcctgtgccggatggagtttttgacagaatccatgtcgattttgccggtccttgtcaggatggtcgaacttatttgattttagtggatgcaaaatcaaaatggccagaaatcactcaaatgatttcaacaaatgcggccagtacaatcgatattttaaacaaaactttccacagatatggttttcccaaggaaatggtcagcgacaatggtcccccattttcatcgtttgaattccgccgtttttgtgaacaccatggaatcaagcatagtttttcaccgccgtaccaaccgcattgcaacggtttggctgaacggatggtagacacttttaagcgtcaagctaaaaaggagggcacaaacaaaaatcaaaattggatttcagaatttttgttttcctacaggacaaatccgagtcaggttttaaacggttttgctcctgccaaattgttcttgggtcgcatgccacgaacatcactttcattgttggcaccgaaaaacgattcaagtccgaacaagatcaatgtctaccaaagcaagatgaaacgacagtatgatcagcaccatgacacttctgatcgacaattcaaaattggtgacacaattttaacactcaattatggtcggtatggtaagccatcatggcttgaaggtaaaattgttgatggtaagaatttggtctggaaggtcaaaatccattctttgggtattgtggttaatcgccacataaatcaaattcggtcatttattcccaaaatcccaatttcaaaagattttgtcgaagagcagagaccaaattcgccaacaaagaccccgacgacaaagaacaatcagcctcatggttcgcatgacgagcaaccttccgttttggcacgtcctcagcgtgaacgacgcccgccgaaacgattgaatatcggcccaaatgctggcgctcgatatgaaattgagggataatttcatttaaagggggagatgttgtggatttgacaatttaaatatattttattatttattgacacgattccctgtgtcatcacttggaaatgtttatttaatattgaccctttcactcattcgggtcacttgccgttctctccttcatttttcatttcattgattgtctttcctccgtcatttatttatttgttatttatcatttatttttctgtttgtctttgctttaataaagttgtaagcaaaagacataacataaatgacgtcttcaattataaactttaagtttttcaaaaaaagatcttagattttctataagagaaaattcaagaattanattttagaaaattttcatagcgatttttctanatttttataataaatattttttttttgcggcgctttttatcaaaaaaattcgggaatatgggggtccggcagtgccgatatgcgcc

SEQ ID NO: 25310 - DNA, 1906 bp, Heterodera glycines
aaaacttatgcaaaaaaaaaacgtcgattttcataacagattttcccgttaaatttataagaaaaacataatttttttttaattggcgaaatattctacatttttgaaaaatttttcttccactttcccaaatttacatgaaaatgtattcacattcctaccattaaaacttttgccagtcagttacggtagcgccggtactacaaaaaccggtaccggtaggaaaaaacgctaattatcgaccggtaccggaacttataccatgcaactcaagtaatgatagggcttacatttttagggtttacctattttcattagctccctgtgacctgaaacgcacgaaaaaaatgtttgcttttttggtggttgtaagcgactttttgagttattagcatcattttaaggtttttattttttcgaaacaaaaaaaaactaaaaaattttggaaattatttagcgttttgccaaaaatttatgaaaacgatgcaatcgaaacggaaatacaccgctaagaatcgagcccagttcagaaaaaataaacaaaatatacgaataaaatgcaataaaaacagcaaaatactagtgatgctcgagagtctcggtctcgagtctcggtctcgggttttcaagtctcggtctcgattttcgagactcgagaccgagacttttttacacccctaatgattgttggcctttggtaaacttctatttttataaattttaggttcttttttgttcaaatttgttaatatatgcgtggtccagcgggttgtgttcttggttttgttccttatttttgcgttggatcagttcccctccaagtattattttttcttctcatttttcaaaattaatgttttttttcgatgggagttcaaacacaattttaacaattaaaaacgtaaaaatgtcatttttggacaaaatccgttaacaaattgcagtaaaattttaaaaaattttcccggcggcgcctatcggcaccgccggacccctgttcccgaaaattttttttgaaaaagagcaccacaaaaaatggtgtaaaaaagtcaatcatatgaaaagaaaaatgtatggtagcttaaataaggaaaaaaacaaaaatttttgagaaaaaaactcaaaagattgatttttttcgatttttaagtgtgtaagaaaaaatttttgaaaaaagtctcgggtatcgggtttttttggtctcggtctcggggttttgggtctcggtctcgagtctcggggtcgagtctcggtctcggtctcgagtctcgagtctcgggaaatttttggtctcgagcatcactactggattgatcacagtctcgcggcctttgcccgtgccatttgccaaatgtgccgttccgtttcgtttttggctttttcttttgtgtgtttttctttaatttttttgtctttcaatgcgttcttatttttgtttccttaattaaaatcgtcctcccttgagaattcctcccaattccattaatatttcttctcctcttcttctgctaaacatcaaccgttttcggcttctttattggcttttctcccccaattatccctttcctccgtttttcaattccttttggaaattcgctatggccaaaattatctgacagcatctcatttattagcatgaaagtgcttttttcccattggcatttgttttgctattggcatttgcttttataattggttggctttgtatttcctttcctctcgtttctttggttggctttgtatttcctttcctctcgtttctttggttggctttgtatttcctttcctctcgtttctttggttggctttgtatttcctttcctctcgtttctttggttggctttgtatttcctttcctctcgtatcgttggttggctttgtatttcctttcctctcgtttctttgg

SEQ ID NO: 25311 - DNA, 1100 bp, Heterodera glycines
caaaaatacattattgtggtttttttaaatttattattcataaaaaaattctttaaaaaaagttgtgcggaaacttatgttacaccctaagtatttatgaaaattaaaaaggcatacccgccggaccctccaccgaacttaaagtctataaaatggctgaaagttgaccaaaatttgaccaataacgacaaattcacaaaccttcgtacgaaaacgcttttttgggagagacatctgagaaaaaaagaacaaaaacaaattaagaaaaaaatgaaaaattcaatggacttgagaaaaacggcctcgcaattgtcagcaaatttcaacgaaacctataaattatgaaagtgtaaatcattgtaagataagatttaactgttgtacaaatctttcctcctttgatccaattgtaaacggattttgatcacttttaggtcattcattccccaaaatccaactgatcagtcgttggcagtgccaatttgacccttttctgtccctttgtgtgcccacccctttgccaatgtgcattcgtgcccgttccgatgcttcacttaaagtgccattttctttcattacaaagtggtaaaacctccggtgaacattcgcaagtgcgcccaaacaaaagcgagcggacaaagcgccggaagggtccattccgccgtcaattgcaacctgaaattgaaagaattaaatattgtccgatgaaacaaattaacatttatgcaatggcacctctttgatttgccatggcactttgaacagttcgcccgactgagtatctaactcaaaataagcgatggaacaccaatggtcgggcaattctgaaaaagaaccatccgttgacagtgaatgttctcaaaggcacaattaaaagatactccgaactgaagggagttgaagcagttcgaaattgtcttcaatgaaagaaatgtttaacggcaaaagaatcattggtcagaaaatacaatgagtgaaccgatgcgtttgactttgggcagtcgtattttggtgacacatctgaaaaaagatggtcaaattaatttagaaaaagcatttaaaaagccttgccattcaaactctacctgctgctgaaacgg

SEQ ID NO: 25312 - DNA, 1399 bp, Heterodera glycines
ggtcccgacttttctggtcccggtcccggtttttgtcaaatttcccggtccgctcaactctagtttattttcaaaaaaattttttgtcatagcaaaaaatttgttaaattttataacaataataattaattttcattacttttgtacaattttcattttatttttttattgttttttcttttttaaaattttcattatttttactcccattttttaatatttgcacaactttaaaaaacagagatatgccaacagaaaaaaaaagttcaaatttttaacggaatcttttggcggaaacgaaccaaaaaattgacatcttccaaactgagcccatcaaatcaataaaaattcactgctaaacaaatgaaaattttttatgtctgccaacactttccgttcatcgaaaatgaaaacggtgcaaaaaatttccgtataaaagggtaattaaattgtcatttctcagcatattaaaaataaaacttttaaatttgaaatttgattatagtaaatgcattctttgatcattctcggcattgcttttgccaatttggcaccaaatgcttttggccagcaatggccaaaagcaacaagtgatgaaacggtttcggcaaccatcaaagtgtcgggcggcaccaaagactttggctacaaaagattgaccgcctcttcggcgttgggcaccggtgatcagtcggagggccaaaaagcgctgatccgtgccgaaaagggcgcagtgatcaaaaatttgatcatcggccaaaacggggcggacggcattcactgctatgacgggtgcacgctgcaaaatgtgtggtgggagaaggtgggcgaagacgcggccactttccggagcagcagcggatgcaaggagtacaattttctggtgacgggcggcggtgtgaaaaatgccaaggacaaagtgttccaaatgaacggcggtggcacgttgacgatcaaagattttgtggtaatctacacatatatttaataaccaaaaatgcgtggcaattaatcccggatttaaattggatatctatgccatggatgcaatggaatataattgaattttttaaaatattttagaccattgtggtcgaattcccattcaggcaaaatccatcttttccccgtgttctgtcaattatgtaattatttattccctaattaaaattgccttcctttcatggccgaaaacattggcaaattggtgcgttcgtgtggcaactgcaaatcgcaatggccaaaagcgcaaattcgtggtggagaatgtcaaagtgacgggacttgaaaacgctgttgtgcggcatcaacgaaaattacggcgacgtggcgaccattaaaaatgtgcagatcagcgggtctaagaaagtgtgtgccgaattccaagggaacatcagca

SEQ ID NO: 25313 - DNA, 1738 bp, Heterodera glycines
  unsure (1)..(1738): unsure at all n locations
cccatacccattgagtgctctgaaaaacaggtggtaattacagtactttgtactttcccatctccattgagtacagtacatagacggtaattacagtgcctagtgaaaatttgccgtgccattcaaaaaaaaattcatcatattttcaggcctccattgttggccatgtccgattgatggtgatgagggaatggccaactgcttctactgggggtacaatttttaattgaatttcgaagatttttttttgcgggggggggggcggcggaaaacccctaaatttgggttgaattttaattttacgaattcaaagaattataaggaagaagctggctgggcggttaaaacgcggaaagcgggggttgataagatccataaaagaaagggcggatgtgcctcggtagcttaatggtagagctgcccacggaaagggggcatgagtgggttcgattcccacccgaggtttaacattttgcccatttcttattgaatgccgccgcgcaaaaagcgccgccgaaaattttctcgtaaatttggatgggccattaaattggtaatcaattccagaactgttttctgcccattctccggcgacatcattggtcggaagcaatgagtcgagcagcaggggaaaaggttaaagaaaggaaagaaatggttggcaaactgataaaattgcttggcatcgggcgggaatcgaacccacgcgcccatccaatccgttggcaaaccctgccactgagccaccgaatccctggcgcaattttgtgccaaaaattacacttcatttatcttcagaaactttgccctacgatgtgactttgctcaaaatggattttgagcctgactttggctgcacaatcatatcgcatagccaccgttacattggtcagtttttcaatggaaatgagacgaaaaaagcgcgaaattgcacaatgcctaattaatggcaattaaatttgggccatttttttggcacattttaaatttgggcattttggcacactttctcttcagctgatattgtgcccggaagcgctgcgcaccgttcggcccgtctccgtgtgggcgattgtgtagtggcggtcaatgggcactctgttgccagcatgggccaccaagtcggggcaattaaaattaattaaaaaaccaattagcgaactaattgggcgagcaatggcaccgtccaattcagtcccataaacgaaatgaccaacaggaagcgattttgccatcttttgttgatttagcatgtgaaaataataaaaatacgacgccattttggagttgaattctttaaaaaattcgacaaaatttccaattttttttcgaacggtccattagaaaaatttttttttaataaattgactcaaaaaaaaatgcaaaatacggtccttaaaaaacaatatttgttaaaaattggtttttttgagtgatttccatggcaaacaaaaaatttctttggtattttttggcatcatttccaaaatgcatgccatcatttgtaacacccttttgacatctgatttcgcttccctggggcaaagccatcgaaaaaatgttttctcgagacgatactcgagaccaagtcttgctaaagcagtactcatttaaaagggttggcgcttgactcaaaaatgggattaatttntggagtgggtattcgagtgttttttggcacatttatggggctcaaatggcacgctaattagtcgcgcatggaaagcgtagaatttta

SEQ ID NO: 25314 - DNA, 1066 bp, Heterodera glycines
  unsure (1)..(1066): unsure at all n locations
tgaacaaaacatcatcatttgaaacattcaagatttcgatttatattcgagttcgggttagggattagaaattagtcaaaatacatgtcagattcgtgattagcgacctttaaaaccccggataaaaaattatcatggttttttatcgtaaaaaaattttgcaaaacaaaagggtccccccttttgtttcaaaaaggcccacttttaaagtagcgccnaagtaatatcacgattttttatttcaaaaaattttgcaaaacaaaagggtttgtatttagatatagattaaaaattcacaaattttcatctatttgacgaaaataagcgcgatggttgtttcgaaagtcacacaacaaaacaacgccagtgaagatgaattggagttgcacaatgcctggcctcaatattccccagccgataaagttctccccacacgctttctacaaattattagactcatcaacaacaaattcaaagagcgtttacccgcctggcaaatcattgaacaacatccgcaacacttcacccatttttttatgcaaattcttcaaatggcactcgacgaaaaacttccatttgtgcaccaaatcgacattatcactttcttatgcaattgttttaattctttggaagtcgatttggtgtgccgtgaagctggtaaactttgttcaatgcccatttggataaatctactcaaggttggcggatttcaactattttttgaattcataaatcaccccaaatcagagacaaagagatttcttgctggagcaaaatccaaaaatgaaaaagatttggacaaagatggaacagaaatttgccaaattaccttctgatgattttgacgctttggactttaataggaggtttttatggcggttgcttcaaaggctaaagcggacggttgacttcatcgacgatgagagacaaagtcaaaacaattaaagaaccttaacaatctcttcttttagaagccgacattgatgctgtgagctattgtgaacggcttgtttctctttttattgacttagaagcgcagcttacgactcggtaaataactgggggc

SEQ ID NO: 25315 - DNA, 1536 bp, Heterodera glycines
atttttaagaatgttgcaatggacagacagaaaagaggaagaaaatgattcgtttttaatcattaacatttacgtacatataaatgaatatattggagctcaccaagaattaatccgggccgggcgccgttttcgtacaagaggatattttaaaaaaataaatgaaacaattgcatttaaatcatatatactactaatgttaattatgctttttaaggttttgacccaattaggtattaataactacaaaaagtaaataaaagattacgatttttgaaattattttggcaactaaattagaccagcttggtatcattcgaaagctcttgatgaggaggagctttttcgtagcaaatgttaaacgattttaaaaaaagataagagcgttcgaaaatttgtttttcttctaactcatgaataaatgcataagcaagcaaaaaatggctgtattacgatgcgttatataccgtatttgctctttttatatgccatggtatattatttttcaacctcctcagaaaggggtatataattggagaccggcagattaatggagactggcacataaaaagagcaaatacggtagatggtaggtcagatcattgttaattaattttgctgatcagatcgcttttaaggacctgtaattagttcactagtaaatccggtcagatgactgataacgattttgatcagatcattaataaatctttatcagatcactagtaaagcccggtcagatcactgaaaacccattctgatcagatcgctgtgtccgcccattggctgatgtccgtttccccggtgatcagtcgcatgctcagcgtggagatgaaggagaagcagcagcgaatgatcactttggacgaattgggcgtggacatggaccaattcatggagtttttggaggccatcacttatctgaacggaccttttctgcccaaccgtaattccattatactgtatctattcaattcaaccctctgaaatatttctctcccattttatggggttgaaaatatgtgatatttaaatttttttaaatatgattccaatttttagccaaaaatgtgctgatgcttctcaaattggctgattacttccaggtgggtcctctgatcacttatcacatcctcttttccctgtctgatcattttaattaaatattaaatttaaccaccataatgctaatgagttttgtcctaataaaagtgtcgcttcactttcaggtgtccgcgttgaagtcgcgttgcgaaacgcatctgatcaattgcgtggaaattccactgatcgaccgtttccttttgattgatcgctacggactcgacaatttgaaagtttttgctaatcaaatatttaattttttaaataatttttaatgatttttcaattattttcaattttagaattactttttgcatttggatgttaacaaattgcgtgccttttttgctgtgaaccatgaattgtttttcctgtaatcagcaaggaatttttgtacgctttatctgtacgagcatagcccggctttgatca

SEQ ID NO: 25316 - DNA, 1417 bp, Heterodera glycines
  unsure (1)..(1417): unsure at all n locations
aaaagatttttcgaattttgacccaaattnttcgaagtgaaagtttttggcgtaatttatgatgccgctgattggaagtacttcttgacgattttttaatggcccaattctatgctatagcccatatttcggttcttttattcacctgctgtatataccacccagaaatgagctcctgttgcatgtgtggcgaaatggtttttgtaagatagtaaagggataaagagcggaggttcgagtccgttgtgcaacatgattgtttttatttatttttgtccaaaattttaaaaaatgacgatttttgggaattatttttgaaggtttttgccaaccaaattggacaatcttggtatctttcgaaagctcttgataatgagaagctttttctaagcaaatgctaagcgatttaaatatttagaaaaaagatagggacgtttgaaaacttatctttatgaataacttttcgaatcgattcattttcaaattaacctgacctatcattagatgcagaatttttttatctgtcgatatgtaaaatttggtgttcgtcacccgtgctggcgtttttttcccttttgtcacctagtttagcaactattttggggcttttcgagattttaatatttattttgaattttaaattttggtacaaatagtattgtttttgttgtgttaataccaaaggattttttgtttttacaacaaattaagggaatttgtgttcatcgtgcattgatactttacggcttattttacgattttgtcatgtgaatgtttttggctgttgagtctcatgcccatttttatctctagaaaaaaaaatcggcctaagatttggaggatttgattgattgctccgaacacacaccccacagtcacaccgctattccatcctttactggaattgtttttgcacaaacacttccctttgccatttcattttcagtccataatttcatttggtgttaaacgattcacacttttcagatagttgtcaaagtttcagcggagtagaaaatgagtgcaaagcctttgctcgagttgtatgtgaaggtaaatcacaaatataaaacaccaaagttttttttattgtttttcaggcctcagggattgacagccgacgcatcggtgcatgcttattttgccaagaattttggatggaactctacgctctttacgaagtgggctgtgttcgtgttgaggtttcatcggaaatttctgctttatgcaattaaatttttcgctaaattaaggtaaaaactgtgaatgtcaattcggaaggatacaaaaagcacttttcgggagcacagccgccaataatggtggaacaagacaagtaaaacataggggaaacagcaacaaatctttgattacattctgaagaggcacggcaaatgcggacaacactgacatcgag

SEQ ID NO: 25317 - DNA, 2154 bp, Heterodera glycines
  unsure (1)..(2154): unsure at all n locations
gtttgaaaaattttcgatacgcagcacctgcggttttatgaaancgatattgtattttcaaagttttgtgcgtaatgtattcagctacnacagataaaatgatacgtcaatgaaatattgcgcaaagaatatgtgaatattatcggaaagtaagggcaataatatgtgaatcatttnaatcgaagtaaatatgtgaaaataatatgtgaatcnaattaatggngaagtaatatgtggaaattaatatgtgaaatcaaataaatgggaagtaatattgcgcaattatagcaatcactttcgtatttattcgcatataattaaatattgtgaatcataaaatgtacctatccagttatttatatggttttcttaattccatgaaccttcggtttcaaaattcttaaaagcgggccctggccggccggagaattcccggttttctttcgttcccgctcacctttagtattagcaaattgtcaaaaattttggatctggaatccacaaaattcttggttattaaatctatccatatccattttcaaatcaaaatccaggaataaactaggcaacttttatgaaatgaatagttttttcttaaatttctacaataaatttaaaaaagcgcttaaatactctcaccggaaaattttcttgcatctttcataaataaaatagctctagtgcagaaacttcattcgatattttcatgtctttgacttctgttttctttcagtttgggttatttgatttctggataattttatttaatatttattcgatttggatccaggttaaaagacctaaaagccagatccatatgatattgatcaggatttggagtttaaaattgcgctttgcgggaaaataatgattatttatacttatcatattttaccgtgttgatgaattttggttttcttcttgggtggccaatagccataatgccaaattttcagataaatttgaacatattccaaatggccaatttagtgaaattggtacgaaattcatataccatataatttctaatttgtgcataatcaattaaaattttctttaaaggtcggcttcttcatcctggttcttttatggccaaaagcattagcaaacagtaggtcgaagctcacaagctcacctttcctattttgtatgataaaattattattttaagtaacatcggaagtgaaggacatgatggataagttttcttcactaaaagcttatacaaatgacatcgtcaaaaaattgagaaacgtgagcgataatatcgacgatttcatttgggtcacacgtccagtgagcgcattaatcaaagcaggggctaaaaccgcatttcaagtaaaaaatgttttttaaataatctatttattttgacttttagtttaattatttgtttaaattttaagccaaacgctgaagagctagaagccattaaagtatggcataactttgtaaaagtcgagtttgaaaaccttatagaagtgacacaacaactaaaaccaggaattaaatattatttaattcaagacgaatatataaaggtttgaaaaacaaatttgtttattcataatgaaattacgaatattaaatttaaatatttagaaaagtaattctgttattcatttgtttttcaggctgtgaaaagaccaatgcatggtttagaggaactttataaaaatataacggacccagacaaagaccgttcacaatatttagaaaaatttcgtgctggatgtttagcacagcttgaagttttgcaagtaagtatttcaaatttaaacaaatgatggcaataaaacaagttctcttaaaaatagtcccgaggtacgtaaatgaaaaaaacggattttaatggcattccgcacttcggacaatttttcatgctggttacaagtcgcccgcatacgggtctgtatcgtttcagcgccgccgtttcggcgccagcccttgtttttggactataacttttttttcattaccgaccaaatctaacaatcttggtatcattcgaaagctaaacatgtttagaatctatttataagcaattacttagcgattagttgcttattaaaaaggttttaactgaaaattggaaaaaattccaaattttgaaatattttcttaataacttctttacaggtcaaaaattttttt

SEQ ID NO: 25318 - DNA, 1406 bp, Heterodera glycines
tttttgataaatttatacacatacaaatgctttcgagcatgtaggaggccggtgcgcaatagacctttatttttgagggacttttaaatttatactctatcccagaaaaatggctatctctttttttgataaattttatacacatacaaatgctctcgagcatgatagggagggcggtgcgcaatagacttttattttgagggattttttaatttatactctatccgagaaaaatgcctatctttttttttgagaaattttatacctcacaaaagcgcttgcgtatgagacggagggctgtgcacaatcgccattttatttcacagaggatttttatatttagaggttatccaggaaaaatggctatctctttttttgataaattttatacacatacaaatgctctcgagcatgatagggagggcggtgcgcaatagaccttttatttttgagggaatttttaaatttatactctatcccagaaaaatggctatctctttttttgagaaattttataccacacaaaagcgctcgagcatgatagggagggcggtgcacaatcgccattttatttcacagaggatttttatatttagaggttatcccagaaaaatggctatctctttttttgataaattttatacacatacaaatgctctcgagcatgatagggagggcggtgcgcaatagaccttttatttttgagggaatttttaaatttatactctatcccagaaaaatggctatctctttttttgataaattttatacacatacaaaagctctcgagcatgatagggagggcggtgcgcaatagaccttttatttttgagggaatttttaaatttatactctatcccagaaaaatggctatctctttttttgataaattttatacacatacaaatgctctcgagcatgatagggagggcggtgcgcaatttaccttttatttttgagggaatttttaaatttatactctatcccagaaaaatggctatctctttttttgagaaattttatacctcacaaaagcgcttgcgtatgagacggagggctgtgcacaatcgccattttatttcacagaggatttttatatttagaggttatcccagaaaaatggctatctctttttttgataaattttatacacatacaaatgctctcgagcatgatagggagggcggtgcgcaatagaccttttatttttgagggaatttttaaatttatatctatcccagaaaaatggctatctctttttttgataaattttatacacatacaaatgctctcgagcatgatagggagggcggtgcgcaatagaccttttatttcttgagggaatttttaaatttatactctatcccagaaaaatggctatctcttttttttttataattttatac

SEQ ID NO: 25319 - DNA, 2113 bp, Heterodera glycines
gcaaattgaatccgcgaccgcaggatttttcggtcccgcccctgtggattattaaacagttcttggcggatgtaattagattaatagcaaaacagaaaaacaactgttcatttttgctgtaattagcacactttagtctttttcttgattaatgtcaaaaaattcagaataaataattgatttgaaaaaccttacctctgccccacaataaatgagcaaaaatacgttcatgacctaattatagcaaattatggatgcgctacaacgttaacaggaccgaaccccggatttgggccaaatgtaaaacaccttccctgggcgttttcgaggtcgctgatcacgaatctgacatccatttctattaattccgaaccccgaaccccactcgaacaaaaagtcgaaaattaaaattttcatgagagatttggattttatttgatgccagcttcagacaagcttatatatatccggttttcattattgttctaaaattgattaaaacaagtgtaatacttagaaggtgggccccctttttggaaaaatttctttttgttctaaaaagtcgtgaaacatgtttatggtgggttttcagggtcggggaacccgaatccaacattcattttgaccaatttcgaatcccggacccgaattcgaacaaaaagttgaaattcaaaattttaaaaattctcacttttgttccaaaattgaccaaaacaagctatttcccggtcacggtttggtaatacaaaaaagtctttcggaaaagaaaatatttaatttaaagaaaataaatttcctaataaatttttttaaaaattaaatattttaaaaatcttcatcattgatatttattggttttctgaacttttttcacaaaaattatatttggttttcactccttcatagtgatctgaaaagccaaaaatggcttgaaatctggaaaattttcgaaaaaaattcttcgtttttttctccaataccaaaaatgttccatcaaaatttaaaaaataggccggagctgtactttcaggaaaaacttggaacgttactgaccagtgccgggaccgggacctgcggtcagtccctccattggcttacattgaggaacgctctggaagagttcgatatcatccagaagcatgtcgcgaataatggccatgtctttgcgatacaattcgaagttatatgaggatgaagcccgctcaatttcactcgcggtcacataggtcgctggctgccttttgatgtagcgtaccctcgctgaaacaaacgtgataggaacttaatgattattagagatcggattaggccgggcccgtgcgcgggtttacgggcccgcgcccgtaatccgtgtttttaggctggacacgggtttcacgggcacgcgggctttacggcttttttgcacgtgagccgtaccacgtgctgtttccaaacggacgaaacccaactcgtactattatgtagtaaatatagaaacagaaaaaagcgagacagcgttaagtcatcagagaacagagaaaaaaagatactctaaaatagtacgagttgggtttttaccttttatgtaaatacatttttttcctgacttctccatgctctaaatagtgggaaaaacactttcttttttgtgtttgcgaacaaaatgttgggacttttatttacatatttttacatatttcggggttttaaacatattttacatatttcgggatttgatacatattttgtactttttcttacatattttcttctttttttttacatattttgagaattttttacggaaaattttggaaatcctcaaaaaaaatcaaaaatttctgcaaatttttcgttttttatacatattttgagaatttttgaaaatttttttcttgtgaaaaataaaaaaaactttttcgtggcttggacactttgtgggggtgcccatatttacctatgtacatattttgatcaatttttgtacatatttttgacatcacatccctagaaatatatttaaattgtaaaaaatatcactattttcatcaactttttccattttttcactatttttgttaattattttgcaatttttcgtaactgaaaatccgcgcccctttctcaccat

SEQ ID NO: 25320 - DNA, 1647 bp, Heterodera glycines
  unsure (1)..(1647): unsure at all n locations
acccattcattcttaggcacgtattgaggctcggcaacacaaactaacgggtaattggaatgcaacttggaacctgaaatacgccgaactcaaaaggccgactcgagtgggctcaaatgggaaatttggttggcaattaaacataagaatgtccaaatgattccatttttaggcattaagctcaggctgaagaaggagaaaagggggtttttgtttttctcttccaaagatgccaatgtcaaaagcaaaattgtgcaattcggtgctgaacacgtcgcgcaacgagtgtttgagcacattcttcgcgcctggaaatacggtgtcgcggattaacgttattttgcgaatgaatcccactctctttctctcccttctttcgccttttttgcttttcaattctaatcaatgcttttgaactttgttctcttttttgatcacgggtttatgccttttgctttacattcttctcgctttttgcagaactttcatggactatatattcataaaacacattacgtatttatttattcatgaataaaaaaaaagttatcagaagggcaaaaccacttactctgacgactgttcagataatatgtcgtagagtaagtgataaatatatggatgaccaaaaataaaatcaaaatatattaataaaatgaggtcaaagtcaattgagatcgacagtataaatgccaaatcacttaaaaattaattctgtttttgcttttccgtttaggtaaataattaatacccttaaagaaatcgaatcatttattcattgagaagcttgtaaaaaatgttaattggcaggattggaggtaatcgtacgctttactggtcccacaaaaaaaaggtgaaaaaaaggaatttcagcttttaatggtgcactcgggggttcagggcgctgatcacgaatatgatatctatttcgaatcccgaacccgaattccaataatttttttgtaaaaattttgaaaaatacagaccataaaaaatagtttttttaaattataaatataaacatttctagggggtttcggagtcgctgatcacgaatctgttacccatttcgaccaattccgaagcccggacctgaattctgttccgattctaacaaagtgaattttggtttcgaattcgggttcgggattcgaaataggtcgaaatggatgtcatattcgagatcagcacctgcgaaaacccctgagtgcacgggaaccgcccggctcgccgcgaccacttcgccgcggccggttcgccgcccatagaaaaatgtccttttcgccgccataattattgttcaaaaaatttttaattttttttttcaagaatttgttataacttaggctgaaactatggtgcgaagcgaaaaaattaattaaaaataagtttctctttattttgggcaatttaaatgtatatgtattaggataaaattctggcgatggatacaaaagaaggaacgattgaaaaaggcgaagccgattggtttaaataaaaatttcgtcaatgttaccgaatataaaggaggggttgagctccgggcataaaaaaaatttataagcaaaaattctaaaaatctctaatgcacaagtatgnccgacatctccctcagaagaaaatatcagccatacgaagactccaaac

SEQ ID NO: 25321 - DNA, 1483 bp, Heterodera glycines
tgtcttcatttgtagcaatgcgaggctttttttacttcgcttttgcagactctcaagtatttcgggaacagttggcattttttattagaatctgaaatttctttgtttagaagaaaatttgaaatgacataaaaatgaaatgaatgatttatttgatgcaaaaacattatagatattgtatattctctctttttattttctctttgacattatgtatttccaataggcgaaatgaatgtttctggcttagtaggcgaaatgaatgtttttggtttggtaggcgaaatgaatatttttggtttggtaggcgaaataaatagtaggcgaaatgtcagtaggcgaaatgaatagtaggcgaaatgacagtaggcgaaatgttcggttttgggttagtaagcgaaatgaatgtttttggcttagtaggcgaaatgtcatcgtgccagcagaatcactgccttagcattttccctcattttcgtttgtgccagtgtttatttgttagttcggcttttccattataacttttttatttgtcacccaaatgcaacaatcttggtatcattcggaagctcatatgtttcgtgcgtttcataccatagggataaaaacctaaaatataagccctaactatgaacttttgaatgtttcctaatttgtccgggttttaccgtttgaaaaagttaagagtgcatccatttagtccattatgtatttcgatttaaaaacttcataaatcgtcttttttcgttatcatagcgattcacactccgtattcaatcgatatacctttcaatttatctttactatgcctcttcattggacttctgtggacactcgcaacgcacttttgtgcgccgccgttccttccattggcgccttcgtgggctcgacgatggccatcaaagatcaggaattggttcaatttctcaaggtttgctgacaccagagttgagcaattaattccaatcagcttttagaatcaaaactttccttctttcgcccgttgttgcaaatacaattatttgctggccaacactgccgtcaccattccgttcggttacgcttcttatttggtctacaaaattggaggaggtgtcaggttttttgacaattaatggatcaaaggaatgcattgaggattcagttgcaccgactcaaaaatcgcattgggactgtacggtgcgacgctgctcagcggctgttttttggtgccaacgctcaaaaaacatgataccaaggcggtaggcaacctacaagttcatcttcccatctccaagtccaaccctttaagctgactgccaacgctgttgtccttgccggactttccgtcgccacttctgtggctttctacaacatcgacaagatttccgcttattggacgtgagttatttgggagttgtgtcaattgtatttgccaattcagcatgcccttcactcttttggccattttatacgctggacttacggtgaaggcgaattgctg

SEQ ID NO: 25322 - DNA, 1493 bp, Heterodera glycines
cgggcttaaatccggagaaaagtcaattggtgcaatgttttcgggatttacctatagaattaaagaataaaactgacaacttattaactgaaaattataggtgaatcacaagaaaattcaacactcgggcttaaaatccggagaaaagtcaattggtgcaatgttttcgggatttacctatagaattaaagaataaaactgacaacttattaactgaaaattataggtgaatcacaagaaaattcaacactcgggcttaaaatccggagaaaagtcaattggtgcaatgttttcgggatttacctatagaattaaagaataaaactgacaacttattaactgaaaattataggtgaatcacaagaaaattcaacactcgggcttaaaatccggagaaaagtcaattggtgcaatgttttcgggatttacctatagaattaaagaataaaactgacaacttattaactgaaaattataggtgaatcacaagaaaattcaacactcgggcttaaaatccggagaaaagtcaattggtgcaatgttttcgggatttacctatagaattaaagaataaaactgacaacttattaactgaaaattataggtgaatcacaagaaaattcaacactcgggcttaaaatccggagaaaagtcaattggtgcaatgttttcgggatttacttatagaattaaagaataaaactgacaacttattaactgaaaattataggtgaatcacaagaaaattcaacactcgggcttaaaatccggagaaaagtcaattggtgcaatgttttcgggatttacctatagaattaaagaataaaactgacaacttattaactgaaaattataggtgaatcacaagaaaattcaacactcgggcttaaaatccggagaaaagtcaattggtgcaatgttttcgggatttacctatcgtagaaaagtcaattggtgcaatgttttcgggatttacctatagaattaaagaataaaactgacaacttattaaagaataaaactgacaacttattaactgaaaattataggtgaatcacaagaaaattcaacactcgggcttaaaatccggagaaaagtcaattggtgcaatgttttcgggatttacctatcgtagaaaagtcaattggtgcaatgttttcgggatttacctatagaattaaagaataaaactgacaacttattaaagaataaaactgacaacttattaactgaaaattataggtgaatcacaagaaaattcaacactcgggcttaaaatccgagaaaagtcaattggtgcaatgttttcgggatttacctatagaattaaagaataaaactgacaacttattaactgaaaattataggtgaatcacaagaaaattcaacactcgggcttaaaatccggagaaaagtcaattggtgcaatgttttcgggatttacctatcgtagaaaagtcaattggtgcaatgttttcgggatttacctatag

SEQ ID NO: 25323 - DNA, 1286 bp, Heterodera glycines
acataattacagtattcatcattaccatacttggaacaagtacagattttgcaatgagtgccgacggactgttggtggaccattcttccggcacaaatggaaattgtgcggggaaagtatcggaccaacaacagggcccaggtgaaagcgaagagagggcggtgccaaattgggacattcgcacggcgggagagccggcgcgagtgttggcacagctcggcttggccgagcacatcgctctgttccgggagcaggaggtcggacgcggaggccaagtccagacgcggccaacccttccccttcagattgacatgcaggcgtttctgctgctggacgaacagtgcttgaacagtctcggcgtggcaaccattggggcgcgccggaagattttgcacgccattcgaagtcagtggccgccgtttgcgccggcattaattccccccccccccttcagaacttagggattccgcccaatgccacggaatttattcgctgtgaaaaggcgccgttctttcgttggtcattctttggtggacctttcgtttcattttccttttcattttgccttaatcttttattgttttttcttaattgattatttcggggattttaggaaaatgcatttttcgcttttttatgcctaaatatttttattcgccaaattttgcatttttttagattttattgctgactttttatgttttccttaatttattttcttagtttgaagtcagcgtatatttagtatttatttattttttgcaaatgttttcacgcctaaaatcccctctattaattaataattgtcctgtgattttctccaatgtgccaaaactttacccatcttttgccctttcttcgcattgtattttttgtcactttaattaatgaataaataataaattgaaaataaaatgacaaggttctcagatgtgaaggtttaagctcacttttggttttttaagcaccggtaggcgaactttttaaaataacacttcgaggctttttgttgcattttttgtgttttttttgtaatataaaaaaaagcttttaaaaattttcatatatttgaattacctaaacttaatttctttttatattgtaattttattctgcacgttaaaagacgccctaaatttgtttatcatttcaaaatgaaaaaagtaattggcgttaaatgttgtggcgttcaacgacactcactttacacccccaacaaaaaagttttatttatttactccaaacaccccccaccctccagcagccctcccactttcgccaccccc

SEQ ID NO: 25324 - DNA, 855 bp, Heterodera glycines
ccaaaaatgaccgaaatatgctctaaaagcccaaaaatggcaaaatatgcatttattctcgaaaacccccaaaatatgcttttatatgcactaaaaaccttcaccaaatcaaaaaattttaacgtagaaatgctatttttgagcccctttcttcatagcatatgcgcagaaaaaatgcaaaagcatataatttagccatagttataaatagggcccggatttttatgtgctaaaaatcctgaaatatgtaataaaatatgtgctaaaaaatgctgaaatatgtgctaaaaacccccaaaaatgccaaaatatgtgctaaaatatgtgttaaaaattgaaaaaataagtgtgtttttgcataaaaattcccaaaaaactcattctttatcatttttagcccatacaacgcaaatcaaatacatttcgaagtgtttggggtaaaattgtctttttttgataaatcatttctataaattgaaagttccagcagagaacttcgaaatccaatgacgaattaatgaattcgagatttcattagtttctacaatcgaagaaaacattttttaatttgaaaattatgttaataattaggaaaaaagtcgatttttaggggtgtatttttcaattttcttgtatttttattgcaatttttctcaaaaatgccaaaatatgtgcaaaatatgtgccaaaccccaaaatatgtgctaacatattttatgtgccaaaacgccaaaatatgtgtttttatgtttttataagtcgctctaaatcaaaaattgttcggagataatgctatttttgggcttctctcgccataactaagccgcaaaaaaatatgtaaaaacataaaaatcc

SEQ ID NO: 25325 - DNA, 711 bp, Heterodera glycines
gaggtggaggcccaatcatcgtcaattgtggctcaggaggaggaggaggaggcggttgtggttgcggtggtggcggaggcggttgctgtggccggaagaagcgcgagacagcggcattagaagcggttcagccccacttcaaatcggacgaaacgccgtgcccacagacagagtggagacaagtcattgatgaggttggcaaactgatcacagatccaaatcacatccctaattgctaattttatagagcatccgcgttgacgatgccattggctcggtcaatgccattcaaactgctttgtaccgccgctatgccaatcagaagttcctggtcacctgttcggcagctgatgaggacaaaactggcaccaacaaagtgcacttcagctcatccggcgacggttactgtaacttggtcaaagaacgcatttggtgccaggcggtcgcgctgagcgcgtgaaaaacgcatgctatgcataaacaattaattctttttgatctttaattattattttttaatgttaaataattctccattatttggtttttctatgattcattaattttaaaatacttatttaacagtgtgacatttgctttgaaaaaaattaaaaatttctggcgataagtaataaaattgccaaaatatttgttaaacttaatagcgcgctcaaatttgtaaaaaagtttggcgaataaattttgtgaata

SEQ ID NO: 25326 - DNA, 1452 bp, Heterodera glycines
agttcattgtccatttcgttgaaaagaaatggcaattttcttagagcaaaacaatcgtttgataaaggcgaaaacaatcctaagaatagactttagaaaccaactaaaaaacaaacaaacaaacaattagtccggcttttctttggaccaattttctcgccaaaaatttgatgtcaggaatccgcctcaagtaatcattgtacaaagtttgacgaatggatgtaaaatttattaatatttcgaccatatcgagtcgttctgaaataaatatataataaatgtcaattttttgtgtatgaaaatcaccttcaatctgtcgaatgttaaagagtggctggcgtaaccattcgcctaaataagtttcaaataaaaatgcagcgttaataataaattgataaattcttacgtattaagcgtttgccgggctgagaacgacatttgttcatgtgatcaaaaagcgtgacagaaggagaagaaaaaacagcggaagcatcttaatattaggaaaaattaaatggtctgaactaacagtgcaaattccatttttcctaccaatttctccaccgattgtgaaaatgtccaatgcacgcaatgtagcattgctcaagtgcatgaatccgtgctgcccaaagcgtacaacagaaaaagccccttcggattggtgagaatcagccaacagttgacagtgggaaaggagcgaatgcattaccacccaaacgatcggagggaattcaaaatctgaaaaaacgaaacgaaaccttttccccctttattccaaaattaccagagaatttctggtggaaaagccttctcacttcggccttgcacttctccacatcttcttccacttctttctccaaataatttctttgtgtttgtgcccgttgaattacgttttccaactttttgaaacgattcggcgcatttttggcgttttgtctgatcaacaaacattcgcttggctgaaatgcagcaaaacattgctcaaataaagtgaaatttggtgtgtcgtttagttccgcgataacaatgcgcatttcttgtgaattgcagaacaccaatgataatttattctaaacagaacaattaaatgtcatcagttttttattaagaattttttactccaaaagaattaaatccttgcggaaatcctttatttttagaaaatagttttaattttaaagtaaatctctaaattgcctctgtgctcaaatcatcgtcattcagccaagcgcacataatcgtagaaagttcggctaattcaacggagcccgaaacaatgtcttcaaaatcttccatatttccaatggatccctcaaatatcaattaaaaagcttcatcaaattgaattttgaattaaactttagctttgagtataaatttgttcggagtgatttcctcataaagctcaattctgtagcgcaaaagtaagacgagatctttgataattcg

SEQ ID NO: 25327 - DNA, 1692 bp, Heterodera glycines
tatcaagaaaaaaggaaaataggcaaataaaaaagtgcgaatgcagtcttgatcattatttcgttgcaaattagtttgggtttggcatttcgtaaatgatggttacacatttgatgaatttaagcgctttttcttgccattcctcacacacaatgccgtcctgtggattatgccacaatcggtctccttctgcgacgccattttattatctttttttgtattttactgtcggattgttcactgtcggattgtccactgtccaattgtccagtcacgttcctccgccattctaggggagagaaaagatcgaggtgggaattccccgacaaaatttgttctttatagcaaatgcgtagaaaaatatgcaaaagcataaaatttaatattgcgacgccaaaatgtcccgcgtcaaagtgacccgacccattaaattaatgattagggttgtaaattatatggattaacatattttttctgcgcatatgctatgaagaaaggggcttaaaaatagcatttctgcgttaaaattttttgatttggtgaaggtttttagtccatataaatccatattttgggggttttcgggaataaatccatatttcgccatttttgggtttttagtccatattttggccattttttggaaattttcacaagaaaaatgaaaaaaaacgaaaaatacacccctaaagatcaactttttggaaatttttaaaaattacaccccacaaaacacgaaaaatttgagttttcgtcgtcattttggcattttcaataaatattttcgtcatttttttgcgaacatttctttttttttaatgagaattttttcgaaatttggcaaacttggaggtgtttttgatacaacgaacaacaataaaaaatatgcatttttaagttttaaaccccattttttggttgtttattgtactttttaggtttatttaagcaaatattaaatatgcacaccttttttgggatttttgggggtttacaacatatattttggcattttttatccatattttggtccatatttggccatttttggcctttttagtccatatttcgggcttttttagtccatatttaatgtccatatttcgcgttttttagtccatataatttacaaccctattaatgatgaattaattcaaatgaatactaataattagggatgcaatttttaggctctaaaaattgccaaaataggtaggctttgggttctaaaaaaccccaaaaattggctctaaaaacctcatttttaggggtgtaaaatgacaaaattcattcaaaaaggtaaaaaaataagtcaaatcagtattgagttaccttattttttaaattcaaaaatttgtccaaaaaaaatttaaggacgatttttgagaaaattttttatttcttaggagatttattttcagaaatttttgggtcgattcttaagggtgtatttttcgtttttattgcatttttttaataaattttcggcaaaacgccaaaataggcaaaaataggctctttcaaaattttttaggcttttaagctctaaaaataaaagcctagaaaataggcactaataactcgaaaagtagcttaacaacagcccaaaaaaaacatgtttttcgtgcgtttcaggccacggagagctcaggaaaaaataggcttaaacctaaaaattgcatccctactaat

SEQ ID NO: 25328 - DNA, 2034 bp, Heterodera glycines
  unsure (1)..(2034): unsure at all n locations
aacattaaaaagacatttctccgtcggttaattcaaagacgaatatgaaatgataaattgtgcaaaaatgtttggaagttttccgtgtttgagtcacttcggggtggctcccaaccagactccggttccttccccaaaatttattaaattatttgcaaaaataatgttcagaaatataattgtacatagggaaagaaaagggggatggcgcacattcgatccccttcgaaagttgaaacaaatgagatgtgtgttaattttatttacaaaaaatttgagcgaaaggaacgaaaagagagaagtgagcattaatgaggttcaattggagatgagtttattggattgaatgtaataatcattataaaaaatttacaaaaaaacatttttggggagcaatgttctttacatatgcccccttttgcggacattcttaaaaatttaaaacacataatatttttatttcattttttaaagttttcattttctcaacccaaaaaattgtggtaaaattttgagcgttgggacttttccctttctctcctttttatatttttttatcgcacaaacactttgaatcggaaaatttgtttgctgctcattagtttaaactttcatcccgccaaaaacccatcgtattagcttttattaattagtttaatcgatggcatcccaccattttgatcattttttaattttcaataatttaataaaattaatcaaaaaacataataatttgcttattttccaattaaatttaaataaaaatgactttataatttgtttatttctcctttagtgttgccttcattgttttgtgaatttgccatgtcttcttctccgccaaaaagtgcccattcgccgcttttggcccaacaactgtcgtcgacggctttgtcctccactgcttcctcggcaacaatggcagcactggaaggcacgagtggcacatcgacggacaaaacgacaaaacggacaaagcgaaattccatggaatcgaaggaacgcgaaaatggcatctcgtgagatatttaaaggcttttataaaatttgttgaatatttttttttattgttatttatttttcgtacaaaaatttaggggcggattttttgaaagttcaccccagaaagatcaaattaacctttattttatattttttaattttaaaaatttaaatgagagagagagagggtagcgcaaaaagggattataataccgaaaaacaaacatttttcttaaaatacaatatttatcaagatgtttttagcacccatctgaccctgttcaacttcatgaagggaatgatcggctccggcattgtaaaatgcttattccgtccattcatttgcaacgccttttctgttctttgaagctgactttgcccatcgcctttaaacaagccggcctttggacggcgtttgggcttgtctttgtgttcggcgcattgaacacaattaccatgcatatgctggtggggggggggagttcaattaataattttgtgatgttaattactataattattgctataattgcggcgcagttaatttttacaaattttttcaattgtccgatcgcttagttttggattgattttttaggtgcgttcggcacatcacttggcaaaaacaaagtgggcaccctcgcaatcatttttttttgtcattacttttccagaaaaggagcgggaaacggtgggggcccattgagttacggtgaggtgatgcacgagtcgttgacggacagcttcgaatgggcacggccatatgccaaaacagccaagtaaaatgccgtgttttggttaggggccgtcccagagggagagggactggcacaaagaaaaaaaaaaacgaaaacatttggttgtcaccccaaaccccgaaaatcatcttaagaccgcggactgttccggtattttggttgcaccagtttaagcttaaaggcaattttcttatggggaatgggcatccctgaagaattttatcaaaatgacggtgttcccaantgattgcagagttttcgttaatgccacaat

SEQ ID NO: 25329 - DNA, 1086 bp, Heterodera glycines
ccccggccgagactgagacaaccccggccgaaactgagacaactgcagccaagactgagacaacttcagccgtgactgatacaactccagccgagactgagacaactccggccgagactgaaacaactcctgccgagacagatacaactccagccgagactgagacaactccagccgagactgaaacaactcctgccgagactgatacaactccagccgagactgagacaactccagccgagactgagacaactccggccgagactgaaacaactcctgccgagactgatacaactccagccgagactgatacaacttcagccgagactgatacaactacagccgagaatgagacaactccggccgagactgaaacaactccagccgagactgatacaactccagccgagactgagacaactccggccgagactgaaacaactcctgccgagacagatacaactccagccgagactgagacaactccagccgagactgagacaactccggccgagactgatacaactccagccgagaatgagacaactccggccgagactgagacttctccagccgagactgagacaaccccgaccgtgactgagacaaccccggccgagactgagacaactgcagccaagactgagacttctccgtccgcgactgagacaactgcggccgagaccgagacagcttcagccgagactgatacaactccagccgagaccgagactactccggccgagaccgagacaactccagccgagaccgagagaactccagccaagaccgagacaactgcagctgaaactgatgcaacccgatccccgactgctccatcaaccagaggcggatattatcccggagctaggtcaacacattcatcttctgccccaactactccatcaaccaggggcggatattctcccggagctcggacaaccgattcatcttcagctccaactccgccaccaaccagaggcgattattatactgggacaagtggcatccctgaaacgagccccccccccccccccccagtattgggcaaaggtaaagaacattggtcccgaaaaaacttttttt

SEQ ID NO: 25330 - DNA, 1643 bp, Heterodera glycines
cagttcggcggggccagttcggcgcgggtttttcggcgcggggttttttcggttcggcctttttccgctcaggctttttcggcgcggccagttcggcgcggccacttcggcgccctatataaaatgactttttcggcgccgaaaaaattttcaaaatctggagcacaccctattaaaaacaaaaaatttcctgctgacaactacatacacactaattttgagaaaaagttaaaaaaatatttgttttgcagtgttgtgtaccatcgaatacctggtcagtttggaacttttaagtcaaatccaatataaatattcgagatttgaatccggggttctgagttaggcaaacttatggtcagattgtaatcagcaccctcgaaaccccccgattggtgattttgaaccaaaatataaaagttaattaggaaccacaattatgcaccattgctcaccattgcattagcacgttactttgaaagaaaatggcataagttatatgcacaatcaaaggcagcaaattaaaacttttttgaaaattttttgggatttttaaacactggagccgaaaaagctattttacatagggcgccgaactggccgcgccgaaaaagcccgcgccgaaaaagctcgcgccgaaaaaaccccgcgccgaaaaacccgcgccgaaccggccgcgccgaactggccgcgccgaactgggcggttccccttgagttacctggtcacttaatttgctaaactgatttagttgatgaaatttttgcgaattttttgttggtaataacttaaaacaaatggctgatataacaattttggctccgtattgatactgcaggaaatgacagctcttttaattgtgtaccagaatatcttaatacattatatatgaccagcttgccaaggcatgaattgagatagaagaacgatgttgttgttatgttagttgaaactaatggtactggtactaggctcagaattaaaaatgttagataaagttcttcactgcgagatcttaacagggaacaaagctggcactaaagtgcttttaatcctgggatggtttaaaagttagattgcatccaaaacatagagataataaagtgaaaatatttgttttaaagaaattttgaccgattaaattttttgaaaagctaaacaaaaagaaaaaaagaatttatacgttgataatctatgaaatgtgaatatattgaagtcaatgtctgaaatctacaaatacttaaattacaaaaaaccctttttagtggtttaagcataaatttttgataagcattttttaatattttgatcaatatgtttttggaaagtcaaagaatcaaatttatagcatatatcaggtaagttaatcgctacattattgggggtggtgtagcgagtggtgggacaggcaattgtgcacgtgactggacaatccgacagtggacattctgacagaggacaatccgacagaggtgtacaattggacagtggacaaattaatttacaacgaaataatcttttagcctgcatttgcacttattttatttgcgtattttccttattttctggatatgacacaatttgtcccattcggcgacggcattaatggaattttttgtgcattttactgtcggattatccactgt

SEQ ID NO: 25331 - DNA, 1126 bp, Heterodera glycines
gtctgatccaagtttaaagcatcataacttttttctcagctgtccaaattttataagtttggcatcgttcgaaagctctacatgtttagaagcttttgataagctatttgtaagcgattgaacagcttataaaaaagttgaaacatgaatattatcaaaaagtcaaaatttttgcatattttacttataacttttttatatgtcggtatatctttgcgttttttgaaaagccgatagagcttgttaagagcattcgaatgataccaagtttattgtatttggtcaacaaataaaaaagttatgatgctctaaacttggctcagactataccggccagactaaagtgtcccagtccggatgattgtatgtatgcccattttatcatttctctttcattgactaaattgcgggtgcgagagaatgttttggaatatttaaatgattaaaaaaattcgaatttttaataattatgaaaatgtaaattggtatttttaattgaatggggcattaaaattttaatgggaaaaactaacgaaaaaatttcatggttttctacagaaaaattttattttctcagccacaataatttagaaaatttgaattgtccgctgaaccaagtaattttctgaaatggaaatctgtggccttgaaaattgcagcaaaacgacaaatttttataaaagaaaatttataagtataattatggttagtcgggaccgggagttttccgaggctgcaaaattttgaaattgggttgaaaggttaaaaatgttcagtatatataagtcggcctaatacgaattgtattttgtcctttcaaaattggacttcacctcaaacatatgccattgatactgaccgaaaaatgagggacaaaaatgtttttaaaaacatggaattttccaaatagttgtgaagtggttaatggaatggatgctaatcaagccaaccacaacaaatttacttatttatttgcacgaaacaatggaatgcgtttgttcgttcgcgcgggcggcggagtgccgtcaccgccgttccgccgacgacgggcgacccattaaaaatggattattagcatttaaggaggacgggggtagcagggggagggtaaagcggggaccggagg

SEQ ID NO: 25332 - DNA, 1396 bp, Heterodera glycines
gggtcagcaataaatcggacgtcattatttgttttgctttttcaaaagcattttgctgttcggacgtccattcccaagctacgtccttttggaggagtttgtcgagcggtgcacgcagttcgcgcatgcatttcacaaatcttccataataattcaaagcccccaagaacgatcggagggtgcttttgtcaatcggtgcgggcattttccgaattgcgtctgaacgcgacgggtcaggacgaatgccgtttgctgacacaatatgcccaaggaacaaaagttcgggctgcaaaaatttgcatttgtcgagttggatgcgaagaccgtactcttttatgcgcccaaaaagagtgtaaagtgccgtgatgtgttgctccagggttttcattgcgatcaatccatcgtcaagatacgcgaaaacaccagggatgccagcacaaatttgttccatcaaatgctgaaatattgcctgtgccgatttgactccgaacggcatgcgttggcattggaaaagtccgcgatgtgtgttgatggcgcacaattgcttggattcttcatccatttccatttgcaaatacgcatcgcgtaaatccaaattagagaaaaattttgcgccattcagtgaggcgtaaatgtcgtccggccttggcagtgggtggcggttcaattccaatgcattgttgaggccggtcgagaagtcgatgcagactctcgacttgccctttttcttttttacggccaagatcggtgcggcccaatgactgaaatcgatcggcttaattgcgccaatttgaagatttgaagaagacggtccaattcggcattcacagcttccatggcgccgtgtggaatgggacgtgcgcggaaaaagacaggctttgcatcagatcgcagaatgatatgcgccttggtttttgacagtgtcacaatccatcttcaaaaacttccgtgaaatcattttggagtgccgctgtaagcgatgccacatcattgatcgatttgtttggtggcttcactgccgaaaaattttcaatcattgtcgcctgatcagccgatttgctggacggaaataaaatttggcggggaatgatcttcaaagcttcgatccacggcaatcccaataaattgtgtccgacttctccgctcacataggcgatcagagtttgcggtggtttgtcggaaaattggacggtgcagatgaatttgccaagcaaggcgaatggctgatcattgcagtttttggcatcgatgtcggatggagtcagttccggttctcccaactctcgccatgtttgcaatgaaataattgtggcctgagcgccggtgtcgccattcatggaagtttgccttccattaatcaaaatgcacaatttccaccatcgtccttgagtcgtgc

SEQ ID NO: 25333 - DNA, 1796 bp, Heterodera glycines
  unsure (1)..(1796): unsure at all n locations
tgctgaattggcgagtcatcgcctccaaccctccggtgctcaattttacgctcaaaaaggatggaaaagtcatcggggacgaggagaatggacgacgcaaattcagcttcaaaattgacgagagaggaggcacaattgcactgctcaatgtcagaaaacattggtcgtcattttcactgtttcccttcagatcaacaaagtgaacgacgacgactatggtcagtacacgtgcactgctcacaacggaaaattgtcggccgatcagcacgctttcctcgatcgaccgagtgagaaaaagggagagaggggaaatatggccaatacgggggacacttacccaaactaaattttccaatttttagacccgccaaatcagccgttggtgtggccgcttcaagtgacaaacaattcggtgcaatggcacgtggaggaacagacgaaggcgggacagttgccggtctcctattttcacatcgtatacaaagcgatcaaaagacgagtccaaaagcaacagaaggaagagtccaagcaggtcggaatcatagtgttgaaattgaaaaaggggattttcttatagaatttggatggatcacttgaaaatgccatggcagcggacgaagaggaagacaacggcgacttttggcagcagcgacgcctcacaacggaggctgtcgaccgtcaaagtggcgacgagaaacaatcgcttcagaggacggcaactgggaagaattgaagcagaacgccagcgaaatgaccgcaattcggcaaaagagtggggaaaatcattttatttctatttcttgttcaacatttgtttatttcagatgctgaaaatgagtacgacattggcgggcttcagccgttcactttgtacgagttcaccttcgtggccttcaacgaggcgggcagcagtgaccctgtgacgatgaaacaggagacggtgaacgattgggtgccgccgccacgcgaagtgcaaaacgccgaacggcacaacgaaaatgttggcgtctcgtccagctcgacatcagtggccacttacatcagcgtcggttagtcgaccgttcattatttattttatcccaaaaatgatacaacataatttaaagcattgatttctccttcacaaagggaaagatagaagcgttcgtaaaagcgaaaagaattttaaaaatttaaaaaggttttcaaatatatgaaataatgaatagataatcttcgctcattaatttcattcaaaatcaaataaatacgaaattgagtaacattcttattaggcttcgtttttttaatttcataaattgttttatcaaaagatttcgcaaatttacgaaaatctgaacaaaattatgagggtggtgcaatctaagcgaatttatcaacttaaaaaaattgttaaaatggtgcacttcaatagaaatagtaccaaccaaaagtgcttatgtcttaacatttgtttgtttatttatcgccggtgtctttaggtttgatcggatttttcgtgctgtccagcttcgtcatcgccgctgcctattgctccatcgactcgggtgggaatgcctccccctcctccgccgatggcaaatgcattgcgacgcccacccccgtgccctgagactcaattaattctttttttttttgaatttcacattttttgcgttgctttacttatttatttttgttctttttggtgctcattcattccttttttgattttctttcgatttcaaacaaacaccataaatatctcttgaatctcctctctttcgcttgatcttttccnnaatttacgacgatca

SEQ ID NO: 25334 - DNA, 1570 bp, Heterodera glycines
ctgtttaaaaggaattaaaaatttttaaaaattttattcatctccctctttgatagaaaaagcatcagagtgcctaaactaacatgtaaataaaatttggtgcgtttcagaaccctttctgaaaaaatatttaagaattaattttgcaaaaaataaataaaaacgaaagactcagattttcgaaaatttttttgagccagctagctcggcgctcatttcagtgtaagttagtcctttaccggggagtatccctgcaaagtttggtacgcttctgctcaattagcaaaaaatatgagtgatcgaattttcactaaaaaagttaagcctacattttttggcatatttaaaaagcaattaaaaaatttttaaaatttaataattttcctgcaccgaaggtactcactcggcctcttcgcggcctcgtggtgggccttcgcccccccccctcccacgcccttcagagcacgacaaatatttcaacaaaaattttgaaaaattgactagagcaatcgaacgctaacggacgacctaatggaaaaaaatccccgaaggagagaatttaattaaatccattccttcgggggaccgtgccgggtgccgcggggtaagcagtgctggttcgtttcatcacggcaccgaaccttttggctagtcagcaatcgttgcttaacttgccagatcggacgggtgcgcatgactttctgaaaaaaatatttggggtactcaatttatggggagcaaaaatcagaaaagtaatataactatcgattcggtctccccataaatctgggcgcatcggttcggactgccccgaaaacaaaaaaatcgattttttcaagtgtccgtttggggtactcaaacatttatggggagcaaaaatccaacgcagaattaaagtacaggctatagggaagctattcccgaaggattcggtctccccataaatctgggcgcatcggttcggggggactgccccgaaaacaaaaaaatcgattttttcaagtgtccgtttggggtactcaaacaattatggggagcaaaaatccaacgcagaattaaagtacaggctatagggaagctattccggaaggattcggtctccccataaatctgggcgcatcggttcggggggactgccccgaaaacaaaaaaatcgattttttcaagtgtccgtttggggtactcaaacaattatggggagcaaaaatccaacgcagaattaaagtacaggctatagggaagctattcccgaaggattcggtctccccataaatctgggcgcatcggttcggggggactgccccgaaaacaaaaaaatcgattttttcaagtgtccgtttggggtactcaaacaattatggggagcaaaaatccaacgcagaattaaagtacaggctatagggaagctattcccgaaggattcggtctccccataaatctgggcgcatcggttcggggggactgccccgaaaacaaaaaaatcgattttttcaagtgtccgtttggggtactcaaacatttatggggagcaaaaatccaacgcagaattaaagtacagactatagggaag

SEQ ID NO: 25335 - DNA, 939 bp, Heterodera glycines
aagcgcttttgtgaggtataaaatttctcaaaaaaagagatagccatttttctgggatagagtataaatataaaaattccctcaaaaataaaaggtctattgcgcaccgccctccctatcatgctcgagagcatttgtatgtgtataaaatttatcaaaaaaagagatagccatttttctgggataacctctaaatataaaaatcctctgtgaaataaaatggcgattgtgcacagccctccgtctcatacgcaagcgcttttgtgaggtataaaatttctcaaaaaaagagatagccatttttctgggatagagtataaatttaaaaattccctcaaaaataaaaggtctattgcgcaccgccctccctatcatgctcgagagcatttgtatgtgtataaaatttatcaaaaaaagagatagccatttttctgggataacctctaaatataaaaatcctctgtgaaataaaatggcgattgtgcacagccctccgtctcatacgcaagcgcttttgtgaggtataaaatttctcaaaaaaagagatagccatttttctgggatagagtataaatttaaaaattccctcaaaaataaaaggtctattgcgcaccgccctccctatcatgctcgagagcatttgtatgtgtataaaatttatcaaaaaaagagatagccatttttctgggataacctctaaatataaaaatcctctgtgaaataaaatggcgattgtgcacagccctccgtctcatacgcaagcgcttttgtgaggtataaaatttctcaaaaaaagagatagacatttttctgggatagagtataaatttaaaaattccctcaaaaataaaaggtctattgcgcaccgccctccctatcatgctcgagagcatttgtatgtgtataaaatttatcaaaaaaagagatagccatttttct

SEQ ID NO: 25336 - DNA, 1089 bp, Heterodera glycines
tcaaaacgcttcacacttctctccacgcttccaacttcagcttctttctccagcggatgattacgcttcatcctcgtccgcttcatcttccgcttcgtccgcttcgtcttcttccgactttgtcctccctttcctccatctttgtcccctgagtggtcttctcagcttacaaactcattcagtcgcttccgattatgcgattgaactgattgttgaagacgaatggacgggagcgaagggtagcaaaaaattggagctccatttttttgatgacagtgaacagagtgatcggatggtccgttttgatcatttggcttttccttctctcccctttggctccgattggcttttccttttccctttcagatgaattttatccgccaaaatctctcaatgaatttcgataattattcatcgaattctttctctttgccggcattttctttttgggtggcagaaaatgctgcgattggcacaattgtaggccaattcgatcagaaattggtcaacgagcagacaacattgatcggagccgaagagatgcctttcgctttaaatattaaaaatggcactttgacagtgatcggtcagtgggacaattgcccaagaaaaattggtcaaatttaaattttaaaggtccaattgacgctgaaaaggcttcactcttttcttttcaccttaacagtgattttgatgatgccattgaactgccccgaattgatgttcatgtccgaggttggcatcggctaattgctttgcttgtgagtaattaatgggatttaaatggctaatttcagatgaaaatgagcattttccaacggtggagggtgccggaggtgcacttttggttgctgaaaatataccaattggaggccgaatattgcgaattgacatgagagacgaagacagaacgagtgaagagggggggggggggggggaaattaggggaaaattggcaaatttaaaaggatttgacaattaatcttttacataattagcaaattcactttggcttctcatttgtcaggtgaattggtcgccttcgttgacccatttttgacggatgagcacaatgcgttttttgttgat

SEQ ID NO: 25337 - DNA, 2104 bp, Heterodera glycines
ttgattaagacaaaaaagataaaaaataaagggaaatgaattttaatgtaatttttaatctttgtaaattaattacttttttatctaataactggctctttgttggtttttctttctaatgtgaattgtaacttttggtaatttttaaatgcaaatttcctcgggtatcgaccataatgctgttacatttatccaaaaaatccgttgtatagtctctggcagagacaatcaaaatgatatcaatggacagcaaatttttattcacaatcgggacgcaattgtataaaatttgcgtacactgaactattagaataaattaactaaaaatagcagtgcattttttcttgttttgatttaatttaaaatatgtattcagttgaaaaatggctatattaatatgaagtcaatataaaatggcaaaaatttttaaatatttaattttataaaaaaagggttaaatcctatataataaagttgagtgtctgtatgtttctgccattgtttgaatttgtgtggcgttatgttttgtttttgcgttaaaaatgcatttgaaaaatgaaaatgtttttgttttgttttgcgttaaaaaagcatttgaaaaatgaaaatgtttggttttgatttttcaatttgttttgcaataaacattcttaaaattgtacctatttatttgcttttttatgtatgttcatagtttattaagttatttgttatataaatttgttttttgtaaacgaaaaaatttatcagtatattgtttgagtttgatttagtggttgttgtttctttgtttgtttattttgtttttgtgttctttacgtgaaataattatgtttatgcttaatgttatttgaacttttaatgaaatagaaatgcatatctttggtttgttctgtgactttagtgtgagacactaatgtgtgccatgcttttgataaaacattagtggtttgttctgtgactttcatgtgagacactaatgtgtggcatgcttttgataaaacattagtggtttgttctgtgactttcatgtgagacactaatgtgtgccatgcttttgataaaacattagtggtttgttctgtgactttcatgtgagacactaatgtgtgccatgcttttgataaaacattagtggtttgttctgtgactttcatgtgagacactaatgtgtgccatgcttttgataaaacattagtggtttgttctgtgactttcatgtgagacactaattgtggcatgcttttgataaaacattagtggtttgttctgtgactttcatgtgagacactaatgtgtgtcatgttgtgccataaggaaatgccacaagaagagatgatgaaaatgccaagaatgttgtgccataaggaaatgccacaagaaacaagaagagatgatgaaaatgccaagaatgttgtgccataaggaaatgccacaagaaagaagaaaagacgaggaaaatgttcgatgctggtgggttgagtcccagtgattggaatgatggtgggttgagtcccagtgattggaatgcaggagaattgagtcccagtgattggaatgctggtgggttgaatcacagtgattgaaatgttggtgggttgagtgccagtgattgaaatgcaggagaattgagccccagtgattggaatgctggtgggttgagtcacagtgattgaaatgttggtgggttgagtgccagtgattgaaatgcaggagaattgagtcccagtgattggaatgctggtgggttgagtcccagtgattgaaatgctggtgagttgagtgccagttattgaaatgcaggagaattgagtcccaatgattgaaatgctggtgggttcagtcctggtcattcgaatgctggtgggttgagtcccagtgattggaatgctggtgggttgagtcccagtgattgaaatgctggtgagttgagtgccagtgattgaaatgcaggagaattgagtccctagtgattggaatagctggtgggttgagtcccggcgattggagaaaaagccaagaaaaggatgcgaggccgcgaagcggccgagccagtcgattttatcattcataatcctataatacaatccgtactacctagcgg

SEQ ID NO: 25338 - DNA, 1623 bp, Heterodera glycines
ttcaaaaagtccagcaggcatccgtcagacgcaagttcgaagaccagcatcacaggctcacgcgtcattgcgattccataaagttcgatgacgtttcggtgcttcaacttcctcacaatgcgggcttcgctcatgaaatcattaatctgaacagagatgggaaacaattgcaaaattaatcaaacacccgcccgtctcccacaaatgtcaccttctgcttgttggcagtttccaaaagtcgtttaaccgccacgcgcttcttttgttttggtgttcgcgccaaaagtcctccaagaacaacgccatattttccacgtccaagctcctcgcccaatgtgagttggttgtgtttgatctcccagtcggcatgcttcacgcctctctttagaacaacgcaacgtccctgtaaaaaaagggggaacaattgaatgaatttctgatcctcccgttttctcacactaatgagcgaatcctctgagcgctggtgatattcgatgaagccttcaattgaattgatgttctcattgtcacgcatgaaagtcccgtcggcgttttcgtaaaagtgcacatccaaaagttctccatttgtgttgatggacagagtaaaagtgcgagtttcgtccttgtcttgcgttcgccgaagaagaaagtcaccatccttctgaagccgctcttggaggtcctcttgaacgatctgaaaaaatgggagggaaattttagcacaacacgggcggggctcatcactcaccagtccatggtaatattcgtaacgcagcaaattgagttcggcaggatccattgaaaaattcgtccgcgtagacgagccccagcgattgccaaatggatggcaacggaaggtgttgaacaaaataataatagcgatgccgaaattaatttgttagaaagtgaatacaatggacaaaatgtgttccttttatacacaaattttcacaaagtggcagcaccactctaaaatgtgtgcaaaacgaaaaatgtcggtatttaaataagaattctgagagggtcaactcattttgatggaaattcttttcgatggaaaaagaaaaaatcaactgaaaaattatgcctttttgggactgaaatggacgcctataaaataaagtttaaaaaacattaacgtaaaattcagtcccggaataaactaattgtcgaggatggcctaatcaaccacaaacagaacataaacagcatgaacccaaatttaaaaaaaagtcagaaatagaatgtacggcttttataatcgccaattgccgtttttatgcttttccgaaaattaatttttttgccaaaatttgtccatatatatttcataaaaattcttcagtttttcaactttgtctgcggcgattgttggcttttggtgttcgattttcttgcgccttctcagcttggccttggaattgcactgattagccgccgctttgacttttacgtggacgaacacttcaagacacgcaaatggaaattgaacaacaaattgcttattatgcaattggacatcgaagaaaatggcacaaagaaaatgcaaattgtcaaatccgcctttggaaatccattgccaatcccgcgaaatccgtttcccaacaaagtcatcggattcag

SEQ ID NO: 25339 - DNA, 2088 bp, Heterodera glycines
gttgtaaagaaaattttcggaaactaataaacataaaaatttgcgaaaatttcgaaaaaaattctctttttggggatgtattgttgaaaatacattctccctgaagaaggagacacccctagaagtcataggaaaattggataggtttactatctcaaaattttttgatcagaatacccataattgagggtccaaaatccgaaccttaagtttcaaattttagttatatctccggtatttctttagatcgcttaaaaagatgcaaattaggttggttctccaattcagaaattaattaatcccaagaaaacttttccgtttttttctacgtcgcagaagatttattcaattacattagataattaatatatggcacaaagatgtgaaaaatatttattaccattacaaaagtgttggagcagagcaccaaaaaacaaaaggatgaagattggacggggaaggaagcagcagttcatttctgtttattggatttttcgtttttgtctataaaattaaaaattcaatttaaattaaaaaatattttttcattaatacccaataaaatttaatgatgtgaacttttcaattcgacaaaataaaatgattaagtccaattcattcacatttgacgactgactgactgttctgcttctgctatgattatgaacagcaaatttccgcccaatttgatcgtcggtgaataatgaaacgcaaaaattgtggccgaacgattcatttggataaagcgattggatggcttttaattaatggcagtagtaactactcaccaaaaacaacagcagagaatgtaaatacgatgggaaaaaattaaattgtaaattactaaaaataaatgtttttaggaataaaaaagttttttaattaaaattcttaattttgctaataattttaagagaatgcgaggaatttaaggaccgaggaataagggcttggtgctggaatagggatttaacatgccgttaacaagacttccggtaaatggctcctgccccccgcccaccccccaacaaaaaaattgggacaagaagcatcgggaaaatcctaccgggatctcgctggaccacgaatgatatcaagattgttgggtttcgatcaacaattaaaaaaattatattggctcaaagttggctcagacaaagttagcccgttccgattccgaaattataaaacttaaaaattgagtgcctaagaatcggaaaaaaatttatgctatatatataaaaaaaaataataagtctaaataaatttccatgtatgtttcgtagattcgtcacagctgtcatcatatttctccccaaccatttaaacggacaagaaggaagttcctagtgtcacaaaattgccagcaaagaaacgacatgataaatagggattttttaagggtgaaaagtccaaaataaggccgtaaataagggcgaaaaattcgcgaaataagggcgaaaataaggtcgaaaaagtcaaatttagggtataatttttaaaattgctgttttttacatgaaataatttcagactaaggcaaacaattttattcactgattgcagttacaaataagctatattttagaaaaaaattttcatttcttagggtctatttttgaaaaatttagtgtcgattcataggggtatattttttcgaaatttttttgggtcgattcttaggggtatattttttcgaaatttttttgggtcgattcttaggggtgtatttttcgtttttattgcatttttgttaataaattttggacaaaacgccaaaataagggcaaaaacttattttaagggcgaacatccaaaataaggatttttaagggcgaacatcaaaaataaggatttctaaggtcgaataagggcgtgaaaacgcaaaattttcagacaaaaaatgtgtttttcgtgtatttctcgttcagttaaagccgcagaaaaaataagtaaaaacttagaaatcccatccctactcataagacccctagggattaataattaaatttaaaaaaatcgtaaaaaattgaaaacatgacttctccatacatttaatagctcattcgtaatcaaagattttcaaaa

SEQ ID NO: 25340 - DNA, 713 bp, Heterodera glycines
taaatgcaaagattggcaccaaaatgccaaattaaatacaaagtgctgatgagaaatttgtccgcaattgggtcgaggaaagtgccgagcagcgaccgctgggaagggaagtgccgtgccacggacccatccaactgaacaaatagaagtcagaaaaaagaagatgaagaacacgaaaacagctattttttctgtcccaatttttttttctttccggtattattttccaaaattagaccccaccgccaaaaaattacatttttggccaaaaatatccattttttgatcatcgacgactcaattatccagcggcggtgagtcaggtacggtcccaggattttggcttggggggagtacctccccccgggcgtttttttcacacccgttttttttgtggcgcggtttttccaaaaaaattttgggggacagggggtccggcggtgccgataggcgccgccgggaaattttttgcggttttaaatgcggtttgttaacagattttgtccaaaaaatgaccaaattttgtgattttgagccatttttagcagattttcatcaaaaatttgtggattttttgaaaaatttagcgaaatttcttggaaaatttgggtgaggctaggcctggggggaggggtaccagcaaggaaaacctaaaattttcaaccaaaatattattttttccttaaaaatttagggtgcggggggccttgggg

SEQ ID NO: 25341 - DNA, 496 bp, Heterodera glycines
cagcgaaattcacagagccaattcaactccaaaagccgaaaatgtctcctgttattgcccctttcgtcctcgccatcattggcatcatcgccttgcccaccatcgaaggcgcagtcgggcgtcagcaagtcaagctgggcgagcagtacaaatacgagaatgtgcccggcaaattgatggtcaagcgacaaactgcggccagcaaggagccccagtatttgttcgccggtcaaacggcatggaccacggacggagtgagtgggaaaagcggggggggggggaagcatgagaaaagatcaaaattacaggacaaatatttcaagtttttagaatcgacttatctcttaatgaccattaattgcgtcctcttacctttaaaaagaccgctttggccatgccgagttggacttcgccactggcacaatgaccatcccccacttctccgagaacgacttgggctcctaccccttccccgcttgagcagccccacttcagc

SEQ ID NO: 25342 - DNA, 1018 bp, Heterodera glycines
ttttgccgataatttttgccgttagcatgttcacatggaacgtggtgttctgttcgggtgttcctggtgcaattacgggcattgtcattttggcataaaatccgaggccgaactgtgcctcgcgcaattccaattcaccctcagggctccaactgagcgaatcgggcgaaatttcggcaatttgaacgggcaaaggccattccctaaattaaaatgccaaataaatattttaaaaataatcaaatgacttaccaaagagaaaaagtgagaaaaaatcgctttagcaaaaaagggacggaagcgccggggtaaagcaaaacgatttttgtggccaaaacagagaaagaaacgccgccaaaaaatcccaaaagattgccgtaaatgtaattatctaaaaggcacaattaaaattaataaattaaaattaattattcactcacgttttgcccaaagtttcaaaatgaggacgaattttctgaaagtgcccatgtttttttggttcacttcaagcaatttcagattggattggtaccctaataaatttcaaaggctaaaatattacaaatgtccaatcaccggctaatgatcggaccattctctccgtttgcttttctttttctctgtcctttcgatcattcgaattttccttttttaattgggcagttaatttctcaattaaattggcaatgtgagcactgtccctctcgtcaatgttcacagattttaggccgggaattgaggcgaataaaacgtcgattttgagtccgcaggaaagcgtcactttgagcagaggcacccgcgcgaagggaatgcgctgcagcgattggacattcaaatgctaaacgattggggacaatgctcctctctacagtactcgtttgtgtggttgggttctgtgctgctcgttttgcaatgtgaattaccgtacccttttgtttaccgtattgcttaccgtacaaagtgcgcacagcagtgattatggtcacagttgctcctctcacgcggcgtacagttgcaa

SEQ ID NO: 25343 - DNA, 946 bp, Heterodera glycines
ttatttttaaagtaagtttgtttaaagtttcaagaaatataaaatttgattcgccatcaggaaatgcccaatgttatttagaggctaaattagtgggagcggaggaatttaaacccaaatatgccgcatgaaatgggagcaatgcattccccgcgcacgccgaaattaaaaaaaaataataattaatattgaaaattctgtacaaaatttgaagttttttacgcttttcaaaaaatttttcttttatgcgtttcaatgaaaatttcaaaaaatttgccatgggaggaagggtgaaatggtcccacttgtcattattattattaatagggaccagcgcgtttgggcccccgtttttggtccccctcgtttggtcccccgtttttgggccccgcggtcgtctgggccccaacccaaaaatcaaaaaatgtgctttcataaaaattaagattctaaaaactaagcctgagggatccctctcatctaagcttaagctaggtttaagtaacattcgctcattttttgcaattttacttatttcaactcctcttattttttaataattaaccaatttgatgtgcgggggggggggggtgaggatcatcggcaatgtttttttatgcgtttgaccatttttctccacctgtttttgctttgcatatcccttttccggcgccctttttggcagcggaaaattttttgaccatttttgcccggtgcaaaattagtcaattttcaagcccatttttcgacaaaaccttttagggttagtcgaacgcactgcgcgactttttccttgatctctccaccactttctcgtgttttccttttctcttcttcctttttctcgaccaacccgcctcgtgcgttcgacaccctccgaccccaagcgttctgcgtcacgaccctccccctcttgcacagcgattgacatattccgccggaaaca

SEQ ID NO: 25344 - DNA, 1663 bp, Heterodera glycines
  unsure (1)..(1663): unsure at all n locations
ggccggggtcattacccagccctttctgtagagtttttgaacgaatttgaagtagtaaaaatttagattttttgaacagtccaagattctttgataaagaccaattggggttctaaaaaatggattgactacaactcaaatattaaaaacgatggacgatatatatatttctatacaaaggaatcaacaaattgacataatctatattgattttgacaaggcgtttgattctgttccaattgatttattacttcaaaaaatcaaaaagattggaattgaaggaaaaatttataattttttaactaactttttaaaaaatcggagttttaaggttaaaatcggcgatgaattgtcagaaagtttcaaaatattttcgggagtgccccagggaagtgtcttagggccattactctttttaatttttataaatgatctgccgtcctttatttcaaaaaaagcatcatcagttggcataaaaatgtatgctgacgatgttaaattatattatgcccatgaaaacgatgaccattcaaatcagttggataaagcgattgaggctttggaaaaatggtcaaaaataaatgggttagaaatttcaactgaaaaatgttttgttctttatttggggaaaaataacaaaaaagaatattttattaactcaaaaaagatttcagaatcggaaagtgtacgtgacttgggaattataattgactcgaaacttaatttttcagaacatattagcaaaattatacgaaacgcatatcttagaattttccaaattttgagagtgttgaaaagcagggaaataaaaactctaacagcagcctataaaacttttgtacgacctcaattagaatacgctaccgaagtttggaaccctaatttaaaaaaagatatagataaaattgagcgtgttcaaaaatttttcacaagaaaagcacttagaaaatgtggttttgtgtacaaaaaatatggggaaagactaaaaatcacgggtttacacaaattggaagaaagaagaaaaatcaatgatttaacaacagcttttaaaataatcaaagggttcaccagcctcgatgctggaaaaagtttctttttctcagaaaggctcaggaggcctttacttttacgggtaaagcgccacacggccaaaactcaaaataattttttcaatagaatagtaaaaagctggaataatcttccagtggtagcggtgcaaattaataaggcaaaggaattcaggggtttactaaaagcaatgagttctgagtaggaatattcatgtgccatattttacattccatatttaatcacctgtgattttttacatttaatttataatttattttttactctttttattacggtattcattttgtatttttattttgatcaaatttatttgttttgttttctttttggcaccatgtaagagcactaatgtgcctttggtttgctcgataaattaaattaaattaaattaaaattaaattaaattaaaagtaaaataaaattgagaaaaattgagaaaaattttttttggcataaatttctaattttttanaaaaagttacattttttattagaanaccctccaaanatgatttgaaaattttttggtcattagaggcaaaatggccgctttaatagagggggctgtttt

SEQ ID NO: 25345 - DNA, 2097 bp, Heterodera glycines
  unsure (1)..(2097): unsure at all n locations
ctcgagttattgccttttcagtctcgatgatcggcgggcctccaatttcgcttccccgccttttcttgatccgcttttttacgattccgatgaagcgttgcatccatgctgtggcgcgttgcactctggaccatttgctgcacctcgtaagcaacgaactcgggaattgttcactctcgaggcctgtggatgcttcatttcggacaatgaatgctgattgtccttcttcctgccccgccggagagggtaggccctcttgatcaggctgaaactccaattcgcttggccattcggttctcggcccgcgcaaccattgaggaccattccaccactgatcattgtgttgtaagagggtgggcacttcccctcgagttgccaaatccgctgggttttcgttagttcgaatgtagtgaaacgtcgttgctgtcgcttttctgatctcgaagagtcgattggccacgaattgtggttgcgctgaagccgttctgacccagtggagagcgatcattgagtcgctccaaatgtgttgccccgcgattggatggtggagttgcttttcgatgaatgctgccagcctgacccccaacagaatgcccatcagctccattcttggtattgtgaacgtggtagccgctttcttcggcttgaggcgtgatttggccatgatgaggcgggagttgcacccgctttctcctcccgttcgtatgtaagctgctgctgcatatgcgatttccgatgcatccgtgaacacatgcagttgaagcgggtgacccctgcccgcagttacgcctcgaggaatcacattactttccccctcccaacttgccaaaatgtgctcccattctcgagcttcctcccgggacaaaggagtgtcccattcgtggttgtcgtcccacagcttttggaagaacagcttcgccttgagggtcgccgggcagaccaagccgagcgggtcgaacaggctggcgacgctgctcagcaccgttctgcgtgtggtgctgatcggagtgtcgggttcgctcccggggtacttcattcgtattttgtccgtctccgcgttccattcgagtcccaagactttggccgtcgtcttgccgaggaattccgcgtccgaaaagctgctgttgagtgtctcgtcattgctcaagaattcccgaaggttcatccgcgcgtccgcaaacattcgtttcgcttcttgtcctttaatggctgcttcttccgcagtgtccgccgggatgagcacattatccacgtatgtgtcccgaatgagttcttccgcgaagttggagtcgtatttgcgcaggtggtgtcgtacaacggcggcgagacaaaaggggcttggcgtgagcccaaatgcgaggcgtcgaaatcggtatgttaccaaattgtccgttgtcactggccgaaatgggtcgcgcacccacaaaaatttgcacacatctctgtcgtcctcttcaatcccgaccatgagaaatgctttctcgacatcggcgatcactggtactcggcatgctcggaaccgaatgagcatgccggccagatccggcagccaaactgggcctctgagtaggcagtcgttgagggaaggtgcccctcgtgtgtgtgcgctcgcatcgtagacgacccgcaactttttgggcgtgatcactgcttggtgagggatgaagtgttcgtgtttaccagctccgatcgtcgtttcctcgattattgctgcattgagctgatcggtgatcactgtggtgtactgcttgagcacctcgggagtcttctgcagccgttgaagcattgtcgttagccgtcgataggccatgctgaaattggtggcaaagcggggtggcactcccgccatggcaatcgaatggagtagcgcccgtcgttgagttggcgcactgatcgttcgaattgtatcactgcttgcgcatccgcgtcgtctgtcgggtcgtctcttatcccgattgcttacaatgaccaaaattgttcaactgctctgatcggccgcatttgatcgcgttcatcttctccgcatggcaaggtcatgaacacgnnnacgagcggagttgcccggctactcacttggaaccgntcgccgcacacgat

SEQ ID NO: 25346 - DNA, 1718 bp, Heterodera glycines
tttacaccaggttttgggactttacagagtgacaccccacccagcaacaaattcatcaccagctgaaaagctattcggtcgcaaattgcgtaccatgttggatttggcacgcccaaccgaggagaacgccgatcagaagaagccaaaagatagtccgacatacagagaccgaatcaaaagaaattttgatcggggaactcgagaacgaacttttgaaattggccaaaaagtttttataaggaattatcgtgatgggcctaaatggtttcgcggtctgatcatcacgaaaaacggggtgatttatttcgttcggactatgagaggtgtttggaagcggcacgctgatcagcttaaaccggggatttgacggtcgaagatcatcaggagaacgaatccgtggacagcgactcgaatgtcggtgatcaataacaggagactgaagatgaacagaatgatggcccagctcctcccgaacttcgacgatcacagcggaccaagaagaaaccgagatcttggatccaagcagctgatccttgataaggagggagggatgtgatgtatccatccccttattatttatcttcatttatcgattaacaagataattcgtgggttatgtttagggatattaaaaaggcatgttctcaaaaacattgaaatttaaccaattccaaaaatcgcccgaaatgtcaaaaacgggaacggacttttcggtttttagttaatacgaaaatttttttaaaaagtctcgggattttcggtctcgagtctagagaatagcctagatcagtttgagaatttttttcattaaagagattatttatatatctaattcaggtattgaaactaccaataactttctgattcataagtccgagtaatttgtttagaaattgattcgatcatggaatctaatcatggataaatttgaaaaaaaacctgcttaaggtaccgggtttttgattatgttaatcaggactgttgcatgaattttaaaaattcaaacacttgtcctgactgtcctttgtttttttaaataccaatctccggtcaaaatcactaggccaaatcaaattccaaattgttaactttttgttccactaaatatttgttcgcaaatttccccccccccccccaaataaagttactcacaaatctttgtggtttagcatattttttggaaaatgttcatcggttatattcaaaaagatttgaagcgaaaattaaaaaattgatatgaaagaattaataatcattaaaaaagttattttttccagaactcgataataaattttatagcatcaattctgaaaatttttattatattttcctcataattagggttgcaaccacaaccacgaagttgaaaagtcgggggtcggggattgtaggggtaagcaaggtcgtgatctgagtcgcggtcggggaaaacattaaaaatataaaaaagtgattttattcaaaaaaatccaaaaaattttctggagctcttttttttttacttttacatttatgaaatttttttataaaaacttttttgagttatgtttgttaatagattatgccaataatggtcaattttgtgggcgttttgtttaaaaaaccctattaaagagaaaaaattaaaattataaaggaacaaagcttcaaccagtatcggaatcatgaataaaattaaacagtaaccactattctacaaaaacaatataaattaaatg

SEQ ID NO: 25347 - DNA, 1626 bp, Heterodera glycines
  unsure (1)..(1626): unsure at all n locations
ttttttgagttctgtgaaatttttcagatacattttttaatgggtttcaccatgttaacaggcgggaatttttgctttgtgaaaagtgtcatggtaaaatttaatccgaaaaaattgcaaaatttgaatgaaaatggaaccgaattttgctattgagtaaaaaagcaagcaaagagaaaggtcatttcatatttgataaaatgagtttgtaaaaaaatagaaaatatcgaaaatttatgggttttatacgcattgcagaaacaatgaatgatgattgaccgcgctgttttatgcatttcttaaaaaatttcattttccgctttttgcactataaaaatccttcttcttcccttcctctcattcattcattcactcatttttatttttttccttttttatgccgcaatgttttccgttttctgccccaaattcttttacgctttgagcactatttaaaggtctgggaaatttcgatctaaaaatgaaggggttagaacttttaatctttttatttacaaagtccataagagaattaatttaaaaacttatttaatttatgttttccagtgactttaactttggggaagccgtcaaaaatttccaactgttggacgaaggaatttattgatcgggcacttttgcatatttttgcattaacggtcaatggaaaagtcgtaattcggatacacttatggtgtcggtgatgttgtcgctgcggtgttaatttggccactcgacagataatttccaaaaaatggacattgtttgggtatttaaaattttttgtcgaaacattttgttttccgatcatttatttgtttattttctttgcattttttgcatgaatttgtttataaaatatatttattcgttgctgcatcttatcccccacagaggcgtcaaaaaacaatagaatactaatatttggttgtgaaataaatttccttccttttaatttcaaaagttttctcgatgggccgggctcctttttaaattagggatatggttgtaaataggattttatgttttacatatttttttgcggcttaattacgaagagagaagcccaaaaatagcattttctccgaacatttttgatttagagcagggcttccatttgttcttatttataagaaatgttctgatttggagggtccaaatcttacaaaataaaaatgttcttatttgtaagaaatgttctgattttgggctattattcttattttgttcttatttcttaaaattattcataaatttagaaatttatgcataaatgttcttattttccctataaattaaaaaaaaaatttccccggcggcacctattggcaccgccggacgctaaaatactttattttctttaaaaattggctcaaaaatcaccaaaatttgggcaatttttagacacaatctgttaacaaatgcattaaaaattacaaaattttccccgcggcgcctatcggcgccaccggacgcccatgtccaaccccaaaattttttgaaaaaatgtcgcaaaaaagccttttgaatgtaaaaatggttgccaattgtctcaaaatcgcaaaaaatgataatttttgatganaatctgttaacaaatcagaaagaaattacaaaaatttttcc

SEQ ID NO: 25348 - DNA, 1333 bp, Heterodera glycines
  unsure (1)..(1333): unsure at all n locations
aattattcttgnccttntaggaacgctttggctctgacgcgggcggcctaattttggactatcattgtgccgaaatgttcccaaagcgatggtaagtgaaagaaacaaccattttcgctttgattgaacactgttttcatgccctccccccctcccaattttgccgcggttcgacctcgtcattgtcctccgttgtgccaccgaatcgctgttcgatcggctgaccgaacggggctattcggagaggaaaagacgcgagaatttgtaggccgaaattttcggcatcatcgcagaggaggcaaagtgggcacatatatatcgatctgatgtttcattttaattccaattgttaagtcctttttttccgattttttagccatcgcgctgaacgcaaaatgggcaaggatcgactcgataacgccgcgccgggtatctcctgacaatttaatgatatttctggctttacctaccatttcggattatctttcattttgaagcctaatcacttccgtatcacttgggtggccatcgtacacaaactgtcaagcatttaagccattaccaacctttgcattcaactttataccatggaaaactttgacgaaaaacattgaatgaggcatttgttgtcacttaaatcggctctgtttgccgttttaaaatcctgtctgatttttctgtgccgtattccggtcaatttggcatttttgcaaatcaaaatgtaccccatagttttgtttaattttctcttctcagttccctccatccatcaatgaaaatctgtgtccgtatcagggatgggccaaattgaaaaataaaaagcgaaatttgcgaaactgaaaaatgcgaaatgaaaaaaaagcgaaatgcgaaaagccaaaatattcgaaaatgcgaaaagcgaaatttttttttaaattttactaatagcttttgaggttgtgatgcaaaaaaaaattgcattttccggttcgatctttttctcagataaaaaatgacaaattctacccattttgtggttaaaatttcaaaaattaaggtaaaatgaagggtccggcggtgccgataagcgccgccggaaaattttttggaaattgtaataaaatatggtaggaaaagttgcaaaattttcaaaaaatttactgttttttcaaaagcaaaaaaatgcaccaaaaagttcaagataanagcttcaaacgaagttaaaaactcgttttcgtgcatattaggctatagcaagttagcaaaaaagtaattnatttagagtgcacgggaccggggaatttnntgacaaagccgngaccggaactttacgggaccagaaaagccggga

SEQ ID NO: 25349 - DNA, 1521 bp, Heterodera glycines
tttgctcaattccgacccccggacccgaattcaaacaaaaaagttgaattttttttcaaaatacgcattaaaatcgatataattttggcgtaaattgcatattttttatgaaattaatagttaagcattattttggatcaaaataaatagttgttaaatgaattcgaagcttttacccagaaaaatgtacctttggaaaaaatcgaaattttttgttcgaattcgtgtccggggttcggaattgagcaaatccgagttcagtttcgtgatcagcaccctcgaaaacccccaaatactcattttgagctcaaataaaaaataataattttatatttgggacccctattctttacgattgccgccttttctatggaatcggaattacattgtaggcaaaggatgttcaaatacacatcgctcgtgaaaatgaccgaaacgggatttactcttggatcttgccgattcaatttgagctcctagttcaaaaatggatggttggcttacaattagtggtttttgtgatagtaaagggaaaaaggatggagattcgagttcgctctacaactttatatttttacttattattatccaaattcttaattgaattgtttcctatcttaaacagttctattttttaaattaaatgtattttaggcacaaaaaatcgcgaaataggcacaaaaatatacaaataaaaattttattaacactttttatgtagcaaaacacataaaaatttaaatatttcaattttaaaagaaattattaaatactttttaaagtttttttttcgattgaataaggacattactaaagatcaattgcaaatgttttaattaggtaagaatagaaagggtttaaatggttattgtgttttttaataaaattccttcagcaaattgcacgtaaattcaaaggatgttgtgaagggaagcagccaacagattgatatccgaacgaagctgaaaatttgaaaattatgtagccataaccctttgtttgtccatctcccgaccaccattttttgacttgaaagcatgttttcgatgtccccggatgcgattcgaacaaagtcgaatttcgcatttatttgttactctgacacaaaattcagtttggtctctgtttgcattaatgaaacgaattactgaattgacggccaacatcagagaacgtttgttgttcagcacttccactgattctgtgtacggattgtagcggacaacgaaggggcggttcatattggaagtgaatgtgctgaaaaggacggaaagtgccaaatagaaattggcacttttattttgagaatttattggaaaagcaccgaagcttttgctgagcttcttcaaagtttcgcgtgaagaagtaggcggtctggaaggtggtgatcagacactcctgctgcaccactctgtccgggtcgaagcgcaaaatcgccgaatttccctccaccgcgtgctgaaagagcggaggaacaaagatgaagctgaagggtgaacagctttatccacctgaagttcg

SEQ ID NO: 25350 - DNA, 767 bp, Heterodera glycines
ccttatttaaagcatttctatcacgaaaaatttctgaaaaattcaaaaaaaattttcacccccagaattcggcattatgccaaaagtgcatagtagtagtttggtccaacatatatttatattgttgcaatgcacgcagggcttattaacacattattttaagcctttctatcataaaaaaatggttagaaatacttaacaactcctcagaatccctgcgtatcccccctaattctgaaggcaaaaatttttttgaactttttgaattccactgcagagcataactcaatttaaatttgagctaaaagtatgcttaatagctcattagaaccgccaaaatgtgaaggtgtgccctttctccaagcccaagacgccacctataacacccatcgcgttagaggccgacaactgcggcacgttcaaaaaatttgcgaaaattttcaaaaattttctgaagaaacttttttttacgcaaaaatttcaaaaaacgctttccaccattcgatccgcaatcgaaaagtgccggaaggatgcgcaaaccgcattccgctatgagcaaccgttcgcttatttttttagcaaacgtcatttcaggctacatttttcccttatatagagaataatttttaggtaccccattttattaagttttgttggggaatgaatcgagttattgccgatcaaaataaaaaatacaaaaaatgcagttaccagtgtaaattttgaatcagcgcgcaaaaaattcgccaattacgctatttggcgtt

SEQ ID NO: 25351 - DNA, 1978 bp, Heterodera glycines
tgatcgcgacaactcttaactgcccgtcccctgaacagttcatccatgatgtgaggcgccgcaaatttttttttttggcattttttcacattgctaattgtgtttttcaacggcacaggtgagcatgacgaccatttggcaactgtgcgaggacgcgaccaatgtgctgcgggaccaggcgtcacttgtcgagacgaaaccaccgctggtcatgtgcggagacatccatggccaatttgtggacctgaagaggattttcaacaagatgggctacccgccgttcaccaaatacatgttcctgggtgacattgtcgaccgtggcaatcaaagtgtggagacgattgtcctgctgctgctctagatgtcgtgccgtgccgcgggagggagaatttgatcattttgcagggccaatttccctccccccccccaattttaaggtgcgctacccgaccgaattctatatactgcgcggcaaccacgaatgtgccagcatcaacagaatgtgagtgctgtggtgccgtcccatgtgtcacattttaactcaatttcagcaaaaaaaaaatcccccccccattttcagatatgggttctatgacgaaataaacgagcgttatggacaccacaatgtgcggcctctgtgggagcggttcaacatgacattcgcctggcttccgttcgtcggattggtcagcgactgtattctgtgtgagttttttgccgttgatcggctgtctgatcgatcggacgaactctaatccccccacccttttttaaggcatgcatggtggaatcgcgccggaaatgaccaacattcagcaactccgcatgctgcgccgtccgtacatcgacccgccagttccgtccctggagctcgacctgctgtgggctgatccatcaaccgttgtggaaggcacggcacccaacccgcgtggagtgagcatcctgttcgatgccgatgtcgtcgccaatgtttgcaaaaagctcaacatcgaattggtcgtccgcgctcatcaggtggggctggagaatcggcactgcacatggacgactgtttatcgaagcgattttttttgttgcgcgtaacgcgttgtcaatttttcgatccgcgttttgcctatttttagagggaatagtgggatttgtgtgatccggaaaatttgtctaaggaatttcattcgccccactttttcagtgtgtgccattcggtgtctcattcttcgccaactcctacatgctgacgctgttctctgcgccaatgtatcagactgaaaagaacgtcggagcggtgctgggtgattgacgcgaagctccaactgtccttcagattcttcaaaggctctaccaaaattaccccccaatattggtccagcatctcgatacgaatgttctttatgtgttttgcctgtatcacttaattttaaaccaaataagctaattttcaagccgcttatcattcgtgccaattttttccgcttttcatccttgttgggaggagatgcgggattgagagtccaaaaatccaatgaattcctcctcttttttttagttgcccccgtccctccccctttttagtgcgtcccgttttgtgtctcgttcttcaacaatgcctaagtgctgatgctgttctcatcgccaatgtacacagattgaaaagaatatcggaaggatgcaaagacagcacattttcctttacccaacacaaataaatgccaaaacaagtggtcgaaagaaaaaaacgggggtttggagggcttccccaatgcggcacccttaggacggatgagcaccgcactggtttggcaccaccaaacccccaaacaatgaaaaataaaaaataaaataacaaaacctgggtttggcgggcctccccaatgcggcacccccagctagggcggatgagcaccgcactggtttggtacccccccaaaccctgcccccaacacaggaaacatccgccccttcgatcacattcactcct

SEQ ID NO: 25352 - DNA, 1628 bp, Heterodera glycines
aatggtgaaatgcttacttgccacttcaaattttggtactgatcaatctctttatcaatttaacaattaaaatgtactaattctgcatcgaatttgaaaagcacaaatttgagttgtgaccatgaccggtcgatgatcgtctctttatctttgatgtcttaatcacatgtagcctgcagtgatcagcaaaatggtgatcagagtgactactcgaaccaatcggcggatagttaggcatgaaaaagtgggttacatttcaaacaaacgtacaacccgataattcctacacaaaaaacgcttataaggatgaaaagttgaggtccgcctaggacccaactaaaaactcgataaaaatgttctaggatcgaaaagtcgggccattgagaacccctttcgactttatttccagaaatcttccattcgcctctaatagtaggcaaataatgcaaaagtccttccatggtaaagttggtactgcccccgaggcaagatacatgacgaacggtttttacctccccttcatttagggataatgacacattcatttttattgatttttctggacaatgtgtaacccaaagggcaccattatcacaaattatatccgccaggggattgccgagggatgccttacaagtgaagttaaaacgacttcccatccgacatccatagcagcctgttaagccccctggtgtgattatacatttggccatatctctcctaatgcttagagtcaaaccctccatttttaaggtcatttgaacgggtacatattcactcagcccaaacctgcctaggtttacgataattaagagttaaagggccgaccgagagtggtaatcgtttagacggatcgttccgccatctttcgatgtccacttccttgcagtggcatcgaacaataccttcgctgtgatcgggacggcattttgtgcatgcgtccaacgaaagggcgcatttcatcaacaatgcatctaattcgtttctacaatgtaaagcgggttcaatgttcggaacgagaacagcactgtccgatccgccaaaaaatgtttcggacattattggagccgccgggttgccaaaaacggctggagtgaccgacaaattagccccttttatgtgaaaagtacgacccgagtaaagctctgtctcttcactaatagtaatgcccccactgaagctaactttaatttccgttttaattcggaattgccatgccgggcatctgaacatttcataaacagaaccttccccagttagggtcggagttgcgtagttacggaaaaacaagcaagcggaattagttccaccgcatccatggaaccaaaagctgctgctgtctaagcagaaggaattacctgggaatgagttaccttcggccaattctgaaacggttccgttgggcaacaagttttcacaggttttgccggaacatgagcccatccctgggcatcttttgctagcgccggaaattttgaagttgcattctttgattctcattgactcattcatttttgacatcatattcatggcagaggaacggcaacatgggcaacaaagtcgggaccaacgggacagatatagttctattttttctgaggcagttgatgcggaaacggactggaatg

SEQ ID NO: 25353 - DNA, 1874 bp, Heterodera glycines
aagcaattttttttattaaaatgcttccgaatttttttgtataaatttcaaaaagaccaaatcaacagaaatagtgattgaatgggcttatttatcgaccaatttgcgctttgtcccttttttcttcaaccgtaaaatcaatggccaatgtcactttgtccccctctttttcataaaatcctttgtccgggtccatcaatttcttaattttacaattattaagcgaataaaagttgttttaaagccactcactgtaaaagtaatgaaatgaggaaatccccagctgtccgattccttattaaaaacatggtcacattttgtcgtcaaatcctccgttccgagattttgcgaaacaattcgaagggttgccgaacattcgcagctccaatttacatctggcaatctcacttgtatgaataagagggaaacgaattttgaacagtgccgggccaagagcttcacgacgattttcagcggaacattcgatggcatttttacggcatttttcgtcggcccaacggagtgcctaaacggaaaaacaaagatcaatttaatacaataaaattaaattacaaattacagcttgccaaatttcaaattcatcgctgatcaccaactgatcacgtacgaataattcacaaagaaaatcctggtcaatttgcaaaaattcctctgattcgaacaattcgcccgcattttgacaaatgtaacgcaaatattggtgagcaaaatcctatataggtattataaaaattaattttttttggaaaatatacattaaaatggacacttaattaaaaaaagggtgttccacctccaaattgaaaagacgagcatgggcatgggccaagaaaacattgggcagattttgaattggaatttgcagacaatgactgaccaatccatcgatgccgtacttatcagctaaacaatcataaaatttctgggaaatattaaaaacaaaaagcgtaagtgatttgtaattattttcataaatgagagcgggtcgcaaaagattaaattaaattaaaaattgacttaattgcatataaattaaaattattttcacccgcgtaaagcactgccattgcgttttctccgttcaattcgctcaaatcgtccgcgtaaatgaagctgagcatcactttaaacgctgctgcttcaacatcgggcacttccatggggcaattagaagaggctaaattaaaaaatatattaaaatattatttaaatttttattccatcattttcggaccattttctttttttggttcctttgggtcaaaacaaaacatcggcccaaaaacgttggaagcgtgcttcaaaatgagtttgtgagctggcagaagctgaaaaaagataattttaaaactccaatttgaatgttaaattcgtgatcaaaaggggacggatttttaggctttttattatttttcctgcggctttaattcattgagaaaagcacgacgctcctgtatgccgctagaaatcccttatgtttgaccataaaaattccatatttttgaattttcgcctctaaaaatgtttgcccccattttgacgttttgcccttattttacacattattgcacgataatatctttcgatgtgaaaagatcatttggcggtgataggccaaacagaacagctttcctactagagaccggacgggatcgggatcccgcgggatttcttcgggatcccgcgggattaaattcgggatcccgacctcgggatccgtcccgagcgcttttttaattcatcgggattgatcggatcgggatttcatcgggatcccggaaccgagatccctccctaccattttaccaatccccgcggggatcccgccgggattgaaagcacgataaattttt

SEQ ID NO: 25354 - DNA, 1691 bp, Heterodera glycines
gaaaatttttttttttttaaattccaaacagaaatttcaaaaaaatccaagagagtttcaaaggaacaaatttttgaaaatttttcagcgatttgtttggaaaagttagtaaaattcatcataaaattttaataagtcgttagaaaattttcatattttttcttataaaaagaaatttctagttatttttttgaaaatttctacttgtaaatttgggcttttgcctccctttggaaaattgttggccacctatttaaaattgtcagaaagtaatattaatgaatatcccaaaacaacaacatggagcaatgccaattatctacaaagaccaactgtgtgaaaaattattaaacttttttaatgcattttctatgtccctctccccattttcaaggagtttggctatcttactcaaaccacacagtcggaggcgctcatcggactcttcaaaggcatattagcccaccaatagataattgatcaatttgacgctttaggacaaaccgagtgcaaaaagaacaaacacggcgaggcgcgcaaaacggagtgagttggccggtggaaatttttttaaattgttttttttggtttaatcgggataatagagaatagaaatgttgtttcggacttttttttgttgttgcaaaaatgctgttttttaatgtttttcgttcaattttttgattgtctgtaataatataaaggaggccgggttcaagtgtttgccagaaatttgatttttttttcctcacgtagaaacaagaaaatatgtgaattttgtagtaaaaaattttttttttggactttttcaggcgtttgggcgtcatcggtgccggtctgatgggcgctggcatcgcaaatgtcagcattgacaagggcattcatacggtgagactgacacacacaaatgggtgggggggggatgggataaatttaatacaagaagaaacataactaaataaattcggtggcaaattttaagtgcgcaaaaaaaatcgcttaatttcgaacgaattaaaaaaacataaaaatttttttttgccgtttccatttcagactcttgtcgacacgaagcaggaggcgttggaccgcgggctgaagcaaatcaccgcccaaatggaggggcagctgaagcgcaggaagatcaacgctgcagagcacgccatctgtctgtcaaagctgaagccggtgagttggagaaacaattgcattccaagaaaatatataatttatattagggcccgaatttttagggacgaaaaattccaatttaaaaatgtcgccaaaaaaggtaaccgctggagaaaaatctttgtagcaatttttagccttctcacttaataggactaattttttgccatttgagtcaaattccaaaaatatgacaaaatgggggttctggcagcacggaaaattttgaaaactttaatgcacttaataaagtgagtcaaattttaaaaaatgttagccttttttttaatttttatttcggcggagtggaaattccctgctctaatgtaatttaaaccaccataaaaaatacaagaccataaaaaatttaacagaactaattctttgaaattttgcagactaacagaggattcttgggacaatcgaatcatattaagatattttgtattaaaatttgggttcaactacaattttaagcgtggaactggcccccagggaag

SEQ ID NO: 25355 - DNA, 1261 bp, Heterodera glycines
tccctcccttgtcttcaggtcaccatccaaatgctatggcctccgttacggcgacgcttttgtgtctttgccgctgtaacggcgcaggataacagcaacagaaacggtgcacaaagcgatggcaccggcacagaagcggcggcggcggtggcaccgcctcagcagcggcaattgaaaacggagttgctgctccgcctttgcgagtactttttccgtgccgcgttggtggccaccacgagtgggtgcaacagagattttgcacggcacagaaatattggcaattcctttcctaatttttagtgctcatcgcgattggcgtaccaaatctgcaacaaatcatggtgggtgagtgatgtcttctttgctagtcactgccctaattagttaagaaatggcaaagttaggcaatgggtgggggaaacgaaccaacgcctcttccaaccattcattgggagcagggatggacgaaatttcgtttcgtttcgtcctacattttcggcactttttgagtttcgttttcgtgtttcgttttcgtctaccaaagttttttcgtttcgttttcggtttttaaattttggattttcgtttcgtgtttcgttttcgtcagagcaaaattggacgaaaaagacgaaaatatttacacccttaagaatgactttttggtaagaaaaaataagatatttattgaagtattgtattaaatctgctaagaaattgtatgtagtttttaaaaattttcccggcggagcctatcggcgccaccggaccagggctggagcgcgaccgcgatccgcgattcgcggcgtttttttttgcgcgatccgcggccgcggcaatttgaatgcgcggtgcgcggccgcggtttttttttttgcgcggtgcgccgcgcatttttaagcactggtaagaatgggggtctggtgagaaaagagaagggaattggagaggaatgagaaattttttagaaaaaaaaatattttttttatttcatttaaagtattcctccataatcttatgtgttgtagtggctaaaccttctgaccttcagtgtttgtctcttgggttcaattcctcaacggaacagaaagttttttcatattttctttacattatttcaattgaaatttaattattaaagaaaatattccaacttttatttttctttaatttttaaacagcctaaaatcacaaattaaccttggtcattttttgacaaattatgttaactaatctcgctgaaaatatcaaaaatattccggcg

SEQ ID NO: 25356 - DNA, 1343 bp, Heterodera glycines
ttttaaaaaaaaatccccataaaaatttttccttaattttttgtctttttttccaaactttttttccccctaaaatttgcccaaaaacgaaagggaagttataattttggaaatttccctggattttccagggcccaaattttgacgatttttcaaaaaatttttacccctttccaaaaaatctggaacgcaaataaaagcgtatatacgtttcagcacctcaaattatgccataaaaatgcattttggctaatttaggagcaaaaaaatttttcatgaaatgcaaaaccatggggtcccccctatggtttttaatttcaaaattcatttttattttataactttttttaaactcatggtaaaaacatgagataaagcacattatattgggcttaaaattctctacaaaaaagctcttagacgattttttgataaaatcaattcctgacaagttattgcgccagaactgaaattgaggcctagcaaccaaaaattttctatttccaaaaaaatttttaaaaatttttctgaaaatgacaccaatcgatagagcatgaaaaacggttgcttgaaagtggtcttcgttttgcccggaaaaatctgcaaaaaataataaaattcaaaaacctcaaaagtgacgagggggcctagctcgaaaatttctgaaaatttcagaaatacaaaaacatggttggatagagctcgtcgagctgtacaaaaaagccgcttacaccgacatcctccctcaaaaccccgacgagttattccaccggcgctgaaatggcccaaaaaagtatgcaatttttagtcagtttttcggaaaaactggtaggccctaggggttcggtgaagaagcaaaaaatgtgccaaacattccaacttaaaatcctatgggagcggatttttcatttaggcctttaaaaaatttttgaatcccaaaaactgcaaaaactgcttcgaaaaaagtgacttttcggcgcctggcgctcagttggccctcggatcggaaaatctatagttttcctgaatgcgccgtcaaaagttacccccaaggtcgaaatttcgaacccctcccggccttcggccgggagattttgtttttggaaatgaaactcactgttgttctaaagtatataaactagcgtgtgggaattgacgggggcggtgtaggcaattggcttttggatgaagagaaaatggacatgctcatttgttattttaaaacatacaaaacattaattgcattagtgtgctgttttaaagcgctatcgcgctatgggacgcggcttcgccgcgtcgctagaaagtgatgtatttagcaattcatcgcagcctcaggacgg

SEQ ID NO: 25357 - DNA, 1193 bp, Heterodera glycines
tgaaggttctgtttttgtgtgtaagaaaaaatttgtagttttgctgtttatcatcatttttttgtctaaattttctttttgttaattgatttgattttgatgtgaaagcttttgttttgcttatgtaaacgataattgagaattgtttgattaaaaaaatgcattaaagttcgtttgaatgaaaaaggtttgttacttaaaaaagttttttgtacttttccttgcttataatatgaaaagaatctgatgtggtttttgatatttgttttgaataaaaagcatgttatgatagtaataaaaatgaaagaaaaagcctttgatggatagaaaaagcaatataaatgctacatctcatgtttttcctgtgttcgagtggaatatttatatgcaattgggatattgacgtgccacttgcgggatcaaatttaggtggaaagttttaaacaggtcagttttaatttgaatttatggggtgggggcaataattatacaccatagtgttttgatttatgggttatatttcaatttctggattccttttaaatagttctgtattccgttgctgaggttgagttccggtgattgaaatgtcggagaactgagtcccggtaattgtgttgctgaaggattgatgagattgagtccagtgatttgaaatgcagaagaattgagtcccagtgattgaaattctggtgaattgagtcccgttgattggaatgttggtgggttgagtcccagtgattaaatgatggtggattggcgcagaaaattgtgggggggccgaaggccccagtacgagcccgcgaagcggccgagcgagtacctttggcgcagaaaattggtgtaaggggagaggggggggggttgggggaccgcaggccccatacgaggccgcgaagcggccgagccctccccaactgttcaacatcccaaggcacacaaaaagttaaaaatgctaaagaaatttgctgaggttgaatcccggcgattggaatgttggtgggttgagtcccagtgattggaatgttggtggattgagtcccagtgattgaaatgctggtggattgagtcccgttgatcggaatgttggtgggttgagtcccagtgattggaatgttggtggattgagtcccagtgattgaaatgttggtggattgagtgccgttgatcggaatgttggtgggttgagtccc

SEQ ID NO: 25358 - DNA, 1998 bp, Heterodera glycines
ctcatttttcctccgctccttatttttcatttttccattttccattttcttttttcaatttttatttttatttttcagtttttcatttgtttagatgcaaaaacctattccttcaaatcgccccaattcttctgtctccaaaacccttgcctgcgggcttgaaaaaatggtgaatgcgagtggaaatgagccactcacggtgccggtgctggcggatcggagtgatccgctgggactcaagtcggtccaacccgacacggtgccaatggaaagtgccgagggcaccaaggaagtggaaataatggaagtggatgaaatgagtggagaaaaagggaaaaaggatgaaatgggtaaagaaaaggtgaaaagtggtggaatggaagaggaagaagaaagtgaaggcagtgaaagtgaactgctaggagaaggtggatttgacaatttgaaattgaaccccagcctgagggcgggaaataaagcagttgaaaaggaagataaggggaaaccctatctggtcgcccaagtgagaagcgacggtgtgatcgcggcacggatgaaacttttctgggatttcccggaattggtctttgtcccttttagcctcttcgacaacgcccagccgatcgaaatcggcgatttgttccgcttacataagtgtgagtggacgaagagcgaaacaggatgggaagagcgcggagattggctgtatgaagcaaccggacggctgaactaccaagccacggcaacggacgtgagccaattgcgccagcgcatccccactcaggccgtcggcattttggtcgatgtgcaaagagcccgtgaccgacacgtcaaagtggccatggtgtcagcacctgagctgagctgcgtgatgcgcgcctaccgtcgccacttcccggccgatttcacggataacgacatccgctaccgctccgttgttcgtcttcaacttcggcagatcaacagtccgccatgggtgctgtattcacagcagtttgcgtatgttttgccatctgattttggtaaaaaaaggggcgatgaactgctcgttcatcacgcaaacgtcattgctggcgttgagcctgagccaatgggctatgagttccctttcagtgccgaactgagctgggcgaaggtccagctgggtgagaaggtcatggcggcggctgtcgcagcacaggcattcgatgtgaaggctgatctgcggaagcacactctgttcgtcgagccggtcgtcatcaatgagatctcgacaagaagcgtgatcatccagttcgtcatgccggtgccgagcatcgaagagctgacggaattgtgcaaaatttgggaggtcgatttggcggtgggttgcaaagtcaatccggcagccaaggcaaagccttgtgcgcatgggtatgtgctaagcatcgaaaagcgggcattctgtgtaggatacgaaattgatgttaaagtgatcctttcctaccaagaagcgaaggatcaggacgcgcaggaggaattcgatcagatgcgctgcggcgaactcgacggatgcgttgaactcattccgcagacgtcagtcagggccctgcaggaacggatgttcacgctgcggtccaatgactgctcgaaagtggcgaaggacgaggcaaaggtgggccgaatcatgtcgattttattgggccgaccggtaaaaccggaaagcccaaaggccaataacccattaatgacttttggggctctttcaaaattgaaagagggacagatcgacaccgcgctgtgcatgctcgacgaggtgccgcgccttgtcttccaacaggccgggcccggcaccggcaagacgttcagcgcggcgtcgatcgtggccacggtcctggccacggatcccacggctcgcgtgttggcgctggccccgccgaatgtcgccgtcgtcaagctggtgctagagatgcaggatgccctggccgccggaaaccacgtagagccgaatgcttgccttgttctccgggacaggtaagt

SEQ ID NO: 25359 - DNA, 1381 bp, Heterodera glycines
tatggcactgcttccgaattattgaactgtttcacgactgattgttgagataatttttttttccgattcctttatctccaagcatgagccttataagtgattgttcatatccttctcttgaaaaaaattgtcagtaaaaaaaacacgttttctgaatattaacaacaaaaatttttagacactttctaaagaggaaggaaaaaaatttttcatttgcctaatatttatttatactgttgaactgttggaaaatgcaagctgatgccgtcggaaaagctccgattttttggggaaagtttttttctttcaagtttcaccactgattgttgaggcgaatttttttcgccaatttcttttgtctacaaacattatttattgcgtttcatcctgtagtgtgtaaaaaattttcgagtaaaaaaaacttgttatctgaatatttacaagcaaaatttaagaccatttccaaagaggaaggaacaaaaatttttgcctaaattttatattatattgttgaattgtttgaaatgcatctgttgtctgccgttttgaaatttttcaacttttcgcgaaaagatttcccagaaaatgcatgggacaaataaaaattaaacttctattatgatcaatttaaatttcctatcagtttcgggtttgctttaaacacgctggcctatgaaaaaatggagttttatggatgtcaaattttgggacttttcttcgacgtggccatcagcgggttgtttcgtgacaaaaacaaaccagtttgatgctattcgaatgagctagacgcgctctacattttcaaatgtatcaacaaagggtctaccgccactccctggcgagatatggcctgtcaaagcagaacggggccaataaatttgaatttttgttaatcttcggcagttgcctttatttcgagcctactctacttgtgcatcttttcccaatatggcactgcttccgaattattgaactgtttcacgactgattgttgagataatttttttttccgattcctttatctccaagcatgagccttataagtgattgttcatatccccttctcttgaaaaaaaattgtcactaaaaaaacacgttttctgaatattaacaacaaaaatttttagacactttctaaagaggaaggaaaaaaatttttcatttgcctaatatttatttatactgttgaactgttggaaatgcagctgatgccgtcggaaaagctccgattttttggggaagtttttttctttcagtttcaccactgattgttgaggcaatttttttcgccaatttcttttgtctacaaacattatttattgcgtctcatcctgtagtgtgtaaaaattttcagtaaaaaaacttgttatctgaatattta

SEQ ID NO: 25360 - DNA, 832 bp, Heterodera glycines
aatgtctacggtatatttatttcttcgtttcttcaattccacaacacgacgcatttttggtaaaagtttttttattattaaatttaaaaacaattcctaaaaacaaaaacaaaaattcatcaaagacgaaataatttcacaaaaattaattatttgtattttacgaatttaatttattccataagaaaaattttatacttattttttataaaatggtcatttcgtgatttgagaaaaaaatttataaaaaaagattaatattttttaactaaaaaccaattaagacgcttttttaaaataatttattgaactataaaatcaatgcgaaataatttatttaaaaaataatttccacaaaaattgaattttcattaaagcatttttcattttccacttattattattgataaaataatttttattaaggaaacttttgaaaaatatatttaaaattcaaaatgaatttattcatattattccttttgaatattattttatttttgatcacaaaaattgatcaaattaaaacagtcaataaaaaattagaacagaaaacatttgacgaaatatttggagaaaaatggcaagaaaaagaagaagaaaaattggaagaaaaaagaaaaataattgtaaaatattataaaataaaagagaaaataaaggaaaaaggaagaaaatattcagcgaaagaatggaataaaattgatggaaaaataacgaaaaaattggggacaaatcgaaacaaaatttataaatggattaaagaattgggattaaatcaacgaatacataaaagctataaatcaaaaactgatgaagaaaaattagaaat

SEQ ID NO: 25361 - DNA, 958 bp, Heterodera glycines
gtcggattatccactatcggattgtcctcactgtcggatggtccgggagcccttgcgacgcccaattaaagcgacatttgcggcgcagaattaaaacatccaaaatttattaaattgatagaatttgttatttaacaattatttccaatttaagaatttctaatttaacaattatccttttaaaggtcatactaatggcccggatttcgttaaataaatatttacatggtagtgatttttttatttttattaaaaatatagttatgattttcgattgagctccagtaaaaattgattcaaatttatttaatcaaattattttccaattggcaatttaaaattttatttaatcattattttaccaattggcaattatttgtcaataggataaaattattattattatttctttgaaattaaacaggatttccttattttatgagttaaatcagtagaattatgaattacgtcagattttaatcagaaaaattcatttatatgcctcaaaaaatgaattgcgatttaattgaagaaaaaataaaatcattttaagacgacaaaaatgaaattattccctttattatttttaattatatttttaataattgtcaaaattgaatcagaaaagaaaaagttacagcaaaagtcatttggcgaaatatttggagaaaaatggcaagaaaaggaagaagaaaaacgaaatgaactcaaaaaaagagaaataattggaaaatattataaaataaaagagaaaataaagcaaaaaggaagaaaatattcaagaaaagaatggaataaaattgaagaaaaaatagcgaaaaaattggggacaaatcgaaacaaaatttatgaatggattaaagaatttggtcttcaaaaacaaatacataaaagctataaatcaaaaacggatgaagaaaaattagaaattgttaaaaaattcattggaatgacaaat

SEQ ID NO: 25362 - DNA, 1456 bp, Heterodera glycines
taagggtttgcggggtcgctgaacacgaatcggacattcattttgaccaatttcgaatcccggacccgaatttggacgaaaagtcgaaaacctaaattttcaaaaattctcaattttgttcctaaattgattaaacatgactaaatttagtaaaaaaccattgtaacaataaaatgagtcattcttgcagattctaacaacattgagaattttgaaaatttagattttcgactttgttcgaattcgagtccgggattctaaattggtcaaaatgaaccacacatttttggcccattcctcgacccgacgcgcgacatttttgggcctgttcccttaaaaatctagtttttggattcagcccctccgaacccaagggtctctggctacgcccttggagcgcaacccaaaaaaattgtccgaattaattaaaatttcctaagactatgggaagtaaaaaaattattcgatgatattttcctaattgcactgctttgccccccccccattctcaccgccagttgtggctcttctgtcttgctgtccttgtaaagtgtggtcagtctccgacacgtcaattttgttgtcaaactgaagtatttgtccaccaacgcatcgaaacggacggaaagcaaagccaaaatgaggccgagttggaaatggtccaagaatgggagaatgcgcagccaagaatcgttgctcacatggcttaaatccacttattcttacttaaatttttcagcaaatttttcaaagttttatgatgaattactatgtttttcaaaaaattttccaaaaaaatcactgaaaaatggttaaaaaattggtgctggtgcgtttcttaaatccgccaatgggtttgaaaacaaaaaaaatgggtaaaatatataaattcataacttgactcaaattcaaccaaattaatttgatattatcattaattagctttaattgttttctttcagaatataattttccaaaatttttaacttaagtataaaaaaagttataaaggattgcacatgttatgttttttgcaatggtcatgcatatataaataaatataaacatttaaaattttaaagtctttaaaaaaagttctgaacaaaaaatgctggcttaacactttttgaattgttatgagaaaactttttttatacttaagtaaaaaattttggaatatcatattctgatagcgaacaattaaggctattgaacgataccgcaagaaatgtttccttgttagacaaaattaagtaagtgttgggtcaccaaagttttgaatatatgttcaaataataaaattttaattttatctattttaaaatgattcaatttttaaatatttaatgtataaaaaatcatgaacaggaacggaccgcgtccagtaagggaaagaggcgacgcgttggcagcacagcgggggatcgggtcgcacaggcgtgagcggcggtttgcg

SEQ ID NO: 25363 - DNA, 1812 bp, Heterodera glycines
  unsure (1)..(1812): unsure at all n locations
gaaatatttttccataatttgcctcattttggccatccgtttgtccaattattacattttgatcagtttcattctctccgttttcctccaatttttcgtcccatttttggccaaatatttcatcaaagtttttttcatcgtttatctttccagcataaatgttaccaattgcatttatgaaaattaatattaaaaatattattttaattttcagatttctgaataaaaaatcattaaaatgaatataaatctttttataattggttttattcttcaatttattcggatttactgcataacttcactcacaatcagcaaattctgcttgttttataattatgtttttttcaaaaatcctcttatggctttataggattatttttgatgaacatactttgcaaattacaatatttgaataaaatgaaattataattatttttacttattctaaatttatataaattttgcgtaaaacatcaaagtaacttatcaaaatcaatttaatttaaattattgggtaattctaattattgttaatgatctgacaaaaattcaataaaattgaaaaaaactcccttaagaatgaaaagattttctaaaaaattggtcccaaaatttaattattttttattgataaaaatatttggttaaaaattgcctttattgaatttaattaattaatttttctctaaaaatttactttttttggccatatttactcatttttcaaaataaaaataaatatgaaaaattaatttggtttttcaactaaaccaattaaaaatgttattagcataatcaacgatttttatcaaatattttttataagcgatgaaataaggattaataatttcataaaccgaaaaaaaattatttataaaaacatttgtaaaaaattgaatattttttatgtctgaaattttccaaatattcttcgataataatgatcgtcctaattatagcaatttgttttttggtttaatgccaaatttggttttgtatttgcgtaatgagttttttggaatgtttaaaattttggcaatttcatcttctttcaattttggattttgttctttgatttgataatattgtttaatcttttccattttttcagcaattgataacatttttcgctctgtaaattgaaaaaaatacgttaataaatctttaaattcaccttttgaaacattttgattgatttttaatttttttgcccatcttttaatcgttgaataacccacaccaaaaatttgtttaatttctgctctaaattcttcccattccttcaatgaatgttttccattttgcataaattcattttttacttttaaatatttttcaacaatttctcttttttgctcatctttattttgatttttaatcaattttccattttttaattgtttcttccattgataaatgcttctgatatttatgcccaaatgttttgctattatttttttgcatttttctctttttccctcccatttttcattgaatttcatttttaattttgcatatatttgatcaaattgctttaacattattcttttttcttcaattgaatgattttttttcttcatcattccaaattctcttttcaatttgtaaattttctcgtaactaacacccaatttttttgcaatttttctttcaatttttttccattcttttcttgaatatttctttcccatttgcataattntctctttaattttatgaaatttttcaacaatttctctcttctgtttttcattgaaaaatcgattttgatcacaaatttctttcatatttcttgacatttgttccaat

SEQ ID NO: 25364 - DNA, 1061 bp, Heterodera glycines
aaaataagttccccatttgcgcttaaaaggggggaggaaaatttcaattggagccaattttttgggcatgtagtgctgggaatttcagaatcttggaaaactggcatctttgtggggaacggaaaccggttcggggagaattacaaaataagtcccatttagcgcttaaaagggcgagaaatgtcaattggagcaatattttcggtatgtagtgctggaatttcagaattctcgaaaactggcatcttagtgagaactgaaaacggtacgggagaattacaaaataagtccccatttgcgcttaaaagggcgagaaatgtcaattggagcaatattttcggcatgtagtgctggaatttcagaattctcgaaaactggcatctttgtgagaactgaaaacggtacgggagaattacaaaataagtccccatttgcgcttaaaagggcgagaaatgtcaattggagcaatattttcggcatgtagtgctggaatttcagaattctcgaaaactggcatctttgtgagaattgaaaacggtacgggagaattacaaaataagtccccatttgcgcttaaaagggcgagaaatgtcaattggagcaatattttcggcatgtagtgctggaatttcagaattctcgaaaactggcatctttgtgagaattgaaaacggtacgggagaattacaaaataagtccccatttgcgcttaaaagggcgagaaatgtcaattggagcaatattttcggcatgtagtgctggaatttcaaaattctcgaaaactggcatctttgtgagaattgaaaacggtacgggagaattacaaaataagtccccatttgcgcttaaaagggcgagaaatgtcaattggagcaatattttcggcatgtagtgctggaatttcaaaattctcgaaaactggcatctttgtgagaattgaaaacggtacgggagaattacaaaataagtccccatttgcgcttaaaagggcgagaaatgtcaattggagcaatattttcggcatgtagtgctggaatttcaaaattctcgaaaactggcat

SEQ ID NO: 25365 - DNA, 938 bp, Heterodera glycines
tagagtcaaattcacttctcaataatctggctaattattaaaaaacctttttgatgctaaaacggaaacattcattattaaaacatggattttctcacttccatcgctggcgggcgtcgaaagattcgggcaaatccaagtccaaaaagcgcgtcttccccaacacttttttggctttggtcgaatggcttaatttaaaacataaaataaattaattaggccttttttaccggacgtggtttacgcccatcattcgccatttgatggcttcgtcgtaagattggaactttgggctgagctcggccttaatccgatcaaatttaatgtgtatttactgtccctttttaaatttcaattttttaaattatagtaatattattttaaataataattcttatttttaattggtccattatatttattattgtcatttgcccaccctccacaatctctgccgacgattcacataatcgaccagcgattgtccgctgatctgttccgcctgcggcgacggacgcgcggcgcgcaattcgtcgcgcgcaatgaaaacgcggcccgtgtaacggtgctgagaattggacgacgacacttcacaaaataacggacaattgaaaacatttttaaataataatttattatggtttctccgcaacgcaaaattatttattttcattcgatcactttcatcggccgaagaaacgaatgccgagggcagaaaatggcgccgttcgtggcgaagcggcgcattgcgagtgcctaagaacaaaaaaaaaggaaaataagcaaaaatgtcaagcttaagacagtcaaaattgacgaagatcccgggatttcaatttctttagtgtcagggcataatttttctttcatctgagagatggcctcgtggttttctataaatgccattcgccaaaagggtaattaccgaaaaagccatg

SEQ ID NO: 25366 - DNA, 1851 bp, Heterodera glycines
  unsure (1)..(1851): unsure at all n locations
aataatttactttttctcatttcaatgccaaatttctttttccatttgcttaatgtttttctgtcaatgcccaactctttcgcaaattgcttctgttttccatttactgctgacattcttttaaactcatcaattctttgaataaattcctttcttttcatttcataataattttggtcattttttatttttattcctaattcttttttccatttgtaaatttttgttcggccaattcccaattttttcgcaattttttgctcaattctattccaaattttgtgagaatatttccccgttttcttaattccttcttttgttgcgtgaaatttatgaacaatttcgattttttgttggtcattcaattggttgttgttctgattactttcaatggaaacagcagaatttaattcattttcattttgccaattcgaattttgatcactttgatcagtttcatttgcttccattttttcattttcccatttttggccaaatatttcggcaaaacttggccgaattttttcattctttttgcacaaattatcgtcaactgataaagtttcgtcgaataaattaataattaaaaatattacaaaattcaatttatagattttcatttcctaaaaaatataaaaataataataaatttgttttacatttttattaatgaagtggtgacataaaaaaatttataaattctacaattatatgaaaatatgatttaatcacaatattacgtggaaaatttttattatatgattataattatttaacattggtaaaatattggttttaaaaaattgtgtaatatagaaaaaataaaaattttttggggtcggatttccgatttccgattaaatttcctaaattttccttatttaaatttgagtgaagagaaaaaatcagcgtaaaattgagcaataaaaaaaatctgaaagtgttgggcatagatcagactaatttttattttttcttgctattttatgaattaaaattttagctttaccaaaacaaatttattacgacaaatgcaagaaaccagaagcaagcatttgaaaatattcgcttttcaattgtgttaaaaatgaaaattacagctattaaaagaacggatgattttaaaaagattgagccgaaaaaccaaaagacaaaagaatggacggagtgtttcggggtttaacaaaattatgtaatcagagaatgagtggacgagacgatttttggggataaatggcaatggacggaatgccaaaactcaaaatggcggaggcccgcggatataattcaacgaaaggccaatgcggaaagggccgaattggttgtacagcaaacagcaaacgaccgaaacgatgatgagcaaccccaattgaagacgccagtggccagtggcttgaccattcgtttgtgtgctgcctgttcctttggctctgggggttttgcgtgcgttgccgccccccgtttcgttttgttctttgctgtccgtctgcctcctgctcgcttgtgttgtttctttgtcttgcctgctgttccctttgttgtccctcgggtgtccntcgcnttggggttcgttgtcgtccccgtcgtcggtgtcctgtctggtgtccgtttgtgtgctgtgctgtttgcgtgcttctttttttgcgttctttttgttcngtgttttcgcttgctctttgctttcctttcgtgctttgttgtgctcccccgtctcggcgntttcttcgggttggttgtgctgtgtgctgtcccttttgttctctcccgttgttgcgctgtttgggttgcttgtgtttggcgttttctgttgctttttgcccgcctcttggcctttttcctgctgcttttttc

SEQ ID NO: 25367 - DNA, 1274 bp, Heterodera glycines
gtcaataaaatgtgattgattgagtttcttatttatttcttttcattatttttagttttctgttccaactatttcttaattttttccgaaattttgcacacctgtcaagaaaaatgattgatgacattcgaaataaagaatatccagacgatttttttttgcagttttgaataaaatgtgacagttgtctacggaaatgattgattaccctcaaaattaaggcaaacccagacagtcacgtgactagacccctccccctttttgcctatttcgcacacccggcccaaatcgcaaatcattcaactaaatagttggatttcattaaactctcttcacgctctaattttatttctctccgctctatttttatttgcattaattaaatctattaatctattactatttacctacgtctttttcttttcaaatctctgctctctttaattcttctgtttcaatttcgtttttctttttaaaatgtcttttaaacgcgtgaactccttccaacccgccgtgccaatggccaaaaaatgggatttccgatcaatcgggtaagtgatttttaataaattaaataaaaaaaataatttcttaaacaattataaatacaattataagataataccctttaagaattatttcaaaaaatttttttttgttcagaaataattttgctgaagaaatggaaaattataaattgatggattaccaatcgacaacttgcgaaaaaaagtcacgtgcagatttcagaaataatggaagagaaataaaaacccatcaatcaattttggttgacaggtgacctacttttgaaaaagttttttaaattatttattcattttcaatttttatttttaaataatcaattttattgtgcaattcaataattattcatggcattgtttgctgctaatatcaattaattcacacttcttccaaattccgttatcgattttttttttcgcggcggcggcatcgcgtcgccggacgggcggggagggaggggggaagaggtgataaaaaccgcacggttttggctaattttcaaaaagaatttttaatttcaggatccgaaaaacccatcataaaaaaaaatctcaggatttgagaaaataaaaccggcccaaaaggtttgggatcaaaaagatttaaatttgcaaaagaaaaaattgaatttccttcacctgtcactttggtgacaggtggatgattgatgaccttcccgcggcgctgccgcggcgcggggtgaaaaaaaaacccccaaaaatttgggg

SEQ ID NO: 25368 - DNA, 2111 bp, Heterodera glycines
aaaaaattgtcaattttctgaccccgcggaagggccgatcgtcggatgcaccgtcaaaaatgaaatgcacaaaagtatttgtattgatgaaaacatattcgttcatatttccttttaacagacaatggttaatgtgtccgttacttcgtcaaccgacccggcaaaagtgcgcgacgaattggtgaacgtgctgagaaaacacggcataatgccacagcagaacgggtccgtttaacagcatttgttttgtcaccatcccattccaataaaaaatatattgaattttctgacagatggaaaatttttgggtcgcgaaaaaatgcgacagacggtgggcaaacgacggtggagttggaagtggtggcgattgaaaacatgagatacgtgggggtgaagcggaagagaatgcagggcgacgcgttcacttacaaaaggatctgcgaagaggtgcagcgagggggcggggaatggtgaaatgaccctgaatcaacccaaaacaggtcctcaggatggccggtctcgaatgaatgaatgaaccgcacgcggcgacggaagtgcgagtaggaagcagcaccatctctccttatatttatatcgcaataattaatcataagccctctgttaatcactttttccttatttcatgttatatgcgttctgttgggccataaccatgaaaaaatccaagggataagtttctctgcccagaccaatattattttttatggtttttggcccagcagatgagaatctatggaacacctcatcaattcctattcattgtatttaatttgataataaactacacattttaacatatgacattttagaaatttatgacataaaggtgcataataagtacaactaatttcaagagcaaaagcggaattttcaaaaatatttaaagctgagatgcaattcgatgaggatgtttaggactatcatgtgtaaaaggatgggggatggatgactaggaggggtcggacaagattctccgcatgttcattcgtcctcgtaatactttctcagtctcacatgccatgcgacggaaccacaagcggaaatagttcggaattggtgaatgattttgcgtggcatgaagtaaacactgttttcacgtagcttaaaaattgtgattgaatatggcaataaaaaattgttggcaaaaccataaatctcgcataacgtattccctcacggcgtaaagtgtttaatttggcctcctcaacccattgggtgcactaaaatggcttttataattaataatcgtaagtgttgcaaacctgggacattggcggctcatacaaatccaacttcaaaatatctgtcacccttttgaagtctgcagcatggaagcaaatcacatctttcactaatcggtcgccgattttgctgtttaatttcggtgtaattttagttcggtttgaagctgcttaccctttttccgtggggcttctgactgcctgcagaaggccaactgctgcagttgtgtgtgctttgttttcgtctgtcacatggtcggcatggcaaggagtgcgatcttcaaagagaatttccctccgctccaacgccctaaaaaagaaaaattattgggcaaattaaaaagatgaccacttcaacggaattccggcacttttagtttgtttagtgccagcacttcccctcctgtgctgttttgactttatttcgtcgaatttcgattcgtccgttcggatcagttgctcaccaggacgacaccaataaattggtccatcatcggattctaaagaagtgaatagtttatggaaaatgtcttctaggaataaccggatggccttttatcagaacagatagtccgttcactccatggcagcaaaatcctcagaaatgggcattcctctaatcgttcaattaagtgcttaatttccaaatttattaaggttatgtatacaagtaccgggtacaggctcgaggagatgcacttctttttcccccgtcgtttcccccggaaattaaaatattcacgaaaaaatcttagtaaattcttcctatcttgaaaacggtgaaaactggtaaaaaaaaacttttttaggggggggggggacaatgcgagtggaaacgggggggggggg

SEQ ID NO: 25369 - DNA, 1690 bp, Heterodera glycines
attaataaggtgaaagtttgaaaatgtttattaaaaaatttcatggatgaaatacaaataaaataatcaaaaagaaaaaaaataaatttatttttctaaataaataaaaaacattgtcagaggcagtgcctgccgaaaaaatagacaaaattttttcaaaaaagccaaaaaaaattgaaaatttaaataaatttaaaagtgaaaaaagtaaaaaagcttacaacaccttcgattcccaggacgtctccgttccaagtactaagaaggcccaacgttgcttaacttgccagatcggacgggatggcgtgctttcaacgtggtatggtcgtaagcgaaaggacagcaattaaagtcatttaataggcatatttaaaagagcctatttttttgccttttcacaagagaatttattaaaaaaggcaaaattcgccttaaattaataaggtgaaagtttgaaaatgtttattaaaaaatttcaggatgaaatacaattaaaataatcaaaaagaaaaaagaaaaaaaataaatttatttttctaaataaataaaaaacattgtcagaggcagtgcctgccgaaaaaatagacaaaattttttcaaaaagccaaaaaaaattgaaaatttaaataaatttaaaagtgtaaaaaaataaagtaatttaaataggcatattttaaaaaagcctatttttttgccttttcacaagagaatttattaaaaaaaggcaaaattcgccttaaattaataaggtgaaagtttgaaaatgtttattaaaaaatttcaggatgaaatacaattaaaataatcaaaaagaaaaaaaataaatttatttttctaaataaataaaaaacattgtcagaggcagtgcctgccgaaaaaaaagacaaaaaattttttgaaaaaaagccaaaaaaaaattgaaaatttaaataaatttaaaagtgaaaaaaattaaagtaatttaaataggcatattttaaaaaagcctatttttttgccttttcacaagagaatttattaaaaaaggcaaaattcgccttaaattaataaggtgaaagtttgaaaatgtttattaaaaaatttcaggatgaaatacaaataaaataatcaaaaagaaaaaaaataaatttatttttctaaataaataaaaaacattgtcagaggcagtgcctgccgaaaaaatagacaaaatttttttcaaaaaagccaaaaaaaattgaaaatttaaataaatttaaaaatgaaaaaagtaaaaaagcttacaacaccttcgattcccaggacgtctccgttccaagtactaagaaggcccaacgttgcttaacttgccagatcggacgggatggcgtgctttcaacgtggtatggtcgtaagcgaaaggccagcaattaaagtcatttaaataggcatatttaaaagagcctatttttttgccttttcacaagagaatttattaaaaaaggcaaaattcgccttaaattaataaggtgaaagtttgaaaatgtttattaaaaatttcaggatgaaaatacattaaaataatcaaaaagaaaaaaaaaaaaaaaaatttatttttctaataaataaaaaaaattgtcaaaagcaaggcctggcccaaaaaaaaaaaaaaatttttttccaaaaacccaaaaaaaattgaaaatttaaataaatttaaaaatgaaaaaaa

SEQ ID NO: 25370 - DNA, 1231 bp, Heterodera glycines
  unsure (1)..(1231): unsure at all n locations
aggtgcaggtgcaagtgtgtttctttgcagtgcaggtgctaatacagatcagatgcaaatgcatgtgatttgtgtgcgtgatttgagcgcaggtaggtgtgtgtgggtgtgtcaggtgcaggtgcaagtgtgtgtttccttgcaggtgcaggtgcagatacaggttaggtgaaaccccaagaagtgtgggtgcgcatttttgggtgagcaggttgtgtgggtgtgagtcaggtgcggatgcaagtgtgtgtctgtttgcaggtgcatgtacaggttaggagcaaaattcaaaagaataaattcaaaattagtgatttggtccgaaaagaaaagggaaaattcgcaaaaggatactttccaaattttacggcggaaattttttaaatttataaaataattaaatcagaccaaatcgcttatcggattgaagatttaaatgaacataatattaatgggatagtttatggtccgagttggtaaaactttttcagaaaatcaaataaataaaatataaaagaaatccgacaaaaaataaaataaaaatgaataaaataattcttttcgtactttttggtttggtatttggccaatcaaatgatgattgttgttgtctttcgaatgaggagaaacagcaattgaacgctgcgagaaaacccattaaaaaagcatttcgggataccgtcagatttaatattgaagcccgcgatttcgcggctgcttctcatagggccattacggaggcagaaaaaactaagactcgtcaccccgaggcaccgggtatgaaaacatggttcggacgacttttagaaggggtgagaaaagtacaaagcatttctgaaaaaattaacgaagaaaaacagaaaacaatatagacaagacgtgggtagttcataccgtaacgcttacacacagtctgacctcgggatcggggaaaacccctatgctcccgggattcgagaatggttcgtaaaagtatcagattgtatctgggaaatttacaccattttagataaaattaattcagagtctcaaaaggttgagacaatgtggagtgaggtcgatcagtccaaagatttcgaccaggtgaagaagctggaggaaaaggtacttaagggtttgagtgaagcgagaaagctacatttagaatctcgcagaattcacactgaaatattggagctagaaaataaagttcaatctatagtgtgggattttattgggcttcacgangtaa

SEQ ID NO: 25371 - DNA, 1493 bp, Heterodera glycines
ttcttatcccttatggtgaatatttgaaatttgatataatttgataaaattgattaaatgcaaaatcaatttcttcttttgatctagagcctgttaggtttaatttaccacttgaaaatacaatgatcgacattttggggttttggtttctgtagaccaggcctgggaataattcaggagtaaaggagcaacatttggctcctacaaaatcatagagcggcccgaggtgtatgtgaaatcccgcatcagctgtcgcaatcaaattctttaccgcaaattcgtggactcgagcctcgttatacccacattgctttattcgctccgtgacctgctcagcagcttgcctacattctttctcattagttgcccctgtacatacgaattttccagttgagaaaattatggcggtagcatttggattatacactttcataattacagcatgaattttacgtggattatattttgtggagggcgatattaaataaattttttcaatatcgaggggtgttttggtgtctacaacagcaacgcaatttttgattattggaaaaaacatttttaaatgaataataagagaaaattttgctatttatactcgaataaattgaatttagttataatttatttaattatatttttaatttattaattttaattatttatttaatttaattttaatttatttaatttaattttaattttatttaatctgtattatttttattattaataataatttatttttattaacttttgtattaatatttatttaattttaatttatttaatttaatttaaatttattttttaattttatttatttatttttaattttaatttaatttattttcatttccttgatcagttcgctaatcagagatgtgatcgcagatcagatgtattcatacccattgcctactgatctgaactgtttctagcattagaggaacaatagttatccattcattcaagtcccatgataaaaaattatccagtgataattagtgcagaaatattaataaaatgatgataattgttcaaattcattgcgttttcctttcattccgatctgatcaattttccacttattcttttttggtcagctctaatttggtctttccaacgtcttccagctgtcccatttgtacattccctgcattcagactcgacttttcaagtggaaaagtgtatgagccaaagtcgttctcggagaagttcgggatgatcattgtgcctgtggcgaagtccaactcagcatacccatagcgatctgtctaaatgagggccttttaaattgcgttcattaaagaccaatattgtttgtttaatttggtttttagctaggtttttgtccaaaatattggaccagaaggtgtctgtcggtgcgcattggcgataaaaggaaattttgaaaatttaatttcaatttattaacatattttgtccaaaaatcaaccaatttattgatttccgagagcaatttttaaaat

SEQ ID NO: 25372 - DNA, 2128 bp, Heterodera glycines
  unsure (1)..(2128): unsure at all n locations
aaaaggaagaagttaagctgataattaaattttggaaaaaatttcgttttgtcggaaaaataattaaattcactgttatgaaaaaggtatttttgaaagaaatataggaaaaaaaatctgcaaatttttccactatgggggtgcctttatttttttatcgaatcgggatcaaattttttattttgcactaattataattctaataacctaattccatagacttaaaattaaaagcccgtatgtcatttttttaatattacaatgccgcaggtcaaggccaaacttaattgatgactcattttatgaatgaattaattgtctaattaattatccatttcaatcaaatttcagttccaactggtgtgttaacaatggaagaagtgaacagcgtgtatcagcattattcccatcaaaatttaagtgatgccactgggcttttcccattgaaatttccaacgcaccgacggaacaaaaacgaaggcacaattgagatggaaattgaaaaagtgtctgaatttgcggtggaggaggtgggaagtcgccgatttagcgatgccatggacattgggggatttccatggaaaataatggcacaaatcgaaacgaaatacggaagcaatgagaaatggttggactttaccctttccaacgatggccttgaaaatggtaaaaaaaagtctttttcataaatctgtccgaatttaaattcaccaaaactaaatatgtataataaacgattatgcagacaaattagacaaagtgtaaacaataaaagaatgcaagaataatggaaattggggagcagttatggtggatttaaatatttcattagttttgcggtgagtgggattcaaataaatttaataaacttcatattttgaaattaaaatttttaaaattttaaaaaagaaagtgacaaaaaattgaatagaattttttgaaattttttggttataactctttgtaaatttttttctagattttaaaaaattaaataagataggatttgataggatatgtaatgcatctcgtaataccaatttttattaattgaactaaatttaagctaagttatggtttcttattagcaataaaattaaaactaataataaatttaaatgtttctatcattgacacttttgtaactttggctcaccatgattttatattacataattgatttaaaattaaagttataatcggaaacattgctgattttcatgttaaaaaaaattaattacaatatttgtcaaatttttgcatctccaaattcaaaattaaggaattgttggatccgggcaaaggattttacgacaaagatgaggacaaagtcacattggccattgatggaaataataattattttttctataaaattggtgtaattaattattgaaaagactcatgtaaacatttaacataaaattagaagtgattttttaaaggaaatgcgttaaaatataaatttgattattatttaatttgctttaagatggaaattggagccgcaaatgttcggcaacatttcgaattgtctctcaaaagagcggtgtggaggattttaagagagaatccagtgaaaaaatgatttttaacaatgaagcgaagtcttgggggaacaatttcatttcatttgcggtgagtggaaattaattagttaatttacattttaatattgtaatggcaaattaaggaattaatggacccaagcaaagggttgtacaacaaagacgaggacaacgtcaccttggcaattgattttacatgtgaatagcgtaaacatttcgagaaggattgaaaagggaaaggaaggaaatcagcaggatgagaagagagtcttggagggcacaaaattttcttggtgcttaaattttatatttttttatagtttgtaaagtattttggtttcataaagcaacatattccaatgatagggatggatttttantgtctaaaaatcgagaaatatatatacctaaaagagttgataaaaagctacttattaagtttaactagtccttttcacatgcattttaaattttgaaaattctatttttgtagaaaattgtctacataaatcgttatttagttcaaatgatttaaataatattaaaaacctctggaaaaa

SEQ ID NO: 25373 - DNA, 1147 bp, Heterodera glycines
tatcaaaaattaataaaatttggaatgataataaaatttgtaaagaaaacaaacaaaacttactgtaattggattattgtacattttaaactgattcatttaccggccatacaataaaatatatttacaaccaaaaaaaggcccgaggctgatcatatcttcgatttttaaatactgatattctacatttctttacttaactatctagcgctttataaaaccgaaatcacagctccgctaatttgggaattttttccaaattaattgaatagcctttttcaaaaatttgggtttttaattttacttttgttgaaatttgcagagagctggcaatgattgagccgataggaaaagccaactttagaaaggcatgcgcacttagagacacccgttccatgtatgcaccgacgtctgccgttgatgcagccagcgttccaaatttggcaaggaactctgccacaatttcagttgctgaacggtaaactagttggttatgagtgagttatgccaattagtcgaagataaaattcaaaaaattttaaggattgaaaaataatttaaattaaaataatttatccgtgtaaaaaatgctaatttgtccatttttagttgaagaataaattttaccacgctgattatcggcagaaccagcttcgttactgtcctcactgtcttcatcactgatttttgcgacgctgagtaaaaaaattgcacttgacagtgccgcaaggaataaaaatgttggcatcataatatgcttaaaatgaatgccattaaataaaaatattatagctgctttaaaatattttccgaaattttttcgattatttaaaaaatataatttcagcgcttgtttttgcgtttttagtcagtggataattaagttgcgctggagagcttctggactagtcagctggcacacaactcagctgatgaggacaactcagctcattttaatttttcttttttttaattatattttaatttatatatatcatttttaaacgttagaaaataatattttaataaaacttcttaatatttcaattagggtagtaaatgatgggacaggcgatgaatgataaatttaatgaaaggataaactttttttttattaatttgattttaatattgttgcttacttaac

SEQ ID NO: 25374 - DNA, 2040 bp, Heterodera glycines
cgacagatattataattacatttaggcacagatttttcttccgttttattataatatgtaattatttactgtattttctcttaaaattgaccatttcttaaaggaaactgataatttgaaaagccaaccgtaaaattaaattagcaatttctaaaggaaagttttacgacactaattcacattaatccgacaataaaatatcattaacggagaatataaaaaatggacaccataaacaattggatgggcaaaaacagaaatttgttttattattttgccttttcaatggcaattccttcgacaattttgtacattttggaaatggtgacaatcataagacataaacaatttgcgcagctgtccttctacaaattgttctgcgtccgagcaattacagtgagcaaaaagcaattttaaaataaattagcgaaaatattttgctgatatttatcataaaaagccctaatttaatgagtaaaaagtatttatcataaaaaactctaatttaataacaaatttggttctattcataaatttttacagcaaaaattcctttaaacatttcattaatcacccaatttttccataaatattttaaaattaaccttaacttatcggaccaatcctttgcccgtggcgcctatcgcctcagcgctttaactttacatttaaatgttatcccgttttaaattcgatactaaaaattattgaataatttttcaaatatgccatgttaaggacattctgtggtttctctcttccagttacggtaaccgtatcccagcactgtttggccaacaattgctgcccttttaccgtatgatgcccggctgggccatcgttctgtgttttttttttgcaacaacagtcgcttaccaagcctcaaatattgccacttttctcattcagatgaatcgtttcactgcaattgcatttcccctcaaacagaaaagggtttttaattattaaaaaattaattaatattttaatttcatccattagatttgggaaagtcaatcatttttgatgatattggcactgattgtgttcgttgtgccattgctaagctgtttgccaattatgaaaatgaacgtcactccaatggcctatgaaagggaaagcgacggatttttcatccaagaaaatgtttcggtatgaaggaaaagcatcggaaaacgcaataatcgagcagagaaatatttagataaaaattctgcatatttccattaaaaaaatattcaagctaaaataactgaattccgaagtaaaagccttagctttggcctctggacttaggcttaagcataagctagacttatgttggttttttacttgactttggttttagcttagaccgtcctagctaagttgattgaagtcggattaaaagccttagttttggcctcagataggcttaagcataagctaggcttatgtcgttcgctcagaccgacttaggtcacttgttaggtctatgatcactgatatattattaaatttttccgttttttagggttattccttccttggctatctcaacggtatgaaatcgcttacttctgttattttcctgctcttgtcgcttttggtcaatttgtcaacgctaattgcctatagaagaagcaaaagagtgcaccaacaaaattcccaaaacggaagtgacgtcattgagaagaaattgctgatttacgcccttctcactttttctggccatgcttttgtctcagtttttttggtttaaaattactaattgctaaatatttatttaattttatatttttagattattatgggcaccggagttttctatgactatccatcgattgtctacacccaatatccgtggatcaacgacttgtgcacttcggtgttgtccagttggatgttgttgttcaccagcagcattttccgccaccaatttgtcaaggacttttgtccaaaatgcatttggccaatgccaacaaacacttttcagacgccagtgacacatttaacacaaaatcaaaatgatcgccgtttatttcaaaagccatgagccca

SEQ ID NO: 25375 - DNA, 1090 bp, Heterodera glycines
  unsure (1)..(1090): unsure at all n locations
cggcccaattcggcgcttcctcatcccaccgccaaattgcagtgtccgttctttttccagttttcggataccatggcggcggtggccgggggtttttagttttgaaatttatagaggaagtggcagattctcgggataaaattccactcggaatgcttgctttgcttgtaaattccattctccccccccccttttttagacgcgggtgctccactcggtttgtgccattgctgatgacaattcggcagctttgctcagcctcaaagagttgaagtgcattctgttggccagtcgtcaacagttcccaattgtcgacgtccgctggcgaccgttggatgattttttgttgctccgctgtgaggacagctcagtttatgtgtggcaaattgagacaggtgctgcgcattatttatttgtcatttaaaattgagcatttgtcatcattttggaacattcaaatttgtttacttttttatgggtttgagccaaaaaagtgtccactttggcactgtcaatttcaatttgcctaagtgagctttttgatcatggaaatcaatttggaacggactaaatttcctgtgtttactcttcggagcaggtcgttttccaccacatcgttcccctcttgaaaattttaaaaaattttcaacttgaaaattttcaataaaaaaactttgtttttataaaaaaaattccaaaaagatttaatagaaaaatttttagcgaaattttttaaaataacttggtaattcatcttaaaattctggaaataaacatataaaatattttcaactctgtccattctctgaacttcatctttccaaatgttcagcaaatctcgaccgaattgttgccggactgaccaccgatgaggtgactcattttgccaaaataaactgctggacattaattctgaataggtaatggatgcgactggtgaacaacaattagtggccattagtgcggagaacggcgacgacgccgttgaaaatgggcagcaacaaatgctaaagggtgcctcgtcccaanccgtgcaaatgctcaagtcacagagacagcacagaaacatcgctgcggtaatgtgtggcgg

SEQ ID NO: 25376 - DNA, 1350 bp, Heterodera glycines
  unsure (1)..(1350): unsure at all n locations
ttgctgcctgcggtctttcacagttccgctgtctgtgttcggctcttctccccttctttctccgccatttgggcgttttttccgcattgagtgcattttgtcacttctgccaaaagggccaaatgcaattgaagtgattttaacatttttgctttatctttgttatcattttgagatgcccaattgttctcaaaatttgtcggacagagaaaagactttaaacgaattgttagccccagcgatgactcatcagaagcgattcattggtaaagtcgagaaaattattcgactgaccaaaaatacggatacacacgacagatatggtcgagacaaaagtttccagcggatggattggagtggaaaaggagggaaacgacgaggagcaaacattggcacaaaatgttgctcaaaaagggcagagtattggcacgaaacagcggcggtttgcgatgaaaaacaatgtcacataaaaaaaaattgtcccaggccattcgaaatttggcacgaccaaatgccaatttcgggcgaaagtgaggaaatgccggtcatggcactgagtccctttctgtacgtttcgcatttcccattccgactttaagaaatgttaagggaacgggcgtattccatcttcgccacgcccgtgtcacctccaattccgccctcatcaactccattttctcattccgcgacttcctccgccgcatcagaaaatgctcagtccgttccgttcccaacagtgccaatgtcaaacgcaccgccggacactccgaccgtatccactgccatagttaacctaattaccgtacccgacatcggaccctcacccgccgtaaattacccggtcccaaaaccattcccccaaacggtgccatcatttgcattctgatactgtatccatcctacagtgttttttacagttttcgcctccttttggccttttcccctcgtcttctgctgcttttttttcttctccatttgttctgcgccataatttttctgagaacgaattggaaataacagcgaaagaagagaaaagggacgacaaaacatttggaggaggaaaagcattgacagaaaaaaaggaggaaataatccgcggatttgtgccattaattgtaggacaaaattcgacgaatgcatcggtagaattgtcagattgttaacaaaaagtggacaatcccttttatgccaactctgcgctctcccacaatttgcccactcggcactgctcatggacaatgctaaacacggcacttctcgtgagtgtgccaatgttcccaaattgaccnaatgccaccgtatgcgcttaggttnggtccatattctcgactttgcattggctttgccttt

SEQ ID NO: 25377 - DNA, 1745 bp, Heterodera glycines
taattttttaaaattccaatcttttcacaacccatagcttatctaggtagcgaagctcccaaagcgcgaagcgctttttcccagctaaatagccgacggttcacgcacccgctagttccatcattagaaagacattacaattttggcatgttattttattttgttttagtataaattttacttgattaaaaaagagattacgaattttcaatattaagtattttattattcctaaaaaatatgaaataatttgtttattgtgatttttgtatttatgttttccttgccattggcttataaactcgggcgttttttagttgccgtgtagatcttttatagtgagtgggtgatctaacgcataaattaaggtaattaactatattatcattaaaattaatctataaaattgcaaaacaaatttcatttcattatcgaaatactgattctttggtttaccaatttaaagaatttcactgttttttgttacttggcctttaaaaatttttttatttaaatataaacatattaacgagataaactttttttaaataagtcaaatttttaatattttaaataaaacaagcttttattttaaaatttatttatttataagtattgaatccaatgctcgcaagacaaatttaattttcatttaattgttcttaattaatttaaaaaattgtcttatttttggtcgtttgtcatttaaatttcattgcaacactgaagctgaaaaattttttgtctgtattttcttaaaagttattgtttaaaaacattattaaaatttattgattttaactgcaggatgtgcgacctcacattccatgcaattgcctgccatatgtataattattccgcaataatgtttgatttagttcagagaatttactttcctgttgtttttattaattttaagctaagtttttttgattatttaaagcataaacatatatttttaatttgaatgggttttttcgattattttgtttaattcttttgaaaattttgtttgaaattatatataatttttaaaactgtttattgaaatttcagattataagatttcaatttttttatttatgagtaaaaaaaatgtttgcttatttatcttttatatatttatttacatattctttaatacttagtcccttatcactttaaatttttattatttttttgaacacatatgaatagggagttccggaccggcacaagtggcgaacttcatgtttttgttttgttttcattaaaattgtagaataaatttaaaaatgttattatactaattcagccagctgactgagcgtcatatttcccatgcacttttaattttatgattgagaaggcagaatttttttaattatttcttttttcaggacgtgaaccacaacacgatatattttccgaattgttcggcgcatcaggaggagtcatttcaaaaataagtttttaattaaaaattaaacacattttgcttaatcacaatttgtaaattagttttttatagagtttgaaatttaaaattgaagaagaattttattattttcgattaaatttttcttaataatcgaattttgacggtacttattttaatagtgcacagccgtttgtataagcattaatgtattgtagtttctatattatatttattctaattatcttagtttaattaaatttaaaaagtaatatttatttatattatttttacattactccttaatgctgcatcatttttttaattg

SEQ ID NO: 25378 - DNA, 620 bp, Heterodera glycines
tcatattcgtgatcagcgaccccgaaaaccccaggaaagatcttttgatgaatttcaaaaaaaaaaattattttttttgaaaatgggggggggggacaaaccctactattaccaaaattggtgcgttattttttcagggtgaaccgttgcctctttttgtgccgctcagagaacataaaatgcatttggtgaaccgtcagttcgtgctcagcggagcggagacgggtggacaacagcaaaacaagcaggaacggtggtctcaaacacagaagcgcaacgcgttcaggcacacttttggcgcggacattgcgaaggtggcgcaaaaaagaggggggggggggtaaaaaatttaaaattttttcttaggaatattacaagaaaaaattggcgctacttgcaaagagcactattttgaaaattttttcaacttttttttggtcaaaatttttttttgtttaaaaagtcctgaaaccaagtacccggtggttttaaaggtcgctgatcaacaatatgacaattatttgggcctattaagcaaatttggcgctagctataaagtgatagattttgaatttgtatcaaaaaccatatgtgggacccgtttgtcttgtaaatttttt

SEQ ID NO: 25379 - DNA, 1246 bp, Heterodera glycines
atcaatcaatcaatcaatcatttatacgcaaaagcgtgacgccgaaaaataaaagaaataatgaaacaatatcaaatataacaaacaattggtcacttttggagctggggtggcaaagaaatcaaaaaattcagatcagatctttcaagaatttagtaatctcgtctctttaggcaaaagtctatagagacgagaggttcgaataaagaacgaattgtatctagcattggttgagcaataagctgttcttatagtgaattcattttttagtgtttttggaaaaagaaaaggattcgttattttgtaaatttattttacctaaaattatttcatggaaaagttttaagtctatttttaacctacgactctcaagcgacttttaatcataaatgtttaacaattcagcataattaggtaaatcagcagcataattgttacgtctaaatattactctcaaaaaagttttttggacattctccagtttttctatatccttttttaaataaggattgaaaattggagatccaaattctaaaatttgtgtgcaataaatattaaacaaatttacaagtattttcgtatcaccagttttgattgactttaatatagcaaaagcagatcgtaatgcttttttcgagataatttcaatatgttgtgcccatttcaaatcattagtaaaatgaatgccaaggtctctgactggttcgtttccgggatttttaggaattggaaagtcatcaataaaataatttattttttggtttttgtgtcccaaatgtaaagttaaacatttatttgaagcgattttaaggccgtttaatttacagtattgattaaatttgttaataaaattttggagtggagaaaaggaaatatttgaaagaacatgataggccttaagatcatcggcaaatagtttaattttaacattttcagtttcgcagaattttggtaaatcgtaaaactgtcctggccacggatcccacggcacgtgtgttggcgctggccccgccgaatgtcgccgtcgtcaagctggtctgagagatcagacccgatttcgccgaaaaacattcggttttctaagtaattctgaatccattttaataaggaattatttataccaatgctttggagcttagatattagccggttatgtggaaccgtgtcgaatgctttagctaaatcaaaataaattacatcaattgattttctattttctaaagcaaaactgaaatcatccaccact

SEQ ID NO: 25380 - DNA, 1325 bp, Heterodera glycines
cagtcactttctgctcaactctttcaatccgaggggatcgtcgtccgtctcatatattttcctcgctttttttggctttttcaattttctcccctttttcctcagttttgcccctctttggtggtcacttttgtggccaaagtgtgcggcgcgccagcggaggacaccaaagttggcttagtgctcaacggggagcaatgctttgtgttggccctttacgttttggaggcacttaattaattaattatctaattggttgcctaatcattttgcatcgtttaatgaacgcgtttgttttaaggacattgaccaacaattcacgcctgacatggtcagttcggatggtgtcatttctacaaaaaaatgaataataatttgctacgatattttcattgcacttttcggttttatgaccactgaaatttttaaataaaaattcatttttggggtaatttgtgacgttgatcatatgacctttattttgcaaaatttctaacctgaattcgaacaaaaattcgaaagcacccaaaaattaccctaaaatgactttatttgaaaatttcagggggtcacaaaacagaaaaaagatgaaataactcaaaaactatggaaaagaaagtcagattttttgtagtttttaaattaaattttgccaaaatctttcttatgccctcctccgatcggcattgctgaatttagcccaaaaacctcaaattttgtcgttttggtctcaattttttaaataaatctgctacaataatgccaataatttcctctatgccccctcatttttgaactttacagaaggaaatggcgttcaatgcgttggactccgtccgactgttcggctccgtcttggccaattcgctcaactgccaaatgccatcggcaccgcggggtttgtgtttacaattaatgccaaatggtggtgccaataaaaaaagtgccaaaaatgaacacttttttccttttattggttctatgcgtcataatttaccccctccccccccccataaattaggtccctcctccgccgatctgttggagacgttcacgcgctgttaccgtgcccatatggacaaactcatgcacgccaaattgaccaagtcccttttctgtctgtccggcggtgaccgacgacggcacggactgaacatgctgtaccaaatggtgtgccgcaaattccccagtcagttaacaaatcatcgaccaatttttgggatttgttttttcttttaagaaaaagtacttgtgcccgtcctcctcggcttggaccatccccgtgtaggagttttagaaaaaaaactcaaaaaaataccaaaaat

SEQ ID NO: 25381 - DNA, 958 bp, Heterodera glycines
agttttgcaatttaatttttatttatattttattaacataataaaatgctatttatattttattaacataataaaatgctgttcatctgtctattattgtaataataagccttcagaaattggtaaaaatttagcaaaacgcaatacaataatattcaaaaggagaaaaaattaaattcctttcacaactcataaatcaaaaattgggtatcttttaaaaagaattttatttttcgatgacattttattaaatatgaaacatttttaaaaagtttaattttagtttgtttctaaaaccttttgacaagtgtaaacaaatttgtaaaattacgaaaaataattagacatctaaattactaattaacctttaataaccagtcggtcgaaataaagatatattttattttttcaacaattatgaaaaatccctaatacgattgtttggcgagaatgaaaaaattaaagcataagctcattacataaaattatttttatatattttaattttgtaacaaaccatttcttactcgtttttaaaatttttggctaattaattaaattcatacacccctttcatcaggatccaaaaatagaaaaatttgaaacctttacaaatattttgtgaagaaactaataaagtgttattataaattggcatctagggccgaatattcgatatttagttggtggtaattcctattaagaaaatcccttatcaaaaaaatccaggaattcagaaaactaaaatgtatcccttaataggtggaatcaaataaaatcattaacatcaatttttggccagattttgcgattttaaagcttttagggttttacttggataattaatagcgcaatgtcgtcccgatatttttctatgccttaaacattgagaattttaaaaggtctaggttatggggaagtgttttcaattgtctagacattttcaaaagctgcatac

SEQ ID NO: 25382 - DNA, 888 bp, Heterodera glycines
atgtattataaattttaatgagcggcattcaaagcagcgacaaatacttgggatttggtgtacaaagaattttgggtgaaattatttctagctgtcacacttgtggcaaaggaatgattgattacctttccgcggcgtggcgcggcgcggcgcggcaacttcgcagcgcaccgacggagagtgaaatgggtggcaaaaaaacacccgcacgattttgtcgagaaagaatatccatgaggcgacaccttcaaagggttgcttaagagttagggaaaaatctcgaggcggcaacttcaagagtgtttaatagatgcggataaatgcctcgagcggcaacttcaaagataaacaaacacccaagcattaggctcaggattttgaggtaaaaatcccaaggaaacttcaaggataacaaccctcctccaatacgtttgggcttttgtaggagcctatcccgggcggcaacttcaaaggaaaacaccccttcaataggctcgggattttgcgggaacatgtcccggggcggcagcatcaaaggaaaacatacctggagatttctgaatcatgccttatttcgaaagtcatcaattattttctgataatttcattcaaaaatgtgcaaaaatcgtctggatattccttatttagaaagccatcaatcatttttctgactagtgacctaaataatgcgcatattgtgaaatagttaaacaaaactaaaaaagtcacgtgcacatttcgagataatggggaaattgcgaaataaggaaccaatcaatcatttttattgacaggtgggcaaattttatctcatattgcgaaataattggaacaaaaagttgcgtattgcgaaatcaatgggaaataaataaaaacgaatcaatcaat

SEQ ID NO: 25383 - DNA, 907 bp, Heterodera glycines
cggtgtcatctatgttactagatcggggatcgatccccgggcggccgctcgagcgggacctgcagaagctagcttgatggggatcagattgtcgtttcccgccttcagtttaaactatcaagagagggaggagagggttggagaaggaaaggaaaaaaaaaaatgaaggaggagaaagggtgggggcaatgaaggaagggaaaaaagttgaaagaggggatgcatataattaaaaaaatatataattattattttaaaattattagactgtgagtttcttatgggacaaaaaatgatttaagatcttaaagtgaaatttatgtttgagtaaaaaatttataagatcttgagactcacaagaaggtgtttaagattttaatttgaaatctctccatgcttagttataagacattttttttaaaagttggttgtctctttttataagttgtttttttaatttttaaatacattaattatttttttcttatatatttttatttaattattttttcttcaaatattaatgaaaagtaattaaatggatataaagataagaaatggatttaaaataataatataagtaattaatatatttaatgtgattaattaaattaattatttttttaatatacatgaattaattgaaaaaatcttataattagagaccgagaaagacatacttgtctttcttttcttctcacctctctttatattgtaagaattgtgaaaaaaaaaatgaatctaaattatattactttaatgtaactctggtcccagacaaacaaaccggttcatcccgtaacttatcagcatgttagtgacaatggagttcaggatgtttatgactcatttcactacatccttaattttaactaaaactaaataacatttccttaagacagatctt

SEQ ID NO: 25384 - DNA, 2069 bp, Heterodera glycines
cccgctgtagaaagacagtcagacagtgcactatttcccccttttcccttcctctactttttttcaaattcatttttaacgcataactcaaacaaaacgccacacaaattcaaacactggacacacacatacagacactcaactttattatataagataggatgtttttatttttgaccctaaaatcttgttttttggccttgatgttcttattttaaaaataatctaataataataaaaaatatattttgttctattacagtttacacgattataaaaaaacagacacgagcatataataatttgacaaatttaatgcgtcataaatttttctagaagcatccaaaattaacattcttggtatcatttgaaagccctaagtgtcctctatttgcatgcaaaatttcaaaaaatttcgttgttcgctcttctccacgacacacttatttttcaaattgaataataacgagtcaaaaaattaaaatataatttttatttatttaaacattggaaattgtatggaaaaattggaattgaaattttgtgcttttctctcgcactctctttttcttgcatagtatttcgatctttgatcagtgatccgtctactgctatgtgccagctcagcaacacttgacaatttgaagccattcggctgccgtcccgggataactttggccacgacgtacagagaaaatgccattggctgagcttcgcggatgagctggactaatgtgtggcaaaaatgaaggatctgtcattaaaaacaaagataaatttaaaattatttaaatataataataaacaaacaaccagcaatttgttgccgatattccatgttgtgttggagaataccaagcaaactctgatcttgacgatggcatgttaaatttggagcagttggcgtgtaaatgcacgccttcgtctgtccaattggcaccatacagtcgggctcggcggcacaaagcaaagccatgcaaatttaaattattttattttaactttcatagggagaaaaattctatattttaaagggttaaaagggatcggactcgacctttattttttgaaaaaacttgacccaaacatgaaaatatccgaatatcgggcccagtcctatggaaaatacaaaccaaacttaatttcgacactctgtcaagtcgacactttataccgcctgtcgacaacagttggccgatcggttggaatgaaaccgcaaaatctactcaaagtatccattatcataataataccggatattagcccaaaattgatgtaaaatggacgattttttaatgaattacaaaaaagttcgaagttttaattctcaatttattatccttttaccatttcatcatttgccgcgtttgctcggatttgtgcataatcacaaagtttgtttcgaactgtggcgggtcaatttttgtgctttgttcatatattccagtcaatgtgtatgttctgttaggctcaaaattggtgtacattggcaaaaattcgtacattcctggaaaaatgcgaattaaagtgccggggaatttttatgtgtcttgcagatatttttttgagttttttgtaattctgtaatatattcgctttcagaattttctaagattaatgaagaatttttttttttcaaaaccaaatgtcgtatcaattaaaaattttaaaaaaagttaatttttttttgcttcatttgaattataaaatgtttttacccgggtgagtcgaaacgttcatcccatgcaatgcaactaaagaaataaaataataaaattttgattaaatttgctttttattttcacaattaaacgtttattgggtaatcaacatttgcgaaccgaatttacaggatgaattattaaataaaaaaatgaaaaagatagatacagttaaataaaaattttgaagataattaaaatgaaaaaagattatggaagtaattttggtgtaaaatgtgataattttcttgacccaaccccataatatagctattagaaaaaattaattaggtgtgttaatagggtaaaaatttggcgttaaattttcactatatctttacccggtac

SEQ ID NO: 25385 - DNA, 1740 bp, Heterodera glycines
actggaaatgttgctataaaagaaacaaatgtgaattaccggataattattctgacggcgaacaccgaatgatttcacggctttgggtcgacctattaatcgcgtgcaaattcgctttttccctcaatgttttttacccctcatcattgactgtctaccgaaactacggacaccatttccgcgtccatttgttttgtttttgctgtagggacgctccataagcggttcatcgcctttactgtgtgacattgaagcgaagtcttggtacggattgacaaaggcgtgctgcccaagtctttcccatgccgctgctcctcttattgccacgcctttgtattcagcaaaattttgatagttcatctcagtggggcggtggtcaaaaatgagtggggctgttaaataaaacggttaggtagaataacactgcgtttcaatgtaaatttgaattagcgaaatgattaattttatccagagttcccaagtgtccttatttctaagatttgtccttatttggagatgccagatcttagaaattaaaaatgtccttatttctaagattttccttattttggtacgacctccttgttttgtgcttattcttggatttgaaaataaaaatgcaaaaattgaataatttttgaattacatatcattttttttgaagcgaaattttccaaaaagctggtttttgatcccaaaagatgtttttttgttcggcctatgctgattttgaaaattctcagttggcagctctggtttttactagagaccggacaagagggtcggtcggtcggtttcggtataaaacccgaaaaaaaccgaaacccaaaaaaaccgaagaaaaattttcggtataccgtttcggtttttttgaattttttaaatcttttcccaaaaaaaacaataaaccatttttatcaatagaaaaagcgaaagatcacctctgaggtgggggaggggggtgtccggcgctgccgataggcgccgccgggaaattttttgaaaatgagtataatttgttaagagaatttgtccaaaaattgtcaaattttgtgattttcaagccaattattggtaaaaaaaattttggagttttgggaggccggcggttccgataggcgccgccgaaagtttttcggattttaggaatttttaacaaatttaaaaattttcaagagtcctcaattccccgagttagtgtcgtggggtcgggggataaaaagtcggatgtagggggctcggggtcggggagcaaccctattataaacccccaaaataggtgctaaaaatggaaatgagataaatattttaaaaatcaaaaatgtagtcaagtaaataaataaataaattttgaatatgaatttttgataaaattttccatttctcaggggtgtatttttcgtttttattgcatttttgttaataatttttttcaaaatagcagaaaatattttacaaaaaattcttcaaaatgaaaaagagcacaaaaaagcaataaatttattattattaacaggttatatcgctccaatttgattcggtttttttcggtttttcataaaagtcggtcggttgtttcggttttttgattatttcggtcggtcggtttcggtataaaaaccgaaaaaaaccgaaccgaaaaaaaaccgaaaaagtcaaaaatttctcggtcggtttttttcggtcaaaaaccgaaaccgaaaaccgaaaaataccgaaaaaaacccgaaaaaaacccga

SEQ ID NO: 25386 - DNA, 2210 bp, Heterodera glycines
ttatattaattttttcatcagaaaaaattaaaaaaatagttattaattttagtatgtatatttaattcatgtattttttaatataatataaaaagaactttactttatcggaacaaaacaaaaaattcgaataaaaaattttaaatattaagaatttataaaaatggttttatttaaatttttattctttaatgtgtgaaaatgatgttgtaagtcataaaaatatggtatttaaaatgcatgtgttaaagttgcgagtaaccatgatttttgtcgaccaagaattggaaacttcctccggcgggcggttttcggaagaggcgcttaagttttcggtcgactgattttttattgtggtattttaataaatttcctttaatcttttttgtcaacatttttggcctccccacattaagttgagcaaggtataagtagtgacccctgtacttttgtcgccccttttggcgctaaattcaaatttgaattttcgcgtcgatactctgtgggtggagggacgcttgctgggggttgggccatagggtgtaagactttttattattatttaaatattgttatttaaatatatatttttaaatttaaatgttattatttaataaataaatataaatgtgaattttcacaccgatgctctgtggggagctggggagggacgcttgctggggttgtgctgtagagtgtaaggcgtatttaaatgttattttaaatgtaaatagatattttgttttctaaaatttaaataaataaaataaatgcaaatgtgaattttcgcgtggatgtctgcggggagggacgcgagctgggaggagagggctgtaaaatcaattaacgtgtgcgaattgtttatcggtggaaaagtaaaggataagcggaaatggtataatttaggaggtaattaagagcacattggttggtgtttgatcggatagaaagacataggaatggtgtgatgagtgggagtattggaattgattgtggggagggaggtcatttcaaaaattgctcgcacgcctgacagctcgggtcgcatttttgtccaacgtgacggattatttctatcattttttttttctctgtctgatcgcttcccggacgtggacgatgtcctggaaaaggaagacgacgacgacgacgacgaggaacacgaactggcggttccaggccgcgacaactcacaacgcgcttgcacctttcgttcggtgctgatcagtttgtatgctcggcggacgcaatcgcggggcacacgcaacgaggtggaggaggagcacggttggtccgcggccgtcttattagggaaagttttttacatttctagttaaaaaaggggggaggggcaaccgtaagcacaacatcgcacaacggctgaggtgccggggcatcgtcaatcgggacaggcccaatttggagtgccggaggcgcaaattgctgctgctgctgctggtgttgcagatacggttgaaaagcgaactgtagcggaggaagtaccaaaggcattgcgaatggtgggaagacgggcagtggtggcatgcgcatttgcaaagtgctgatcgcctgttggacggcagctgaaagcatcggcggcggttgttggtgctgtgttgccggtacgcaatgtgtcaattgttggtgttgctggtgctgctcctcctcgacatgttgctgctgctcctcctcctcctcgacatgttgctgctcctcctcatcaacaggctgcgccgtcgacgacaacctccacgtccggtgatgggacccgggcgaaaacctggtcctaaatcatattatttttttaaatttttttttttctaattttttttattaatttttttttcttaaagtttttttttagaataattggtaattttttttttttaatttttttaaactgcctcttgattattaattttaaaggcacctttagcgtgattggtctaaggtagcaaattaattagttttttaatggattcgagaatgaatgttttttattttatttttttaatttttttaataatttattaaaaaattaaaaattattttttggctgttgacatgtcatgactcatcattaccaagggcaacctttcttccctcaatcaacccaaacaaagcaaaatcctctgcgtgcacgtccacagaggcgatgacgctaaaatgaattgtctattacttgttcatttatcgccaatttccccaca

SEQ ID NO: 25387 - DNA, 1391 bp, Heterodera glycines
agtaccagtttctttttcttctttatcagttaattcttcttttctgttttgttcatcatttggttcgtcttcatcatcatcattctcatcatcattttcatgttgatcccctgaattatttttcttatttctttttaaattttgaatagctttctttacctctaagttaagcgattttaattcatcgataacactatccgcttcttctaaaatttttaaatagtcatgtttttctgtgtaaattttatatatttttatctcagcatttttatcttcagtatttaatttgtttcgtatctttttccattttttatccaattctgttaaactatcaaacgttttttcaaaattaaatatttcttttttaataaattcatataattttaaacaaccaggtaaatcattggaatcaaattcatatttcccttgttctatttgttcataatatttttcaattttatttttcaaacttttaaccaaaataggaattcgggttctaatagttccggacattttcgtaagtttttaaattatatactctttgtggactaatgaattaatagggtgtaatactatacttctttcagatcttctccacttttttaataaactttttctttctcttgataaaacttttagaatgaatttgacaaattttagtcgtttttcagggttagagttgagtgtttctcttacttttaagtaagcttctaaaattacttcctgtgatattctttccaaagaatcggctttatctaggttatttaaaatgcagtatggaaaaatagttattgtcaaagtgaatttatatacggttttgttttggtatgggaagggttcagtttttaaaatttggttcgttactttggaaattcctgggtaaatatgcactattggaaagggaaagtttgcccttctttcaagctcggtaacaatttcttcgggtgttaaaaccggaatttctacaataggtacaaattcttcaacttcttcaataatttcttccaattgatcaaaattttcaaaattttcttcttccttttccagttcagaaattagtttctttggccgacacagtttgacgtttatttggaatttttttttttttattaacaatacgatcacagtatcaacaatagtgatcaaaaatcttggtatctgatcgccttcaaataatgtcaaaaaaaatcaatcttttttctccaaattgttcgcactagtggacggttcgtcttctagcgggattttaaatgtctttcggaggaattcagctgttttttgttgtccaatcaaaaaacggtggtgatgtgtaaggttgtcctgcagtttattcacaatgattaatgctttgtcctttccagcgcgactgttgtatgaaggactgttgatgg

SEQ ID NO: 25388 - DNA, 1268 bp, Heterodera glycines
aaggaatttatcattaaaattatatatttggtcgaaacggatccatcgggggcaaaaagggaatgagtgaaataagcgggggggggggggaaggcacgaaaggagcatttctttctcctcaaatttcattcctccgctgaaatttatgaggaaattaatgcttaagcttgcgaagacgggcttttatttattactcagcaaaaaacgaatagaaaataatgcggaaaagccaatttaatttaaaataggtaatgtttaaaatggaaaataatgagttttacacaatattagtctaatcattagtcaattccaaaatgcaacactttcctttcgcaaatgccttcttcttttcctccctctgatcacttcactctcactgatcatcgccgccgtcgaattttgacaattggacgcgcaactttttcgtttggaacactctaaacattaaatatttcagatggaaatcccggctctattgcactttaggcgtccaatcagtgactgaccattttcagtttttacattcaataatcaagattccttttcataacgaccaatttgccttgttgctcaatccctaccccaaacggactgatcactcactgtttgtcccaaactctgatcagttcccagagatgttcgcgttctctcacagcgatcagaatgtacgagcatagcagcacgttcggattcccactcgggtcattgtaattcgtccatttttctttctgatcagtgcgatgttcgatctttgaggacataatcgacaggccgggcacctaaaggaaacaaataaatttttaatttaaaacgttaaaaaaattgagaatgaaaatgtgtaaatttggcttttgggtcccgcgagaaaaaaaagtaccaaaaattgtttactttctgaatgcattccgccaaaaactccacgcgcagcaaatccaaattcaaaacgggcggcagattccaaacgagcacaatgtttttgggatttatttggtggaagtctaattcttggcttaattcttcaaacgataggctcagtgccgaatcgtcaaaagtgccatcttcaggaaaaatggccgacaaattgtttcgttcgaaattcattgatggatttgcaattacttttgctaaattgctaatttcaatcattaaaaaagacacttttgatctttgtgttcgttgaggtggaaagagagaacaaatgcggcaaaagataaaaaaggcacttaataatcccccgggggaacgaaagagggcgatgaattcccagc

SEQ ID NO: 25389 - DNA, 1146 bp, Heterodera glycines
aaaagcttctcacccaattttagcgcatcccaacccttctacaatcgcctttatacatcccattatgaacgctaaaattatcagagtgccgaaaatcgcatttgatctaagcctagaaaaaatggtctaagtaaaaatcgtattacgctcaaaaagcttctcaaacaatttagcgcttccaattccttctacaatcgcctttatacatcccattatgagcgctaaaattatcagagtgccgaaaatcgcatgtgatctaagcctagaaaaaaatggtctaagtaaaaatcgtaattacgctcaaaaagcttctcaaacaattttagcgcttccaattccttctacaatcgcctttatacatcccattatgagcgctaaaattatcagagtgccgaaaatcgcatgtgatctaagcctagaaaaaatggtctaagtaaaaatcgtaattacgctcaaaaagcttctcaaacaattttagcgcttccaattccttctacaatcgcctttatacatcccattatgagcgctaaaattatcagagtgccgaaaatcgcatgtgatctaagcctagaaaaaatggtctaagtaaaaatcgtaattacgctcaaaaagcttctcaaacaattttagcgcttccaattccttctacaatcgcctttatacatcccattatgagcgctaaaattatcagagtgccgaaaatcgcatgtgatctaagcctagaaaaaatggtctaagtaaaaatcgtaattacgctcaaaaagcttctcaaacaattttagcgcttccaattccttctacaatcgcctttatacatcccattatgagcgctaaaattatcagagtgccgaaaatcgcatgtgatctaagcctagaaaaaaatggtctaagtaaaaatcgtaattacgctcaaaaagcttctcaaacaattttagcgcttccaattccttctacaatcgcctttatacagcccattatgagcgctaaaattatcagagtgccgaaaatcgcatgtgatctaagcctagcaaaaaatggtgtaagtaaaaatcgtaattacgctcaaaaagcttctcaaacaattttaacgcttccaattccttctacaatcgcctttatacatcccattatgagcgctaaaattat

SEQ ID NO: 25390 - DNA, 1824 bp, Heterodera glycines
ttaagcctccccctgtcatttccaatgtttatcgtcagactaaaaagtcttctttgctctcatgccctcccccttttcctttcattttcaccgcaaaaggaaatcccttcaaaattagaaatatttaactgacaattgagaatgtttgtactctacgctgaattaatcactttctgatgaggaccagtgatgtgttgggcacttttatgcaaaaaaaaaaatttgtgagggaaataaggcaaatgatgagagcgggaggagagagggcggagaaagagagagacggaaaggagggagagagagagacggaaaggagggagagagagaaagagagaaagacggaaaaaggagggataaagagaaagagagagagacggaaaggagggagagagagatggaaaggagggagggcggagaaagagagagacggaaaggagggagagagagagacggaaaggagggagagagagagagagagacggaaaggagggagagagagaaagagagagagacggaaaaacgagggataaagagagagagacggaaaggagggagagagaaagagagactgtggtgatgcgatggatgggcggggatgtccatcctttgccttccctttcatccaccgtccgtcctcttcgttatcctcctcttttcatcactgctggcctatttacccacgcctcatgcatccatcccatcttccccatccagcaaatagtacgactgaattgctaggcaaacaatggaagtgaggaaggaatttgaggaggaattgaggggaagacgaaggcgggggggggggggaagggacggccgattaagaagaaggcattggatttttatttccccatcgcctgcaacacatcaaaacaacaaacatcgccaaaaaataaaaaggaaaaaaggagggctcggaaagtgggaaaaagacggatgaactggcggatgagaagggatggcataattggggggggggaggaaaaacaaacggacggaaatagaaaatgaagaaaattgggaagaaaaaaagggatgaagaaccaattcaaaaagaaaagtgacaaaaaggcctagattaagacataatgccaaaagcaaagaaaagtgagcactatgggtcaactccactgtgcagagaaaagcctagtactatctcgtcgtttctctttttctttgtaatttctctcgctttggcgtactgtctctttattttaatggtgtaaaaaacaacactcacttcatcctgtttaactttttttctgtttgttaaatccacaccaaattttgcatatcgattgagaaaaaaaattctgcatcgaatgttctataaagttttaatgaatttctatcctattttaaagttaagggatgatgaaaattttgcatttcttttcctctaattttggcgtactattttcatgtctctaacacatgaaaaaacatcaaattcgaaaattctaataattttggtttataggctacaaaatcactttgaacatttagaatcaatagaaaaaagaataaatttagcattttggttaaaatcagcagtcaatgagctgagttttaacgtgataaaaatttgaaactctcgtaacttttttatgagatgtcaaattacttaacattcgtttagaaaaagtttctccttttcaaaatctttttttagataccaaatttgttcggtttcgttaggaatgaagcgagttatggctgatcaaaataaaaaatacaaaaaaggcatttaccagtgtaaattttgaaataacgcgcaaaaatttacgccaaatgcgctatttggcgttatgagcaattttgtct

SEQ ID NO: 25391 - DNA, 1114 bp, Heterodera glycines
  unsure (1)..(1114): unsure at all n locations
tgcccattttcctttgatctttttatagtgagggaattacctgttcgaatttccatccgtcggacattgccgaaataacattggtcagttcgtcttcgtggcattggagcacgcggtagacatgctttgtctgcaattcgattttcagtttttcgtttgtgccaaaaaacgaacccccatctttttttgtttttctctttccgaaattcgctcgttgcataaacttatcagcttcggaagattgtaaaattcggcttcctcgcgaagtcctaaatgcattaataagacaattgatcctattcaaataattttcgaacgcacaaagcaattctaagccgtaaataaaaaacatttctggtccaattcaggcaagggattcaaagaggccaaaaattgtaaattgtatgaatgtatgccacattttaatcagcgacccgaaaacacccggaagaatgtcccaggaaatgccaaaaacaaaaccttcttcagagagtccatgatcaaggattaatttgccatggcgcatgtaattgagaactgcggaaaaataatcggagtcgcggtcgatcaaataggaactggactcatcctggagaagaaaaggcattaaaacgaagtgaagaccccgtttttgtacaatattctgctgatattcaaatgacacatttcgaaaaattcaaaatttgggttttccaattatacaataagcagtttgtttggaccaacaaaaaagctaacccacagaaatacgctaatttgaaaataggtatctaaaaatcataggtaaaagaggaccctaaccggagaaagtgggagaaactccctgccttttgtgactacgaccttttcgctgggcaacgaatggtcctcctgggaaagtcgggcgaggaaagagccactttcacgacacaaagtctgtctggtggtcagaaacacctgaagccggccaacagaatgggcattaaatgaattgcagtttggccggtggatgaacctttccccccacgttcagtttgatccacgcgttcgttccctcgcccaatgggcttcctccncttcgttcntgaactctagcctggaggtgtgagttccgctcggtgtcctattcctgtcg

SEQ ID NO: 25392 - DNA, 1009 bp, Heterodera glycines
aaaattaaatttttaaataaagatttttttagtttaaattttttaataaatttttaattaaattaaatattatttttaaatttattaacaaattttatttaaattgaattgaaaaattataattttataaaatttatataattaaatattagtagctctaatttattataaattatttttaaatttaattaataaaatttttaattatttgaaagacaatttcaaatcataatcataatttccattaaattttaaaaatatttattttaaatttattctgaaataattttaggtatattaaaaatctttaggaaaaactgaagaaaagtgtttcagtagaccgtaaaatggaccaattcgcatttttatgttggcacatgtcaaaaaaattggattattcggaaacggaaaaattctttggccctattaacgcaccaatgactaaacacataaataggaaaactaaaaaataatgttaatatttaaattaataattattctataataattggatttttttcaatgatttaaattcattcaaatattattaattaataaatgattaaaattaatattaaaaaagaaataaaaaatattgcaatttattagtgggatgaggattttataaagatgggatgattcaaaaacagctgaaaattagtaaaataaataataaaaccatttaaaaatgtaaaacatgggtaaaagaggtatttttaaaattgttttttttcgagaaaatttttaatctttgaattctgaaaattggaaatatattttttcatctatggatataaatggaaattttagtggtaacaaaatttaattgctattttaggaaaaaaaactttatatgaaagctctcatcctgaactttggcattggcgttatgccccccgatggcacatgtgctgcggcttcaaaacaatggcacatttttatgcccacggcagttttctcggaatggcattggcacgccattgaaaagccttctaagggtggcacgcaa

SEQ ID NO: 25393 - DNA, 911 bp, Heterodera glycines
ttgtgcgcaagacgggaatcatttgcacgataggtaaccccttaaaatggattaatcgcttcgctaaggctttctctttaattgtttccctgttcagggcccgtttgtcgttctgtggaaatgcttgtccaaatgatcgaaaatgggatggacgtcgcccggatgaacttcagtcacggggaccacgaagtgagttttatcactaaattttgagaatttgaactttttattttaaagagtcgtgaaaatagttttcctggagtctttagcgtcgctgaacataaatatggcatttatttttgcccatttcgaatcccaaattcgagcaaaaagtcgaaaattattatttttttttaaatttcgacttcttgttcgagtccgggattcagaataggccaaaaattaatttctatgaaattgcagtatcacggcggtacaatcaaaaatgtgcgtgaagcagctgccaaatgcaccaagaaacgcaacgtggcgattgcactggacacaaaagggcccgagattaggacgggacttttggcaggggtaataatttttgtttgtatttccgcaaaaatgtcatacattttaaaatgttcgctatttttcttggcgtattacctttctttcaatcgctttatcaatccgatgtgccaaattccagggcggttcggctgaaattctgctggagaaggacgcgtccattcgcctgaccaccgactcggcatttgagaagtcgggcaccgccatcaacctctacgtcgactacaagaacataacgaaggttgtgaccaaaggatcgcgtgtgtacatcgatgacggattgctgtcgcttattgtggaagaattttgtgggtttatttttaagtccctacggcgacgtttttaggggcacccaatggggggggaggggg

SEQ ID NO: 25394 - DNA, 2160 bp, Heterodera glycines
tgtcatcattagaaattggcattttcctttggcgttccgttggtccctccaacttttttagttcccccaaaatttgtttcaatccgttggcaatgtctctttcggtgtccaacaacaaattggccaacatttcttccattgtcccattgccaaacccatagcgaagacgaacgcgctccagggcaccactaatgccacctgaaattggccaaatttgtttaaaatatgcattttaacattaatttaaattttgtttaaaaccgaattacccggcaaatcttcgactcgaaccgcgcgtccgccccggtcgcgcagcactccatcaaacatcttcctgctgctcccctgctgctgatcgtctgcttgtctcgtcccgaattcgtccgaattgccccgagggcgatcattgatccgctggctttgatcactccatcttctcccataacttcccgcattctcttcttcattttgctgatcaaactcagataattttggtgccttcgctgattcctggaattgatgcccgtcattttgtgcgtctgctgctggcagtgatttgtccagctgatccggaatggcaccactgttaattgtttgctgatcagataaaggctggtcaatgccgtcgttgtcatcttcccttatgctcggccttcgttgatcaccaaacactggttgatcactgccgatcacttccggcatttgttgttgataggtatcctcttttccctgatcaccagcttcttctcccgcttccttcatttttggcagtttttgagtcccctgctgtgcttcttcgatttgattctgttcctcttcgccatcaaataacacatctccaatttctttcaaaactgctctgatcacttccgcaaatgcctttgttccgtccttctctccttttaacagttgtttctcaaccagttcatctaccatcccttctggtacgtctccaaatggttcttccctttctttctgttcttcttccaccaatattccgtccaaaatttcttcttcccctcttaattttacttcttcctcttcaacttggtcggctttctctccgatttgtccagtaaataattcttcaaccacgaattttgcttcctcttctatccctttttcttccgctttcttctcatccggtggcttctcttccccagggcgctcccgaaaatcctgtcccgtaattgccgctttctgctgacccggcaacggtgcctggccctgatcagccaatgactgatcacttttctgatcactgatcatttcttggccgttttccgttattctccggccctgtttctgatcagcaatcttttcggctgatcgctttcttctccgtcttcgtcccgtcccataatttgccaccgcctctttggcaattcgcaaatttttcagcaattggagaatccgttgcgaaagttcgctgtttcccgcttttgtcctcatgtcagatgtccgctgttgtccccccgggccgtctttcttctgtccgtccgatttcttttgctcatccgtcggcaattgtttggatgaaaatggccgatcacccgacaaatttctgagtgatcgcccatccgttgtcggcagaatgttttccttatcagcagaatttgggagagatttgttgcttgcggaagtctgaactggtagaattttggtccaaaggattcgtccgttcggcatttttttgccgcttgatgcttcttcgttccgattgcttctcgtccaatcgcttatccgatcgctcggctgctttatcgcccccattttcttatcagcgatcacttccctttcattattttgatcattcgattgctttttctccccttttgctttttctttcagtgtgcttttcctcaataatgaagtatcaccttcaattctgttgttagtctgtccttttgcagcggtgaattgtccgacatgaagctgttcactgttgatcctttggtccgttgttttgttgctaacttcgaccatcatgctgtcgatctgtctctcattttctcgtattctttggttgtctatctgtctctcattctctcgtgttctttcgttgtctctctgtctcccattttctctgattctttcgctgtctgtctgtctctcattttctggtaatctctcgttgtttttcagtcttgctcccattct

SEQ ID NO: 25395 - DNA, 1102 bp, Heterodera glycines
  unsure (1)..(1102): unsure at all n locations
gctcttaaatttttttgttcactcatttaataacaaatcataatattttttcttatgcagtataatcaaatattcttaattgccttcttttattttttcaaattgttttttatttagtagttgactttaattatttaaaattccttttttataattttttcattaaatggtttttaatgatttatctcactaaaaaaatttgtttaatcaaatcaattttcatgtatgatttataacatattcttatagccgctattttaaaataatgatttttttaaattttcataatgattttttaacatatgtaaatttaaaaattaaattattattaacaatttctaattatataaaaaacacatataaatttatttttctaaattccttttaaacaaatttatttattattcctaattaataaatattaatcaaattgttttaaagtaaaacttctcttatagttcatgaatttaattttcgggtttaaataaaatcaattttatttcttttgatatgaccagaacgctaattttttggtaattactagagcacggacgggaccgggatcctgccgggactctcggtcccggtcccgttttcttaacaaaccaacgggaccgggagtaccgttaaaaacgtgagtcccggtctcgggatcccgtcccggtcaattttccaagccctggtcccggtaatttcaaaattccgtgctcttttatttttaaaatatttaatagttatatttatcattaatttccattattttcttgtttaaaatatgtaaataaaagtttttcaatatttaaaagaattaaaatttaatttagttgtaaataatcaaattttatctatgtaaaattattcgctataatccaatattaaatatttttatttgttaaacctttgagagttttattgtattaatatttttaataaaagttttgcttatttgaaaattttttattcgtaattgttttatgcaaaaaataaatgaatgactttttggccaaattttactaattttanagaattttccctacatagcgatgcgcgaaaaatattttgcagattatttttctcagaaaggatagaattttaaaatctg

SEQ ID NO: 25396 - DNA, 1643 bp, Heterodera glycines
gatcatgctcaaaagccattaaggggagaagtgatcggggaatacgctaaattggacggagggtaattaatgggggggggggggatgagcgatcgaacaataaaaataaatggatttgggacagataaacgaagggaaccatggcacagagacggatggattccggagggaggggggaagggcagcccttgccaaaaaatgccgaaaatattaggcccctctatgccagagggttcttcccgttttgacaattcccatttttgatggggagggaggcagctaaatgatcattttaatggccaatgccagtttaataatttttggccaataaaatcaaactgagatgccctcccacttttgcgctgcttttattttgccatgccaatggaatttccgtctccgtccgttcgccgcttctcattcctaccaattaacaacatttaatctccactcatatgcgcatatgtgtccttttatgacttgtttttccatttaaaatgtgccaaataaaattaagaaaaagtgccgtgtcacgcgacacacaaaaataatgcgatttgaaagagccttttaaggaaactcagtttcgtttccgatttttggtgtgccttttctcaaatggattaaaaaacacgtaaattcgttcttttgataaatgccacagaaataaaagtgccaagatccttaatgaacaaacatcgtcaaaataatccgaccgaatttaaccgaaaaatggcataaattggccgacttattaggcacaatttccagacagttgttattttgccgagaaattttgtcataaaggcgaagaatttgctctgttgtgtttgttggcccgaaaatttcttgccctcccccaaaaagtcgtcggggaaaggaaaggtgttttaatggggggaaggaaatgcccgcgggggcggcgacaattattttctgctccgttgactttggcacattttttggccacatccaagcaataaatgctttttttgaagaaaatcggtcatggatttgcatttgcctttgcgagaataaccaaggatttcgaagaatgtttgggacggcggaaaaattaagaattaattaattagtctttaattaggccatcctttgttcccccccccccctctcttttggcccatttaatccgtcggccttttgtccgtcggataaaaaggcacaaaaacggcttcttccttcagaccaatcttctaaatgattatgcaatgtgtgcattaattgtattccaaatccccggtttgtatgtgtgtgggtggtgggaggaaatcccgcgtctttcctttccttttcctttccgtttgtttccctcggcgcaattcgtccggcaaataatcgttttgttttctccccgcccccgggggatgtaaattacaaaaaaaataaataataattgtgttttccgtgccattgccttcccggcgaagacagaaaattgtgaagtgattttgcaaaaaatgcacaaaattgggggggggggggaagaaagagtttggaagtgccatttctgctgatcaaatcggtggagaaagttcaaaaagaaaacaaaaattaaattaattcaactaaatttcacgagattcgaatagagttgagcgggaccgggacctgaacacggacaa

SEQ ID NO: 25397 - DNA, 940 bp, Heterodera glycines
tggcacttctttcattgcttactttttcaaaattaccaataacataaacatatttgcaaatttcaattgcttaattttgtacaacatttttttgatcacttcacaatctttcccttgtgtaaagagaaatttgagttttaaaaaaatatatttaatttaaaaaaaaaatagataaaaactacaggggaagacacaccgaagagaaggtttcggtcaaaagccaaaaataagagaatttgaaaattttcaagtaaatttaaaaaaaaacgtcaataacgcggatttcagatggcttttcaaaaaatttcggatcgaaaaaaattgtttcggataacccggaataaattctgacggcacaccctctgcggcactcactcaatatgttcgtctgatggatagggaagcatcgaaaatatggattttccatgacaaatcttttcagataaagaagctactgcctaattatgccgaaaattaacgcctgtcatattttattataaaaaaaaagtttggcatttattttttaaaggtaactgcaaatattattgagaaaattggtgttgtgcatttgtgcgcacgtgaaatgcttgtaaaatgttggcaattttattcttattgatccattaataataaataaattggcatttaaacaaaaaattatatattaaaatttaaaagcataactatttttatttcttattttataaaatgtgccaaatcactttcatccaactgtcccttcttctagtcgttatggtcgaaattgttaatgttgcgaatggaatgtacaagcaagatgaaaagttgaaagaaccgttacctccaaatgagcacaatgatcagctgtgccaatttgaagtgatcgaagatggcacaacggaagaaaaagacatggaaaaagcaataaaaattagcaaaagaatctattggcatcttatga

SEQ ID NO: 25398 - DNA, 1597 bp, Heterodera glycines
gcggcgacgtttcggggtgtacccggggaattctcccccccccccctatatacgccctcggaaaaacccattccaacaaacacagacaataagcagcacttaaaaactgttcaaattaccatcaaaaatatagtagcacttctcgttgaatgcactgacattgaccactgaaatatattatttttaggatatgaaaattaaaaaaaaaagaaattccggcaaaacactttattaccatgcttaatgaaccccttgagaaggacggcggaggcgaatgcccttgcgcactttctgtccttgaagccctgcacattggacatcagccagtccaacatgtcatcgcctgaaccaatttaaaaaattggaacccacataaatgatggggacagctcgttccgcacctctccgtatcggtgactttcattttcccccccccccccccgcatcgtatcccccttagaaatttttttcataggaaaattctaagaaaaaaaaaattttcgagaaattttcagcgattttttggaaatttttttgaaaaatcttagtaattcaccataaaaatttctcgaaaaattttttttcttagaattttcttatgaaaaaactttctaagatttttttcttgaaaaatttctaagttagcaatttttaaaaaaaaaattttctcggggggaaacgattcgggggggaaacggcgggggggaaacgatgcggggggggaatcggcgggggggaaacgaggtgccctcggaattggcggtagggaattgaccccaacccctaataaaacctcaatttaggggtgtaaaatacaaaacgtattcaaaaaagtaaaaattaagccaattcagtattgagcatgtttttcgtccgtttcagaccatatagaggtcaggaaaacaaatagaacgtatatcccttctcttattcttacttttctgcaagaaaattcaaaatctggcgaaaagttattaaaaaaggcagaatttcgaaatattctcattagtgcaccacagaaagaaaaaagaaatagtttgaagtgaatgaaagggacaaagaagaaagtgatgtgccgcggagatttacttcgctgcattttttttctctgtctgctgaaggcgacacgccattttgcgatgactcatcctttcctttttccctgccgccgctccatgcgaccctcgcatttcctcccctccccctcgcccatctgctgactctgactgatcgacggtttctcttatgttctctctgctattagtcacttttccatgtcttccttccgatttcgaaattacttttgagtaaactattttccctcattaagatttagtatgtttttttattatgcccataataatagttttttcgtgtttttttggcagtttcttaagttgttaaaattaaaaacataaaataattattttttatttttaccacaggaaaggaaagttgtcagatgaccatgtcaaatcacaacagaatgatgaattttaacaacgtaaatattagaaaatacgacaataaaaatgagagaaatggtgctgggtttggagcaaattctgacactgcggcgtttgaggtttaatctctt

SEQ ID NO: 25399 - DNA, 1775 bp, Heterodera glycines
tctgtaaatatattaggctaaaatcacaaaatgtagtcattttcttaataaaatctgttaacaaatcagaagtaattttcaaaaatttttcccggcggcgcctatcggcaccgccggaccctcctctatgtttcaaaaagtttttgaaaaaagcgcgccgtaaaaaacgtgtaaatagtcactccttttcccaaaaatgttcgaaaataatgccaaaatggcataaaagattttgataaaatcattgaataatttttcaagcaaaatattcaaataaccgaaaacattttttaaatcaccttttaatggtaagaattaaagaatttacctattaaaatatttgaaaattttttttattatattttatattttttgaaaaatttccgatttccgaaaattttttgacccccggaattccgatttccgaaaattttggggcctcggaatgccatccctgttccacaccattgccggtaatactaccgatggaccggttgtggatttcggaatgactctgaccatccaaggataatatttggaaattcggattggaccatgggtgggaagtgtgagaagactttgtttatcatattacaataataagccagaaacactcagaaagatggcaagactaagtatttcatggatttgttgcataattaaatttgtaaaaattgaagtttcgaacttccgagtccgggtccagggttcgaaatgggtgaactggatttcagagtcgggttctccgaccctgcaaacccataaaccactatttctaaaactgccatttgttagttttattctttcttgtcattttcctatgaatcattgtttgtttctttgactcccgttcgaatcttcattatataatgcaattcattttttagcttcacacactgaatttatttttccatataaaaatacaatgactggtgagcaggaggaaacccagcaggtcactttatttatcattttatcaatttaagggctaatgggcaaattttgccgattataatagctgtttaatgggttttcttggtgtcgtctttttgggcatggtctctatatagaaagggtgtgtaagacgtggtgattggttttttttcgaaatttttagtttttcaaacattcaaatccgctcatccaatttacaatttgtggagattgtcactgtcatcacattgccccggcgtttgagtggggtgggaaggttaacgtgggcaaaacatacaccgtaaaagctccgtgggaaggcgcgtccctacatttgccgtataaaacagcggcattcacatctctgactcactctaacccaaaccaaagtccatcccacccctgattttgctctaatggcccataaattgctccccactgaacttctttttgaaatggtactttttacaaacccaaataatgattttacgaatatttgtacctcctcttgggttgtccgtttctttatgcttccccgcgtcgtcaaatggagaaaagcttattttgtggtgggaaataaagaactaactgattttactccttttaaggcgttcgataaactgagccgctgcaccgaagcgttcgaaaagtcaagggtaataaaaatgtgtagttcgattcgaggttgattaagaatgcataaaattcaaaacatacacaattttcgaaattttggcactttttgcatttgagaaggggacctttaattaatatttctttattagcctatggttcaggtggttgcgtttgatcaatggcacagcggcaacgaattggtcgaa

SEQ ID NO: 25400 - DNA, 1848 bp, Heterodera glycines
  unsure (1)..(1848): unsure at all n locations
agttatgaattttccatattagcccaaatttccaagggccaaaaaattgccaaaaaataaagaatttttaaaaaattccaaaaattttgaaacgaaaaataaacatcatattcgtgctcagcacctcaaaatagcccagaaaaatatttttcacaccctttttcgatcccaaaaaaatttttgaaaatttctagggggcctagctcgaaaatttttgaaaattttacatcatgtagtacaccattcgatagcatttaaaatgctctacaaaaatgttctaagacaatatttcgctaaaatcaacccctgacgagttatgggcccaggactcaaatgtcccgctgaggccaaaaattttttctatttccgggaaaaaatcgaaatttttccaaaaaaattaccaatcgatagagctcgaaaaactatgttttggaagtggtcttggtttttctgggaaaattcgttaaaaaatcctaaaattcaaaaacccgaaaaccgttttttaggcctagctcgaaaaattttgaaaattttcgaaattttaaactttggaaaaatcgggcttttaaagctctacaataagtctgctggccaccctgcgctcaggtcaaagcctaatgagttattcaacggggactgaactggacaaagttggtactgaaaagttctagaagcacccagcccagggggttagagatagcggcctggaattttttttaacttttagccaacacttcaacttaaaatcctaccagcggaaactttttggtcagggttttagaaaaaaagttaggggccctcaaatgcacgaaaaaatgataaatcagccgctgggactcagttggccgcgctgaatttttctctatagttttcccagatgcgcctcaaaaagttgtaagacccttccactactttcagggcgctcccggccttcggccgggagaaaatggttttagcaacgaaactccttgtcaatataacgtatatactagcgggtgtgtgcatgcgagggtggcgcttgggaaagcgctgcgcgcttcttgagcttcgctacctaggcgcgttttagtctgttagggtctttgcgtcagccgacatgcacttggtttcctccaataattggagttgacacatcgcataatgcaatggaaaccggaagtgccctaacgttggttgcacatcatggccctcctccctcccttagtccaggcgttggcacgttattgggttgagcgctaaatggcaattcacctgtaggccctaaagagggctgacaggtccatgtcccggatccaagcttctcaccattttcgcacccaacatagtgcagatgggaatgggattggcatctctccaaaaaccatgtgcccaactgctctggactaagccatttattgtaacttgagcatattagtagctacaatattcagcactttggctcggccttgggcatcaatttcccggttgggagcatgaacacggacattgtttccgtctgttgcccgagagaaggccgtttacaattgaccgtgggaaaatacttccctttccagatcaatgccgacagtgcggattgtttggccctgacctttttgaatggtcatagcgaatgcaggctttattgggaactgcaaacgctcatattttatgccgccaggcgatttgtcttcatagacatttcgtgttctttcaagaaagaatctcacttggccgccaatagcattgctattgataacacgaccaatgaggcgatcatcgcccagttcttccagaactatgcgtgtgccattgatcagtccttcctatcacttttattngatagaaggacgacgacgcatccgactttaa

SEQ ID NO: 25401 - DNA, 2161 bp, Heterodera glycines
tttataaatattataaaaatcattttaaattttatgccattttatagaagttaaaaaatagataattggaccacaaaattttccatacaaaaactaatgaagaaatctaaataaaggggattattccgtgaaaatggtttaattgctaataaaattgttagtagattaattacatttctatttggaaaacatatatatatatatatatttttttatgatattttccatttatataacttcttggcttccacctttaacttaagtatcaaaataaaatgattcaaattctaaataaattaaaaaagatacttttctaaaaaattaggcttttaactatttattttagggttttagtaatttttcaataaattttgaaagaataattttaaataatgtttatataaaatgttttatgtatataatattcaaagaactgttgaaaatggacaattatcacacagttattaaggattttaacattaattattttttcctgcaaaattttaacaaataaaatacataattcattcttggaagtatgttttcctaaggatgtcatttggcttatgatttcaaacaaagataataataaaattaatttttttgtcgattaaaaggcaaaaatattagtaacacaaaaccttggattaataaagctgataattcaacaaccctaaaaatattaatgattaaaatttctgtttttaatttaaaaatataaaacttaatattttattacgaataaatttttccgaaaaagccattattaagaaatgaaaatttatgataaaaattaacaaaaaatcatatctctttattttaattaattgaaaattgtagtttctatttcacaaaaaaatcaaaaaatatatataagcataccataatcttcattgttataaacaatattatttaataaaaggttccctgataataataaaaattttaatggcataacagcttgaattttaatcattgcctttatggattacgaacatttaaactagtttcggatcagagtgaattaaggcaaaataaataaataaagcaaaaggatggttacattataagaaatgaatgaaacattattattcaaaattgtggatgcaacacatagtatttattcgtgatcaaaaaataaataattaaaattcgatataacaaaaataacagaacttgaaaaaaattaattaataaaacaagattatttaacatatttataatgaagctcggctttgctgatgaattagatggaagataacaaatgtaaaaagaaaaaataaataatttatatctagcatttattaaggatcaaaaaataaaatataaaaaacaataattaatgcaaaacgaatgaaagcatcttgctttagagaaaatgttaacaatgctaagacaatctctaattaaagatataaaatcaaacaataaaaaagactaacattttgaaaaacaacaattaaaaggtcaaacaaattaacaattgtaagaatttttagaaaaatttattccaacaataatatgaaaattctaagtagaggttgatctttttgcatatgaatagctaaaatgaataaaaatttcttataagtagggaacagattttgagtgaaaatttttctcaaaattgatcgccaaactctaatttttttttagctaaaaattctagatttcaaaattgtcctattcgaaaaaattataaatattttatttaatgataatttaaatgatcaaaaataagtttttttgataagttttacgtggtttgctccctaaaaatccttaataatttttttaaatgtacaaatattgttattttttgctgcctttttccaatttttacaataaataaataaataaataagtttcttatgaagaaattgtaaatttcgtatgatttaacatataattaagtaaaatttttgggccggtcacagtaaaattggttgttcttgttgggccttcctgtggcacatttaaaagggtgctaagacgttcatggtgctgcaaacactggctgtttgtgcaagaccaaaacgatgatttgatttgaaattggaaaatttattaagccaattaatattttgctcaaatgctaataaaaactgcctgactgtataataatcaaattagaaaagtctacagaaactgttaatctaaa

SEQ ID NO: 25402 - DNA, 1105 bp, Heterodera glycines
cggttcagaattcaataaaaataacattcacggtgcgaaaaatggggtttgacaagtttattaggggaaaaaaagactttacaaaataatacccctgggagaagggagtgggaaacatgatttcaaaattttcaattttttctagtctaatctactcaaaccggttcagaattcaataaaaataacattcacggtgcgaaaaatggggtttgaaaagtttattttgaaaaaaagactttacaaaataatacccctgggagaagggagtgggaaacatgatttcaaaattttcaattttttctagtctaatctactcaaaacggttcagaattcgataaaaataacattcacggtgcgaaaaatggggtttgaaaagtttattggggaaaaaaagactttacaaaataatacccctgggagaagggagtgggaaacatgatttcaaaattttcaattttttctagtctaatctactcaaaacggttcagaattcgataaaaataacattcacggtgcgaaaaatggggtttgaaaagtttattggggaaaaaaagactttacaaaataatacccctgggagaagggagtgggaaacatgatttcaaaattttcaattttttctagtctaatctactcaaaacggttcagaattcaataaaaataacattcacggtgcgaaaaatggggtttgaaaagtttattggggaaaaaaagactttacaaaataatacccctgggagaagggagtgggaaacatgatttcaaaattttcaattttttctagtctaatctactcaaaacggttcagaattcaataaaaataacattcacggtgcgaaaaatggggtttgacaagtttattggggaaaaaagactttacaaaataatacccctgggagaagggagtgggaaacatgatttcaaatttttcaattttttctagtctaatctactcaaaccggttcagaattcaataaaaataacattcacggtgcaaaaaagggggtttgaaaagtttatttttgaaaaaaagaactatacaaaaataataccccctgggaaaaagggagtggggaaacatgatttcaaaatttttcaatttttt

SEQ ID NO: 25403 - DNA, 977 bp, Heterodera glycines
ggaaaaccatccttcgatgtcgactgtgacgccgcgtttagagccattttttcatttttatttaatctgtatggcaacattttacaggcgctaccatcagtccggtgatcggtggctttggtcggcgtcgtaaataatttgttggtgtcgtcgacagaaaatcgggcgtaatctttgatcatcaattgttgattatctttattcaataaatacctatatttaatgcccaaaagagagataaaagccatttaaactcttgagaaactgtgtcatgtcagaagacatcattttgttttgtttttttgttgaatagaaccgcggactgggacactatagatagtctgagccaagtttagagcatcctaacttttttctttactgaccaaatccaacaaagttgatatcattcgaaagcacttaacaagctctatcagcttcccaaaaatcacaaagatatacccacatgtaaaaaagttataaattaaaatatgaaaaaattctaacttttgtgcagtattaatgttgcaacttttttataggtctttcaatcgcttagaaataacttttaacagcttctaaacatatagggctttagaatgatgccaaatttataaaatttggccagctgagaaaaaagttatgatactttaaacttggctcagactataacggccagactatagtgtcctccacccctgaaaccgtgaacaacattacggaaaattaatctgttgtttccgaaacatcgaacacagaatttattcagctcaagtccagtttatgcgtccaatcaaattttcaatacatgcatgttcagatataccataaacacaaaaatatttagcatattttggagtagataatactgtcaatgcgatgcaattaattagatgttaaaattgattggatgcataaaaatttgattggacgcataaaagtcgattggacgcataaactggactagagccatttattca

SEQ ID NO: 25404 - DNA, 717 bp, Heterodera glycines
tttgggcccccgcgtttgggccctcgtttttgggccctcgtttttgggccccagggtcgtttgggccccaagtacagaaaaatgaaaaatcacagtaaaaacaactttttaaatttcagcataaaaatgtaaaataaacattttaaaaataaattcaacaataattttaacaatcaaaaatgtaaaaattaacagaaattgacgggttcataaggtaatttggacaataaaacaaaaaatcacgggttcattcgatagttgcgagaaattccccggagaaactccaaaataatgtgaaattgattttttgaactcgcatctccaaaattttgtcatcccatcagaactcattttagcgaaggtgtaaaggtggccttcgtaagacaattttactttttgttttttggttgcaattgggttagccatttctgaaaaatgtccaaatcagaatgtacatcaaattggttaactattaaaaaataataggagttggaataagtaaaattgtaaaaaatgagcgaatgttaattaaacctaacttatgccaagtggcgagagggatccctcaggcttagtttttagaatcttaatttttaaaaaagcacatttttctatttttgggttggggcccaaacgaccccggggcccaaaaacgggggcccaaacgaccccggggcccaaaaacgggggcccaaacgcgggggcccaaaaacgggg

SEQ ID NO: 25405 - DNA, 1723 bp, Heterodera glycines
  unsure (1)..(1723): unsure at all n locations
gctgaacagcgactccgtttcggaagttcgcattgtatgatcatccgacttcgctggtgcgccacactccgaagggaagcgccctaattaggaaatagcacttaattgaaatntaaaaattgtagcaaattcaaaaggacaacccgcttccatgtcccatccgttcagcaaaaccttaatattaatccttccaatcaaaagcgtaaaaatgtgcgtaagctcgccctgtcgaacacatccgattgattcagttggcttctgaaccaaagtggcgccgtgccgttgggccgtcttttctgaatgctttcgccggccaaccaactgagtcggtgctgattgttgttgcaaattgcgatcatcggaaaagctaacgagacggggtaaacagcgacgatattggtggcaacctaatgagaggaagggataagcgtcattagccaagccaattagcgggagagaaacgcacaggtgtaagccaatacatcattgcttgagcaccgatttggtagaagcaaaggccgatgaacagaatgatcagcaccagccaagtgtaccttaagcaaggactaaaacagtgccaacagttctcaatcaatgggttaattcaaagtacgaaccaagcaggggctaatgacctaattaacgctacaaaccaagcagtgctaatgacccaatcggtgagttaactaattgcctaccagtggcattcgttaaagtaaaccataccttgtgcagcgattttttgaagacaaatgcttaactccatcgatgttggcggcttcgaagatcgtaaagatgaccggtctgtccgtcccgtcgtcctccatcaaaagttgcatcagttcatccgccgtcgttggcgcattctcagcaaattgcgtactgtctctttgtcgaaattttatttggtaaaaaatgctgctttaaaattgcttttcccggcataaattgcacttttttttgctgtcctccgtcgcttcttcttcgcttgcaattgaaattgttggcaccggcgatttttgctgctcattggacggcatttggttgatggaatgaactgccggatcggttgggggagagggcggccgatgggacgcgactgacgggggccttcaaccgaattcggggctgattggacatgcgaatgtgccgttggactggaccttagcgggactctgttcgtcgtgtcccggttcggccgcgacgcgcgtcgcacgatggagccgacggggcgcagctgactccccgtggcgttgcccaactctctcgccaatgaaagggaccaatccgtgtccgtctccgtggaggaggctaaagggggaagaaaagccgcgtaatcagtccggcccatccatcgacatagcgcgtggcggtagacgaacaccgcgttggacatcggccgctgtcgccggatgggtctgtctgcggagttctgcgccgactccaaactgttggccgcaaaatgtcgcaaaagacggtccgcaccccgcgtcatttcttttagttttattaatttgggtaattagagagccaattaaacataaggaaaatgatcaaattaaaaataaatttttatccaaaatgttaaaataatccaaatgcttctgttctgctgccgaaaaatgtgcgaaagttttctcgggaaaaagccatccgttcttttacgatgattaaggcacgcggctttccccgggggaagggaagggcgaaagtcggccgccct

SEQ ID NO: 25406 - DNA, 1594 bp, Heterodera glycines
gctcctcctcacccgttgtcgatgatggtgaatggcactggctcgccttcgccgcccacccgagtggccacacattcggtgaccatcatattgtggggcccggcctgctcgctgttcaccaccaagtgcagctgatcaccgatggatgccttctccagcggttggttgtccttgtcgaggaacgacagttgcgcagtgatcggcggcggtgtgccggcgctcagcacttggggctcggcctccctttgatgggtggacaaacaattaataggattgttaattaattagtagtcggatacaaaaaaataaaaataaacacaagaattaattaatgagtttgggttggaattggacattgaatggaaatttgccaatgtagcgctcaattaattaattaaactaattaataagttggtgggtgtgaaaattgtcgtatgagttaattagttcaggccatttttcagcaagctggattatacaaattaattaaattaattattaacgaatgattttgggatgaaatttgccaatgaagccagtgcttattaattagtcaactaattaatgagtggggttaaaaattgttatgttaattaattaagtattaaattagttaattcataataactgggctggttccccgtggcccaattcaaaatattctaaacgcactatcgtttcccgactgacagacaaactttgtctcgaatatggtggttacgatcactgtgccctcaaagccgggttcttggccggcggcatcgccacctccggcaccaccgccgccgcctccggcactgactacggcaccgccagcgctgttgctggtccgcaccaagcggtcaatgtccatgttcacgtcgcatgacacgcggtagaagcggtcccactccgtggtgacctggtgcggcaacactccgtccaacgagacgaccaccaacgcctccaatttgccgtcctgtggacagaaagatttttgataaagcaattcgttttgataaaaaaacagaggaggtctgatcagcttttaccggcaatgattggacaaatttatatctgattttgatcaagcacccatttcctattggtatatttatttgatcaaaaaaagacaatgggtctgattggcttttgtccgcaattataggacaaatgtataattttatgatctggttatgatttatttggtcaataataccctcccccaatcagtgaccaaatgatttattggtatttaaattcaaatttatcaacaagccacaagtctccagagcgcattgccagaaaaaggaaaaagctcattgttgctactaaataggctcttcttgcaaaaagctgaggctatttaaatcagaaactgattgattgtatggcttattcagtctgatcaaattcaaagtaatgctttgaagagaaactgatcaggagaagagcaataaactaatttccttgcttttggaccttaattgtagtgccacatgccggcgacacatttggcggcgggaatgtgatggaaatttgctttgcattctcgaccacttgggagcacgtgctgaacttctccgccgcataaatggcacccttaaatggagcg

SEQ ID NO: 25407 - DNA, 1272 bp, Heterodera glycines
atgcgattgaaaattttctaaatcagaacagcaggctcaaaaaatcagattttagggtcgaaaatcagaacatttgcgaaattgcgtcaaaacagttatcgatcaaaaatgtattaatattatattttccacctcccataatcgattttaacaattttggggaggaaatacgcaaatcctaaatttcagtgcattcgggatcaaaaacgagatttataacaattttttgcggcgcatttttccaaaaaacttttggtgaatgagcgaggggagagggtccggcggtgccgataggcgccgccgggaaaatttttaaaatttttaatgcgatttgttaacagattttcatcaaaaaaagcccaatttttggaattaaaagccaaatgacgactttttttcgctttaaaaaacgcttttttacggcgcgcttcttccaaaaattttgggagacagggggtccggtggcgccgataggcgccgccgggaaaaatttgtgattttaatgagattcgtcaacagattttgtccaaaaaattgtttaaattttgccaaaaagcttattttcttgataaaatagtgacattataccataaaatttcaaaaattatgagtttatttaagaaatcagaacaaattttggtcgctaccccaaaatcagaacatttctgacaaatcagaacatttttattttatcagatttggaccctccaaatcagaacatttctgacaaatcagaacagatcgcatccctgatcttacatcaaaaaactcataaatcgcgaccatgaaataatgctaatcgttacgaataaatacaccgagaattggatcttcattggtattatttaatgagataataggaaaatttcatgaaatgcatagaattcccgtccaaattccgaattctttttcgtcccccgaacccgaaaatcaaagaccaaaaaatatactgtagtgcttctttttcaagtgcctcattagcatatacgaaaaaattatcccattaattacgcaaccccccgggggggatttcctactaattgtccacgcgcttgcgcatgcattcgttcataggcatcgcctccatcttcacgttgcgcccgaagcaattggtcagcggatgcgcgtcccgctgtttgcccgcggccggcgtcggcgcgtacgcgtccagccaatgtgcgcactccaacttgcacccattctccacctgcttgaaaccgtcgtccgcgcacttggctgcctgagcgcacgtgcacagcaatgtctgcaaaa

SEQ ID NO: 25408 - DNA, 1412 bp, Heterodera glycines
  unsure (1)..(1412): unsure at all n locations
taccgtatttgttctttttatatgcccgggtatattatttttcaaccccctcagaaaggggtagattattagagacggtcagactaatggggacagggagattatttttcgacagatttatttagtggaaatttttgaaatttattttgaacatttctccaaaaaatgtcatcgtgtcaataaaaaaaatgcttaaatatttacaaagaaattaataaaagccccaaaaatattgaaataggaatatgatattttgcgtttcagaattttgaattttttaataacatattttttcttcgcatatgatatgaagaaaggagctcaaaaatagcatttctacgttaagattttttgatttggtgaaggtttttagtccatataaatccatattttgaggggttttcgagaataaatccatatttcgatcatttttggcaaatttttaaaagatgcaaaaaagcgaaaaatacaccccccccctaaaaagagaattttttcgaaatttcggaaattttttttaggtattttgtccactccaaaaattttcgctgacaacaatgaagttattacaaaaattttgagacgtatttgatttgcaactgtgaagcgtgaatttaataaaaattggcatttttaaggttaaatccattttttggcattatttttaattctgtttaagcaaatattgtagaccttttttggtatttttgagggtttaaaacatatattttggcagtttttagtccatattttggtccatatttgtgcatttttgagctttttagtccatatttcgggctttttagtccatataatttaaaaccctatttattacacatttaaacgaatttcaatttagtattaattaattttaaaaatagaaaagaagttttttagaaaaaataaaaattttatttattcccccgggcagaaaaaaagaaacggggagattatttttcaacctacttcgaagggggtacattattggagacgggcagattaatggagacgggcatataattagagaaaatacggtatcttatctttcgcaaccaacgctttcgcatctaattctgctgaggaccaatctgccgtttcccgttgaaacgaatttagccctaccgtaactttcaaacaatgtcgcggtgacaaatatttattatggtgtgaaaattcgaaattgaaaatgacagcaatattttaaatcgagaagaaaaaatgttgaaaggagtaaacatttgctttttgtctccaacgactttgtgccataaaatgaattaactggtcaggaagaatgtaagatatagattttaataatgagaagaaatgaaataaaatttaaattgaaaaatcattaaatgtatatttgttaaaaaaaatatttcctnnccgtacttcttctngttttggcc

SEQ ID NO: 25409 - DNA, 1389 bp, Heterodera glycines
tgataaagggagacgaatgccgttcacaaaaatgataaatattgttctggtggtaaactgcacaaaagcacagggagcagcagcaggtcaataaaattcatagcttccttgggcctacagcagggatggcattccgatttccgagaattccgaggctcaaaaatttttcggaaatcggaattcgacccaaaaacgtctaaaaccggaaatttttgaaaaatataaattaaaaagtttttaagtcattttacattgttttagaacatttttgggaaggggacatagggggggaggggcgtccggcggtgccgataggcgccgggaaatttttaaaaaagctagtgtaatttttaacacaattgtgtaaaaattactaattaaaaaataaaattccgaaaaattccgactttttacaaaaattgtcggaaatcagaatccgtgccatcactggcctacagtttcatttatgtttaatttttttttataatttcacctttcccctgacccgaacaagctgcagttttttgtaaagcaattcttccccaaaagcatacaaaaatagcaaaatgtacaaaaaaaaacatttttttcccgaaaattgcccaaatttttagcaaatctttcctcgtgggatttgttttgaaaatggaaataagtcatttttcttatgcttaaaaggcattaagttaagataagaaatcaaatctcacatccattttgtggttttgtgctgctgatgaaaaaaatgccgaaaaatgtgctgaaagttatcaaaaggatggttcgttgtgccagtgccaatacggtggggagggaattgaccatggcaatgagcagttcattccaacgcctccgccggttccttcgagtgagaaaggtagaacaaatgttcgtaatgttccgtttaatttgtctttttctccatatttcctccttaagtttcaatttccgccctatacataaataataaatatttttggaccattttaaaatatcttacataaaattaggcattttttcattttattttttccaataaatcgtaaaaaatttagatttaaaaaaattttacttaaattggcaaaaatatttaaagataaatattttaattattttaagtcgtacggtgcaagtatggaatgatctatgaaaacaagcttggctttgcctacccaagagtttgcgaagaagggtaccattattgctttgcggcaaatatcaccaaaaagggtacggacaaaaaacgcggctattttttgattttttcaaaaatcaaattttttaattgaaaatgtattttttgaaagtagcacggcaaaacgcaattatgatttgattttattatggatatgagtatccaaacacagagaaaagttagctaataatgaa

SEQ ID NO: 25410 - DNA, 1328 bp, Heterodera glycines
ttttaactgccatttccttggccccattctcgccaatctttcagcaaatgtccatatagtcgagcttccatttgcgtgttttgaagtgttcgtccactcgtccgtcaaatcggcggctgagcagcgcaatgccaaggccgagttgagaaggcggcagcaaattgaacacggcgtgccaatcagcaggacaaatggaacagaaaaagaaattgaaatttattgaaataaatatgttaaattattatttatattaaattacatttctttgtccatttgtttctcctcctctttcggattgtccgacattttcagtattaaaaatagtttaagatccatttttaaatgctaaaaaaattaaattgcgcatgttttaaaacaattttggtcatttaatagcttaaagattaagcaattttttagcaggtcaaattcttttttttcaaaaaattggaagaaaaatgccaaaagcattcaaaactatgggcattttctccaaaatggtaaaataatgctcaaaatgatgccttcttcagctccaacagcagcagatggacacacaaaaaaaggagtgagtgaatgggcaacgcgcagatggaaaatggaggagcctaaaggcacaccccaagggcaatcaatggaagaaaaattaatgagtgaagaaagtgattattagttgcggaaaaaaattaattatgtatttgcaaaaataaagaaaagttgaaaaaatagtgaaaaaatggtgtaaaattttaaactatcagttttacaataaattaatgagtgagtgtactttcacattgaattcattaaaaagttttattttattccgtacctgcaagataaattaggatgagcaatttttagcaggtcaaattctaattgttttttttcccacttttatgacttttaatggaattaatgccaatttttcattagaacaatatttttattcaaaaaaagcttaaaatttttctgatacagaagactcattgaaaaacttatcaacaatcgattctataggtattagaaaaattttaaaataaacagaaatatatttgctctaactgttctctattagcctgtaactcaaaataaatctggcaaaaattacaaaagaggaggtttttttcttataacatttctcatcgaactttttcggaatcatcatttcatggtctcattctccaacatttcagagggcaaattgaaccgggatacaatagcctaattataaaaaaacagaaaaatttcgttatctttatagtccttgagccttaaagagtttaaagatgattttttaattcatgcaccgggtcgggtctttgaat

SEQ ID NO: 25411 - DNA, 1063 bp, Heterodera glycines
aaaaaaaggcggtttacaaaaattatgggggaaaaaaaggctttacaaaattatacccctgggagaagggagtgggaaacatgatttcaaaattttcaattttttatagtctaatatactcaaatcggttcagaattcgataaaaataacattctcggtgctgaaaaatggggtttgaaaagtttattggggaaaaaaagactttacaaaataatacccctgggagaagggagtgggaaacatgatttcaaaattttcaattttttctagtctaatctactcaaaacggttcagaattcaataaaaataacattcacggtgcgaaaaatggggtttgaaaagtttattggggaaaaaaagactttacaaaataatacccctgggagaagggagtgggaaacatgatttcaaaattttcaattttttctagtctaatctactcaaaacggttcagaattcaataaaaataacattcacggtgcgaaaaatggggtttgacaagtttattgggggaaaaaagactttacaaaataatacccctgggagaagggagtgggaaacatgatttcaaaattttcaattttttctagtctaatctactcaaaacggttcagaattcaataaaaataacattcacggtgcgaaaaatggggtttgaaaagtttattggggaaaaaaagactttacaaaataatacccctgggagaagggagtgggaaacatgatttcaaaattttcaattttttctagtctaatctactcaaaacggttcagaattcaataaaaataacattcacggtgcgaaaaatggggtttgacaagtttattggggaaaaaaagactttacaaaataatacccctgggagaagggagtgggaaacatgatttcaaaattttcaattttttctagtctaatctactcaaaacggttcagaattcgataaaaataacattcacggtgcgaaaaatggggtttgaaaagtttattggggaaaaaaagactttacaaaataatacccctgggagaaaggagtgggaaacatgatttcaaaattttcaattt

SEQ ID NO: 25412 - DNA, 1953 bp, Heterodera glycines
tattttcagtatttctagagaccggcgcgggacgggatcccgcgcgggattttgcaggatcccagtccgcaatcccgcattttttggaaaatgcgggattaatcccgcgggatcccatcccgcaaagaattttgagttccggtcccgcagcggcaaatttgattttttgtgcgggattctgcgggattttattgatttttttgaaaaattttatggacaaaatgccaaatatttttgaattaattaaataataaatttaattaaaattaactcattttcatcgaaaatttcattcaaaatttgtgaatttcccggcggcgcctttcggcaccgccggatcgccttttacttaataatcctgtagaaattgagtcaaaaagtgcgacatttggtcaattttagacaaaatctgttaacaaatcgccgtaaattttcaaaaattctctggcggtgccgacggcaccaccggacccctcgtgttcctggttttttttttgaaaaattacgccgcaaaaaagctttgaaaagcaacaaactagtcaaatttatggaccgttaataatttgaattccgatcaacttttaccgtccgatccattcgaaaaatcttagtcgacccatcagccccttttattgcatcccgttttttctggtgtgtttttgtaccaattttcaaaaaaaaaacttagagaggttccggtagtgcccgcccgaaaatgttgattttttgtgatatttattaacagattttgccaccatataatagcataatttaataaagccctgctggtttttattgttttaaattatttttaattaattccactcactttctttcgggacggcacataaaaggtaaaagcccaaacatttctcatcatcagcgcttcggtttattttggccacaattttccacggaagtcctttgatgagcacagtttcgctttttcgctcacttccaatgatttcgcaaaaaaattcggaagctttttcaatttccataaaaattgttttgtctgctgtttttggagcagaaaattggcccattttagcatcttttaagataaagtcaactgtcaatgtcactttgtcctcttctctgttgtaaaattcattgttagggtccagcaattccttaattaaccataatggatcaattaaacaataaacaaccactcaccgcaaatgaaatgaatccatggaatcctgcttgatccgctgtgtgatcaaaaatttgtccgaaaaatttgccggtagaattcttcacgtcgaacttttgcgaaacaattcgaaaggttgcggaacattcacagcaccaattctcatcttaatttaaattaagacaacttttaatgtaaaataattagcatttgatttactttaccttcttctgctgctgcacattgaagataaaagcccagccatttttcatcagcttttccatttatttttgccacaatattccaaggaagtcctctgatttgaacagtttcactgaatcggcaactccccactttttctcccacaaattccgacactttttcaatgtcaaaaataattttcccaaatgtcaaatttcgccaattgctcgggaattgcaatgggccgtacagtaatccttcggaagtgccacacattttcgattggctacggtatttttcaatgccgaccacttcttctgcaattaaaaggccggacggaactgtaaaaataagagttagacggaccgggaatggcattctaagcaattaattttaagcaacccttaaaatgtctaattttataaatttttactaactaataaactataaattttaaacgatattctaattgcttttctgtatagttaataggtaatttatgttaaaattgatatcccattatttactttgttttaatattaaatccactgttggccaatttgaacagtaaattccacatgtgagaaaagcgg

SEQ ID NO: 25413 - DNA, 2110 bp, Heterodera glycines
agaaaatttaaatttaatcaatattttcgacaaaatttgctaaaaatgtctttctgaaattttttcggtccttaggggtcaaagctaatttacctgatgggggccgttctaatagaggttttttggaaaaatgccaaaatatggacaaacatgcaaatatgcacataaatcgcgaaatatgtaaaaatatggaaaatatggatatagaaattcatcctagaatcttcaaaccaagttaaaaacatgtttttcgtacgttttaggcctcccacagtccaggaaaaaagatgggaattccatataattcccagccctagtaatagttaataaatttccaaaaattttattagtttttttcaaaagttcaggccaaaaaactggaaaattttcaaacttttgaaaaactagtaaattattttaatttaagatgagaataaagagaagagaaaaagtgaaaagacaaattaaagaggtcaacaaacctaaaataaatagagagacaaaatccacaatgttttaaacgaaaacaaatatcaattaattaaattaaatctccaacatttattctattagaaataaactgctattgaaatgaaataaaacaattttccatcaattatgcgagattgaactgcttgctcagttaaaaatgcattgaaaagttgaataaaaatgcttgtgcctttaaatcataatacaattttttattgtttgctcggaaacttctggaaataaataataaaagtaaatgaaagtttttctttgttaataagcgaatgaattttttaatgcttcgtcgctaccgtcaacttttttgacgaccagaatcggtgctgcccattcggtgtgctcaacttttccgatgacttccattttctcacgacgattcaattttccgtcaactgcatctttggcgttgtacgggaccggacgaacctttctgtatattggccgtgcgtcggagttcaattctaagtacgcttttatgcagagtcccaattcattttaaaaacattgatgaactcctgctttagctgactgatctatttttcggcgtccttgtttcgcttgccggcatctttttgaaaatttgtgttggctaaatcactaaatctgattatcgagtgacccaaatgtctgtttttacttgccaatgaaaatgtcgcgtggtgaaattgtcaaattgtacgcgaagcaagcgtcgagatggcacagtacaaatggatcagtgcaaaaatcggctaactgggaagaagcgaaaatagttatgataattagattttcataaatagtgcggacgtcaacatcgtagacaatacgtgagcggtagattatttttctcaacttaaaaaatataactaaattataaaatgtgtcaaaactattttacctcttcacgcactcgtctcacttcaatggaagacattttttcaacagtaaaagcaacatcaaaggcttaaattctgtcaaggatatcgcgccttgcaaatttgttgtgtggacggtggcattgagggcaccaagctgaaaaattattcatttttttaacttttggcccctttttggctcttaaaataaacttttttgctcgaataaaaacaaaatttgaacgtcgtgaaagaaaaaaaatagcatttttgagcaaatacgtattgtgtcttactttttcataaatattaatttttgatttcttacggggcgacgtctgcttcgaaagcgtaacgtttttcattgaccattttactattttaatagaaatatatttttaatttattgaatatttttctactttctcagacgtctgctggacatcgaattctgacattctttggataattcgcacaatgtctcattaaccaattttgatacttcatctttggttcttttgtccaccagactttcattattgtagagaataggagtctttgtgctatatcctttgtttcgcagctatatagagttaataaatatttgcacagtttgaattactttatagaaagcaaacacttacgaacatatagactatgtcgcttgcttcaattttgtcaagtatgtagccccttgccttattgtacgtaataatttcttgtaccggtctgcctattgaaga

SEQ ID NO: 25414 - DNA, 760 bp, Heterodera glycines
caaaatatttttgaaatcaccttttatttggttaataattaaaaaatgtagcctattaaaatatttagaaaaattttattattttatgttttttgaaaaatttccgacttccgaattccgatttccgacgtttttggggtcggaattccgatttccgaaaaaattttggtcgccggaattccgacttccgatttccgaaatttttgataaaaaatcggaaatttttttttttaatttttttttttcaaaaaatatttatttttgtacaatttctattctctaaaaaccttaattttcttgaaaaatttactcaaaatcgctaaatttggtcatttttgtcaaaatctcttaagaattcgtattaaaaattgcaaaatttttcccggcggcgcctatcggcaccgccggccgccctgcaccccttttccccaaaattgtttaaaaaacgagccgcaaaaaaacaatgtaaaatgacatgaaaagattttgatgaaaattattgaatacttaacaaaatatttttgaaatcaccttttatttggttaataattaaaaaatgtagcctattaaaatatttagaaaaattttattattttatgttttttgaaaaatttccgatttccgacttccgaattccgatttccgacgtttttggggtcggaattccgatttccgaaaaaattttggtcgccggaattccgacttccgatttccgaaatttttgataaaaaatcggaaatttttttttttaatttttttt

SEQ ID NO: 25415 - DNA, 1202 bp, Heterodera glycines
atagaaatgggggaaaagagagggcagaagcctaagaaaaagcgccgaacagcaaaaaagtaaatgacaaatggacgaaatgtttacgataagtgaaaggggaggaggaaaagcggaggaaaagtccaaaaagttaatagaagaaatacaaagagttgagagagagtatcaacccaagtgagagagagagaggagagagagagagaggagagagagagaaaggagagagaaagagggagggagagagagagagaaaggagagagaaagagggagggagagagagagagaaaggagagagaaagagggagggagagcgagagagaaagagggagggagagcgagagaaaatgaggaaagatagttgacggagggagaaatatagacaaaaaagagaaagagaaataactttatatatttttactcatttttctataattaaaagtcattaaagtgattttcgcccccaggtgaaaccaacggacaatcagccggaaaacggacaaatgctgaggggggcggatgcgcggaaacggagggtgccgctctgtctgttcgtcagacgggcggaagaatcaccacacaattacgaatgtgcttgaggggagggagatgcaaaggaaaaacagtggaaggaagaggaagaaggaagacaaagcggaagagaaagcggaagaagaagaagaaaaaggtcgagaaagcgggaaaagaagcgaagcgcaagcaacagaaagaggaagaggaaaggaaaagaaagggaagagaaagcggaagaaggaagaagaaggaggaggaggaaggggaacaagaaggaagagagtgggagggggcgggggggggggggtaaataagaaaagtgatgtcaaaggagtagagatcgacattttgaaaaatgcctggacctggacctggattccatgttggacctggacctggatttcctggacaaaaatccaggaaaatccaggtccaggaaaaatccaggctcctcgagacctggatccaggcctggacctgggatttttttaaaccaattttaaaaatcaaaaaaatgtttgaaaaattcaattaattgcttgggaacatctaaaaatatctaatttacaataaataatttgtttttaaatatatttaatcattttttgaaaacttgaaaaaatatcggtcacttgaaataataaattctaaaattttgtccaggaaa

SEQ ID NO: 25416 - DNA, 1375 bp, Heterodera glycines
  unsure (1)..(1375): unsure at all n locations
tgactttttcggactatgcccgaattttcaatttttaaagttgaaataaaccgtttatttctaaatgaataataataattctcagcagttaaaaattccttaatggtcaccgctcgtaattttttttaatttccaaattaaattttcataaatgctttttagagtttgaaaattcattgataaaacaacattttttaattgatttgttgaaaaatgagaaaaaaacaaaagaagtgctggacattttgggaattgatggcttaacaattcacaaattgcaaaacgaaatcagcgaaaaaattgatcatttaaatagcaaaaacaaaagtaaaaataaaacaaaaaagaaaaaatatataaaaaggaaaaaagagaaaattggcgaagtgttaaaagggacagaagaagaaaacacggaggaaattagtgaaaatttcgatgaaaaaaaagaaggaatggaagaaaataaagaaaaaacgataaaaaatctggaaaaggaagaagagattggagaaaaagaagaaaaaattgaagagaaagaagaaaaggaaggaaaattagatgaaaacattgaaaaagaagaaaaagttggagaaaatttagaaaaaaaagaaaaaatgaaagaaaaggaagaaaaggaagaaaaggaagaaaaaattgaagagaaagaagaaaaggaaggaaaattagatgaaaacattgaaacagaagaaaaagttggagaaaatttagaaaaagaagaaaggactgaagagaaaaaagaaaaaatgaaaaaaaatttagtaagggaagaaaaatttgacgaaaatgaagaaaaaatcaatgaaaaattagaaaaacgaaaattggaagaaaaagtttcgaaatcaaaagattttgagacggaaaatggcacaaaattgaagaaaaaagatgaacaatttgccacagaaaaattggaagtgaatgaatttgcatttatcaaattgggcgattttgaggacgaccaatttttggcattaaaatacggtgaatttttgggaatattaagtcgaaatgacggagaaaaggcgagaaaagcctggtccccggctctgaaacaatttggggaaaaggaaaatttggaaaaatgtgagcattcgttggcacatctgttggacattggcattttggcgaacgaaatttggcattacgttcagacaatgaaggcactgaatggaaaaagcaaagatttggcaaaatttgaaaaggaatgggcccagctgaagcagctcaaattggaagaagaaataagtccaaaaaatttggaacaaacgcttttttcgcttatganacgaattgtggtggagggaatcactgcaaaaaatgtgcaaaatttaaaattggaaataaacga

SEQ ID NO: 25417 - DNA, 1643 bp, Heterodera glycines
cgcactaattcaaaaatacactggtaaatgccttttttcatatttttttgatcagccataactctcttcatccctaacaaaaccgaacaattttagtatctaaaaaagtttattaaaggtagaatctttttctaagcaaaaataagcgattacgttgtgtgactttcaaatttcagtcccaccttaggttttgcaacaaaaatcaatttttcgaccctaccatgattttgtctaccccctaccctatacagacaggtgccacaattaccatcaaaattacaaatctatcgcgataactcatttattggtcaaactttacatacaatatgaaacggagttacattggaccagatatagatagatacataaataatgtgtacacacatagaacacatcaatacaattagaacaatatgatcactggtatggaaatcgcaaaatttgcttacagtgataaaacacaaatgatatgggcaacaacatataattttggggatagcatcggtttgggaggggaactgtttgtcggcccggccattccatcgttcgtccgtcctcgtgtactgcggcggcatcattggctcttctcactgctggagctcttcgatcctttgtgcttcttctccttcttggccccactgccgctcgctccatccgatgactttttgccgccaagtgacatgccaacgaactgaaaagggaaaacaaaaccgttaaaatgattgatggaagaacagatttggaacgagcaaacgcaccattccaccgccgaacagtgccacagcaacgatcaggtagaagaagaagcccatttggttgattggagaacaagcgcggtcgaagttgacgtgtgtggaagatgtgtgggttgaaagtgtttgcgcaattatcgtcgttgagattattttattattgggaagtgagcgaaaatgcgaatgtcggttccttttattcaatctcagccacgacaattcttaaacccaacattttgccaaatttcatttgatatataaggggatgcgttttcatccttttcaccttcgctactaccatttgcccatatagaagtgcacccgttgcaacatttttgtgagttttttctcttttttttcgtgtgtttttttgtcttctttttacatcccctccatttgtgttcagaaacggcctcgacaaacccccccccccctatttaatgttagtgctcaaaaattcatatcctctgctattcagtggcacacaatgcacaagtctcgccaaaagcaatccctacgaaattgtgatggagtgacaagcccaagccagaatccaaaaaattccaaaatttttattaaggacatcaattgtgtaattgatattaaaagtgtcattccagaataaaagaaaaacccaattttattttcttggcaaaatgccggcacacatttccttaacacttttttccagaattacccaagtgtttttttgacaaaattcttttttttaaatatggtttttaattaccttcgactcatgtgcaaaacggccattaactttgaatggcgcccgcctttggccctgataaattctcacataaattttgtccgtccgtcctaaaaaggaaaaaaagtttagaaaagaatatgtaatttcgactaaaatgagga

SEQ ID NO: 25418 - DNA, 1028 bp, Heterodera glycines
ctgtatttgtctgcgcctagttcaatgtaattacattttttatcaagtgtatttcgccgaatatttctaaccatacagtgccacgtgcttggcatttttttaaaggagtacaccccccctgattctttgcagaaaagtgcacgcatttcgtcatttccgatcggtactaatttcaatggatgaattaaaactttctgggcattaaataacaaaatttaaaacattttaagaaaagaatcataaactggaattttttaacgaaaagcaacacccacaaattaaatcctactgtatttgtactgcccctagttcaatgtaattacatttttttataaagtgtatttcgccgaatatttctaaccatacagtgccacgtgcttggcattttttttaaaggagtacacccccctgattctttgcagaaaagtgcacgcatttcgtcatttccgatcggtactaatttcaatggatgaattaaaactttctgggcattaaataacaaaatttaaaacattttaagaaaagaatcataaactggaattttttaacgaaaagcaacacccacaaattaaatcctactgtatttgtactgcccctagttcaatgtaattacattttttataaagtgtatttcgccgaatatttctaaccatacagtgccacgtgcttggcatttttttaaaggagaacaccccttgattctttgcagaaaagtgcaagcatttcgtcatttccgatcggtactaatttcaatggatgaattaaaactttctgggcattaaataacaaaatttaaaacattttaagaaaagaatcataaactggaattttttaacgaaaagcaacccccacaaattaaatcctactgtatttgtactgcccctagttcaatgtaattacatttttttataaagtgtatttcgccgaatatttctaaccatacagtgccacgtgcttggcattttttttaaaggagtacaccccctgattctttgcagaaaaggcaagcatttcgtcatttccgatcg

SEQ ID NO: 25419 - DNA, 961 bp, Heterodera glycines
tttcaaaaaagtgttcgaaaaaaaagagatagtcgtttttccatacgaatatgaaaagaaggcgtaaatggctctgaagcgtccataggccgcagaccacaaagtaaaatgggacaacattcataaaaaaggttggcctcaaaagggcccattcccaagctaatttcggaatttgctgataaaatcaaatagcctaaattatatacgcattataaaaaggaaatgacagaagcctcgaatgttagttatattgcgtgtcacaaaatctcttcctgaaaaaattttcaaaaaagtgttccgaaaaaaagagatagtcgtttttacatacgaatattgaaaagaaggcgtaaatggctctgaagcatccataggccgcagaccacaacgtaaaatgggacaacattcataaaaaaaggttggcctcaaaagggacattcccaagctaatttcggaatttgctgataaaatcaaatagcctaaattatatacgcattataaaaaggaaatgacagaagcctcgaatgttagttatattgcgtgtcacaaaatctcttccggaaaaaattttcaaaaaagtgttccgaaaaaaagagatagtcgtttttacatacgaatattgaaaagaaggcgtaaatggctctgaagcgtccataggccgcagaccacaaagtaaaatgggacaacattcataaaaaaggttggcctcaaaagggcccattcccaagctaatttcggaatttgctgataaaatcaaatagcctaaattatatacgcattataaaaaggaaatgacagaagcctcgaatgttagttatattgcgtgtcacaaaatctcttccggaaaaaattttcaaaaaagtgttccgaaaaaaagagatagtcgtttttacatacgaatattgaaaagaaggcgtaaatggctctgaagcgtccataggccgcagaccacaaagtaaaatgg

SEQ ID NO: 25420 - DNA, 2215 bp, Heterodera glycines
ctagagtccggcgggatcgggactcccgcgggatttttcgggagtcccgctcccgactcccgcttttttcggtgaacgggatttttaacgggagcgggatttttacgggattcccgttcgggacttccgtcccggaaaattttgaactcccgatcccgctcccggaaatttttacccaaaaacgggagtaaaaatgcactggtaagaattgagttttttggtaaaaataatgattttttattgaaaatctgttaaatatatagccaaaatttcaaaaaaattttcccggcggcgcctatcggcaccgtcggaaccttaaaatccttaattttctttaaaaaatgcctcaaattttcaaaattggctatttttggacataatctgacaatgtattgtatttaaatattcaattttttttccctgcggcgcctatcggcaccgccggcctctctcttccaccctggtcaccaccaaaaagttttttcaaaaaataagccgcaaaaaattgttaaaattaataaagggagtcaaaataaattatttaaaaaatttatttgaagaaatttgaaaaaatttctgattttcgaccaaaaatatgattttttaatttcaaatttctgcttactaaatttttctgtatttttttctctaaaaaaaggattgcccttcaaatttgtgcattaaaaatatttttgtgagtatttaattaaattttcgaattactcccgctcccgcccgggactcccgtaaaatttctgcgggattttaacgggagcgggattttcacgggattcccgatcccgatcccgctcccggaaatttttttttaccggactctattaaaggcccaaaaatggcaaaaaaatagtcactttttggcgaaaaatggctacactcaaatttttaaattaacgcaggccaaaaaatttttgcccttggagcaaaaaaaagtattcggattcccgccttcggaatttttttctggctatactaaaaagtttaaaattaggggtctaaaatgataaaatttattcgaaagtaacaacattaaaccaactcagtaagagatacataattttaaaaatcaaaaattcttatcaaggattaaataaataaattttggagatgaatttttgagaaatttttcatttcttaggggtgtatttttgaaaaaattttaggtcaattcttatgggtatatttttcgtttttattgcatttttgtcaataattttgggcaaacgccaaaatagttgaaatagttttttaaaatttttttatgttttaaggttctaaaaataaaaacctagaaaatcgcactaataactcgaaaagtagcttaaaaacaaccgaaaaaaacatattttcgtgcgtttcaggccataggaagtccagaaaaaaaggtaaaaaactaaaaattggagtcctattaaaagaaatttgtttaattaattattattcattaaaaaatgagtgcataattaaaataataataattaatttaaatatttactataattgatattttatgttcgccccattaatattttttaggttcgaccagcaggcagcgaacaattgtaaatttcttcgatttgctaacaatgcattgcgaaaatatttgctctaccttatatcgaagaaatttttaagagaaaaagaaggtttttaaaatgtttaaaatgccaaatatttaataaaaataataaatgttcactttaaagataatagtatagtgaaacaatttaaacatcaaattttaatgatttaaaactttttgcggattataaagattttaataaaattcaaatacttttttagggttatacagctccaatttatagcatagaaaattgccaaaatacgttttgaaaatagaaaatagggttagtccccctaaacccgtccgatttggaaattgcaaatgtggtcgattgcactccaaaatgctagatgtttttaaaattaatttctaagagatttttgttttttgaaaatttctgttacctatcttttctaatttttatgactagagctcccaaaaatatgcatataaaatcgcaaaatatgcaccaaaaattgcaaaatatgcatataaattttttcaaattgagaacattccaaaattcttcaaattcattacatttatgctagaatctcgaaaaataactaattatagtattacaataatttttagaagaaaaaatgaaaataa

SEQ ID NO: 25421 - DNA, 898 bp, Heterodera glycines
  unsure (1)..(898): unsure at all n locations
aaaatggggtttgaaaagtntattgggggaaaaaagactttacaaaataatacccctgggagaagggagtgggaaacatgatttcaaaattttcaattttttctagtctaatctactcaaaccggttcagaattcaataaaaataacattcacggtgcgaaaaatggggtttgacaagtttattggggaaaaaaagactttacaaaataatacccctgggagaagggagtgggaaacatgatttcaaaattttcaattttttctagtctaatctactcaaaacggttcagaattcaataaaaataacattcacggtgcgaaaaatggggtttgaaaagtttattggggaaaaaaagactttacaaaataatacccctgggagaagggagtgggaaacatgatttcaaaattttcaattttttctagtctaatctactcaaaacggttcagaattcaataaaaataacattcacggtgcgaaaaatggggtttgaaaagtttattttgaaaaaaagactttacaaaataatacccctgggagaagggagtgggaaacatgatttcaaaattttcaattttttctagtctaatctactcaaaacggttcagaattcaataaaaataacattcacggtgcgaaaaatggggtttgaaaagtttattggggaaaaaaagactttacaaaataatacccctgggagaagggagtgggaaacatgattcaaaattttcaattttttctagtctaatctactcaaaacggttcagaattcaataaaaataacattcacggtgcgaaaaatggggtttgaaaagtttattggggaaaaaaagactttacaaaataatacccctgggagaagggagtgggaaacatgatttcaaaatttcaattttt

SEQ ID NO: 25422 - DNA, 1003 bp, Heterodera glycines
accatacttccagggttctcacttgtgcttcaatgctcctaccttcatatactctacggggcatttccgcgaacagaggtggtcaccgtttccgctggtggcttgccgtgggcttagatacatacctccttccatctaccggtgtacgggctgtcgacgtctgggctacgactaagtctcggactcgctcctaggtacactcaagtgcgcccggataacatgtccagaaccaattatcgcagcacgctgtatcgactcaagcaaactcgggattcctcgtttaggtatcccaagttcactcaacctcttcgttatatttggtaatacctcgccgcacgacccaactactatcgggaccaccttcactgttgggaaactcgtaccgtacgcaaggcctaacgcatgtttcaggttaggtcccggtatttcagcttccgctagttccaatggttcgatcatagaatttatggcatatttccgccactttatgagctcctgtttaaccaggttctctctccatggcaccgaaatttccacaataaggatcgtacgtgcttttttatcgaatattaccatatcgggcctggtgctacgcagacccgtataactcgtactcccatcctccctagggaggacgccggcaggcgaagtatgcaacgcgacatcgtacaggattttggcatgttcattctcgattaccgcatgcaaaggaacgacatgagaagaaacgggcagtccatatttcctgcataaagccgtgtgtacttgccgtacaacaccgttatgtcgatctaacatagttccggtccgtgaccgagcacaaccactaaggatatgctgctcggtttcaacacgaccgtccccacgtcgtcggcaccactttgctttcgcgtttatatgtggacacgtaagctcccgcgctttcaactgtccctcctgtgctgcaatgcggtctcggaacgaacgcctgccaattctcgcacggatcaacccagtggtagct

SEQ ID NO: 25423 - DNA, 1013 bp, Heterodera glycines
aaagtttgaaaatgttataaaaaaatttcaggatgaaatataattaaaataaatcaaaaagaaaaaaaaatttatttttctaaataaataaaaaatattgtcagaggcagtgcctgccgaaaaaaaagacaaaaaatatttcgaaaaaagctaaaaaaattgaaaatttaaataaatttaaaagtgaaaaaggaaaaaagcttacaacaccttcgattcccaggacgtctccgttccaagtactaagatggcccaacgttgcttaacttgccagatcggacgggatggcgtgctttcaacgtggtatggtcgtaagcgaaaggaaagcaattaaagtaatttaaataggcatatttaaaagagcctatttttttgccttttcacaagagaatttattaaaaaaggcaaaattcgccttaaattaataaggtgaaagtttgaaaatgtttattaaaaaatttaaggatgaaatataattaaaataaatcaaaaagaaaaaaaataaatttatttttctaaataaataaaaaacatagaggcagtgcctgccgaaaaaaagacaaaaattttcgaaaaaaagctaaaaaaattgaaaatttaaataaatttacaaaaggaaaaaagcttacaacaccttcgattcccaggacgtctccgttccaagtactaagaaggcccaacgttgcttaacttgccagatcggacgggatggcgtgctttcaacgtggtatggtcgtaagcgaaaggaaagcaatgaaagtaatttaaataggcatatttaaaagagcctatttttttgccttttcacaagagaatttattaaaaaaggcaaaattcgccttaaattaataaggtgaaagtttgaaaatgtttattaaaaaatttaaggatgaaatataattaaaataaatcaaaaagaaaaaaaaatttatttttctaaataaataaaaaatattgtcagaggcagtgcctgccgaaaaaaagacaaaaatatttcgaaaaaagctaaaaaa

SEQ ID NO: 25424 - DNA, 1593 bp, Heterodera glycines
tttatttgtttttaatgaagcattttgtgcacaaaagatttaatggtatcaactgagtatgaacattataataagtttatttatccagcacatttttcggtaaaattacggaattcggtgactacataaaaaataatcctatcaccgggccccgcagtcaaccgcctgtggcgctcgtcagactgcttcctccgccctccgtctcgccccactacttgctccgtcttcgcatgctcccttttgcgaaagtaggcttaattttgaattttgtcgaaaattaaatttcggtttttttgttcgagtcagggttcggtgttcgaatttggtcaaatggatgtcataaccgtgttcagcaacctcaaaaccccttaataatatgtttttttatttataaattttgagtttttgttcgattgggttcggggttcggaattttgaaaataaaggtcatattcgtgttcagcgccacaatttaccctagaaaaattatttataatgtcttttgagtgctttatatagcacggtcacttgagtcccagctgagtttggcactccattttcggcacttttcatcctgaaaaaggaaagcgcgcccctaattctatttttccaacccatttcaaacctttttacatcgattctgactgtttttaagcatttttgagtttggggcctatgatcaatatttacccaaaaatgttgctaataatcagacgaaagcggcaaacttcggatcttgaccatctttgcttatgctcccaaaatttatcattttttccaacaattatcaatgccaatgccgttgcttccatttagccaatgttggcctatgcaaatgcaattcaattggaggacgaatttgccggcccaccggcggatgcgttgggcgtggcgcctcccctcccgcaccatcgtaaggccaacaaccatcgccaacacttttcgctccaaggcggcgctgtgttccgccatttgtgcgcactgtacacaaatttcaatgtgagaaattgaataattaatcacaaaaaatatgaaaattaatttttttttattttttaaatttatatattatttttttagattttggtgcatttttattcaaattcacagttcaggaaaatttaatgaattccgcgtataatttcactccttttttaggaatagtgatgcaatttttaggttttacctacttttttcctgagctccctatggtcgaaatgcatgaaaaacatatttttttgggggttgttaagctacttttcgagttattagcacctaaatgaaattatgaaaattaaaaaaggttcggataaggcaatttttaaaccaaaaatttttatcaagaataaaacaatcaaaatttggggatcaaataggcaccaaaaatgacgaaatgggcataaaaaataggcgcttaggcattaagcataaaaagtccaaaataggcattagaaaagttatcgtaaaaaccccaaactaagctgaaaacaaagtttttgtgctcatctgtgcgtatcaagtgctcagaaattttaggcatttgcctaaaaatggcagactaattataattgatttatttcaactacttgataa

SEQ ID NO: 25425 - DNA, 2249 bp, Heterodera glycines
  unsure (1)..(2249): unsure at all n locations
actttttgttcctatttttgtgtctattcgaggatctttttgcttatttaatggcctattttgcgattctatttatttttttggcattttagctgacactttgcgctaattactcctttcccatatgcagtcttcttcctcatcttgttttttctcctcgtcactcttctttctgcacaataatacccaatcccattatgataatggggcgagccaacaaatgatcattagtgcttttggccatgcttaacaatggccaatgcccggcttcaaatgtttccgcctccattccgtgttgctccgtctgttcggaaccgtccaatggcactttttatttttacttttttacctttgagtgtattcaatttaaactgaaattattttccattttggatagttgatttttatattaataaatttattaattttggcattttagctgacactttgcactaattactctttcccatatgcagtcttcttcctcttctttctcctcctcctcttcttcctctttctcctcgtcactcttctttctgcccaataatacccaatcatcccattatgataatgggtcgagccaacaaatgatcattagtgcttttgaccatgctaacggccaattcccggcaccaatttcaaatgtttccgcctcctttccatgttgctccgtctgttctgaaccgtccaatggcactttctttggtgttccatcgtgccgcgcttgcagctcattcttccgccgatcggtgcttgccaaacggaactatttgtgccgtaaggcgaataattgtgccatcattaacaaaggtccggagagggaggacaaattggcaatcctaaagaatgggggtccattatttaagattttttattttgggctcaaaatcagtttctggaggttttcgaagatgctcattacgaatctgctctcgtgtttgcccaattccgaatcccggacccgaattcgaataaaaaaagttgaaatttttttcccaaaacatatcgttaaaaccggtcaaattttggcacaaattgcgcatttttatccaattaacaatttcagcagtgttttacatccaaataaatagttaactaaatgaattagaagtttttaccccagaaaaatacatcattggaaaaaaaattgttcaactttttgttcaaattcgggtcggggattcggaattgggcaaatctgagttcagaaattcgagattagcgccctcgaaaacctccaaatactcatttggagctcaaatttaaaaaaaaataatttaaatttaggaacccccattcttaagtactgccgacaaattgccatttcgaacaaatttgtttttttgttttgtttttttgtagaaggaatgcgaaattcgtgccgcgcatgtcggctcaaacggtgttttggagttggcatggacatttcgcaaagacactccaaaaagcctggccaacgttaattaattgtgaaggataaaatttaatattttgccaaatttagccgaaaatatagcaaataaattggccaatttggaaaaaaaattctgtccccaaacaattgcttcttgctcattgtcagcagccgtatcagcagaagcaaaagcggaatttgttaatgtcgatggagaaaatgcgctttttaaaatgaatgtaatttaaaacaaatataatttaaaaaatattttttattaattttatattagaaaaaatataattaaaaaaatatatatatatattttttattaattttatcgtccaacaactatttagatgaatgtgaatttgccaaactcattcaaatttatgcaatatttccgaaatattgacaatggacaacgggcgtttgtcaatgttttgaaagggacacacaaaatcattttggatgcccagcaagtaaattaagcaatttgtattttaaaataatcaaaaattcgatttttaggcgtgtattttccgtttttcattcgattcttagggggtatattttcgtttttgaaatcacgaattagggggggggctgtattttacaaaatttttagccatttttcgccaaaaaattacctattttttgccattttggtctccatttttcaaaaatatggtaaaatgggggtccgccggtgccgtcaggcgccgccgggaaaatttttttgagaattttaatgcaatttgttaagaaaattgcttaaaattcaaagaaatttgctgaaattttttactttttgnggtttcgggggggggggggg

SEQ ID NO: 25426 - DNA, 2467 bp, Heterodera glycines
gataggaaaaggaagggaaatgggtttgagtcagtaagggatcaattcgggtgccatgatgccagcccagtataaattcctcagaaagtttaaagattgctccattgttgcattaatcttacgatttagatagcgaagttttctgtttgaggcatcctcacagccagaaacgacgtaatacattttcgaggtcgctgacttttgcttggacggatgggtttctacctgagaagaggcgacggtcaatcgcaacgatatcttagtaaggtgaattctctaaaggattggccatgttagggtaaatggaatatgtcggaaagggaactggactcgcataccgaagagggaaagaaataaaataaaagttaattgtatataatcactggatatcgcacaataaccaggatttaacttgctttgctgtatttaattggggataaatctggggcggatatgaatggtcaatcagcaaaatatataaatgagacttgagtattagaaacggaaaagacacaaatatttaattgtcttaaatcactggctaccgaacttggtaaccaggattttacttggattgctggacttaattggggttaggacctgggctggggagtaaatggttcaatgcgcaaaatgtgttaggtgttgaaatgtgcgtaaatgtgattaaaaatgaaatgctgtgaaatttgtgaatgtgttaaataaatgtgtgtgttttttttgttattctccgccacaccttcaagattggaggagtgggatgtgattgactgggggtgtcactgatgaaagtgggaggcgggtgaagggcagtggaggagcgagggcaagaagttggatgggagaagcgcgaacacgagttcgaagtgcaaccggtcggcctgaatgtgattcaaatcttataatggggctgagccatcgcagaccaatgtagaaagagaagaaggagagagaggaagaaagaaagtaaaaaaaaattgaacgtggtttaaaatttttgtatttaaataaatttgtttagttagacggttttcagtgaatacgactgatcagaagagcagttgactgagattgatcagaaaatttgactcatatttggaatttttgtgatcgttaaaaatgcaaaatatgtaattttgaattttattaatttaaaaacaattttggctgattcggagatgtgtagtgaccagaagcaattaattaattattatgagtgatcgaaagaaaaagttacagatttaaatgtgaaggccattgatttgagtaacagttagcagaatatgatataaattctaatttgcgtgatcaagaacgtttgtgatttgggttaggtgatcagaatgtcattgatttgaataatataaactgactgtgtttgaactgagttaaggtttgcaatgtgtttatgatttggatttgatcaattcagagaagcgtattaattatggcaaaagtgtacaacaattggacttagttcaaacaaaatttgatacgaatccgtacaatcaatttatgtaaccaaattggaaatttaatatgatcaaacagaatgccatgaatttgaatttgtcaaaaatattttaaatttgaattaatgtttccgaaatttatttagttttggtaagattaatcaaaggtgtcattgatttgaataaaatttgataaaaatggtcgaattgcgttaggattgacaataattgatttaatacaataattttagaaaataaaacgtattggaatcaaattaagcattgtcataattatttatatttaccatgtgtcaaaatttgttctgtttttggaaaaaaagaagagagagaaaaaaaatatatattaatcaaaagttccattgatttaataactttagagaaaagaatcgaatttatgtgaacaaaatttaaattaaatatattcgaacagaatgccagaaatttgagtattttgaacgagaatgtgtcagtttgaatttaggaactcaaaatttcgttgttttggaaaagacgaatcaaaataacattgtttgaattgtattgcagaaaaatgtgctagaatcaatttaggcatgtcacaaattatttctgtacagttttgtttgagagattggcgaaaatgttataattgaactgtatgatcagaattagagtttgaatattgaacaaaatgccagtaatttgagagagagagaaaagaacatggactggaaatttgttacacgatttatgtgatgagtaatgttagtgaattgtgttagatgatcagaatggcattcatttgaataatattttaaaagatttcgctgaaaatgcgttaaatttgaatacaaaatgatcggacagaatgccaataatttgaatatttttggttgaaatgcattaatttgatttatttgctcaaaattttgtgttttggataagttgatcaaaatgtcattgatttttgaatattttgtttgcatcatgct

SEQ ID NO: 25427 - DNA, 1422 bp, Heterodera glycines
gaaaacccaaattttcgtatttttgtggtgtaatttttaaaaatttccaaaaagtctatctttagggttgtatttttcgcttttttgcatttttcttgtgaaaatttgccaaaaatagccgaaatatggactaaaaaggcaaaaatggcgaaatatggatttattcccgaaaacccccaaaatatggatttatatggactaaaaaccttcaccaaatcaataaattttaacacagaaatgctatttttgagccccttcttcatagcatatgcgcagaaaaaatatgttaatccataaaattagcaagcctaataattagcaaataaaaatttttatttttattaataaaatatgaattcaaaataataaaattaagattaagaattaaaaagggtgcattcaattctttaaattcatttacctaacctaaattccctaattatcaaaatatcattcatcaaaaacaagcaaaaatttaatgatattgagcatttataaaaataataaaaataaataaataaatattattaaaaattaactttagacaaacaatcttataaaaacaagatgcaagtgaagaacacaaggccacacttctttatccatggaataaatgaaaaattatttattaataaaatatataatttaaaaaacctaaaaacctaaatactagagaagatcatggtcgtttaactcaaagtttaatttaactaattgcataataaatacgaacaaatgttgatttatttgttatttaaaacagattgaaatacatagagatattccaaaataaataaaatgaattaaatacaatcatttacatatgacataaattaaagagattttttgatatttattaatttttaataataaattaaaataaatattttaattttttttctaaaattgaaattttacattcatcaaacaagactaaatcgatttcacaattgcacgtgtgagttagttaccttaataaatgagacacatatttaatcaaattaaatctaatatttataattaattaataaataaaataaaataaattattttttattaataaatacgaacaaaataataaaaataagaataagaattaaaaaaagatcggttcaattaattataaatatttaatttaaaaaacaaaaaacctaaagcaattaaagattattaaatatccctctgacaataaaaaaaaatgtttaagttttaaatactgaaaataattatttccttaataatcttgattttgaaatagttgaaaactttaaaataaatattaaatctgttatttttgaatattttctaaaaatattccataaatttgtattatatatatttttcaccaaaaaactcttttttaaactttcctcaaatgtgcaaattttgtttttttttgccaaatttgtcaattctattgtt

SEQ ID NO: 25428 - DNA, 1310 bp, Heterodera glycines
ttttcagaattccaattgccaacccatcttcctccgtctcatcccctgccgatggcactgccgattatcggaagcgatgccttcatccggaatatttgcacctcgcattggacagtgccaacttggaattgcccaatttttctctggccgacttgtccctgttttggacgctcagtttggagtgcaaaacggcaacaggtttataccatatttggcacagcaaatatttagtcaattgatgtgattgatgtttcagtaaaatttaaaatttttttttttaaatttccgttcggttgggcttatgatttttaattctctacattaaactttgaatttgctttacgcaattacaattttaggttggacttgcgctacgatgcgcggaacgctgtggactcacccccgtctggccgcgactttcctgaaactcatgccagttatccctttcacccagcaaggagtcggctaacaacaacaacgatgcgcgggacaaagtgttgagcaaagccatccaccaaagtgccaacaacaaaaacagtgccatgtcaaatgacgacgggatgcgcagaggttgttggtttgtggtttcaaatgaaacgcggaattttgtgtgcatttttgggggcttaaaggaaatttgggcacattatcaatgtgaaatccgggttgatttacatggatcgcaaattgttgccccttttcctcatcccttttccccattttcaaaaaaaaacaaaaaaatttttttgatggggggggggggggggtggacgagttgatccaatgaacagaatatacaataataaatagtctcgattatgcatttttcaaaatctctttcaagggaccaccgccaacaacagcaccaaccattttgacgatccatcgtccttttttggtgctgatccatcctcggcataccatcatcggtccgcatcacatgacaatgccaaaaatgccggcggcggtgactcgcatttgctgaccgtcgctttgcatgtggcgaagacgcagttgttgctgcagaccaccgttgacggtgcaactgctgctgctgctgcaccaaataatgaagacaatgcacaggttggagaagagacaaaaattttaaaatcgttcactaatttttttggaatatgcctagaaaaaagtttatattcatcataaaattttaaaatatccctagaacacttttcattttttctcatgatttatttaataaaaaattttttagatttttttttcgattttgtccaaaaactagcaaatttccgaggatttttgcttacttttttcggagggggggggag

SEQ ID NO: 25429 - DNA, 887 bp, Heterodera glycines
ttattctcagaaaaatggctatctctttttaggacaattttctatctcgtaaccccgatgctaatccgttccggagagcctcttcaaaattttttccattaccctaagagctgcggaaattgtgaattaattctcagaaaaatggttatctctttttaggacaattttctatctcgtaaccccgatgctaatccgttccggatagcctcatcaaaattttttccattaccctaagagctgcggaaattgtgaattaattctcagaaaaatggctatctctttttaggacaattttctatctcgtaaccccgatgctaatccgttccggagagcctcttcaaaattttttccattaccctaagagctgcggaaattgtgaattaattctcagaaaaatggttatctctttttaggacaattttctatctcgtaaccccgatgctaatccgttccggagagcctcttcaaaattttttccattaccctaagagctgcggaaattgtgaattaattctcagaaaaatggttatctctttttaggacaattttctatctcgtaaccccgatgctaatccgttccggagagcctcttcaaaattttttccattaccctaagagctgcggaaattgtgaattaattctcagaaaaatggctatctctttttaggacaattttctatctcgtaaccccgatgctaatccgttccggatagcctcttcaaaattttttccattaccctaagagctgctgaaattgtgaattaattctcagaaaaatggttatctctttttaggacaattttctatctcgtaaccccgatgctaatccgttccggatagcctcttcaaaattttttccattaccctaagagctgctgaaattgtga

SEQ ID NO: 25430 - DNA, 1433 bp, Heterodera glycines
  unsure (1)..(1433): unsure at all n locations
tttttatgaaaatttagcaaatttttttggaaaatttggatgagattttcgttttgatgctctattaaaaacccatactgaataattgccaaacattatgccaacttatcaaaattaatcaaaatttaaaagatctgacgattttccccaaaagcctcaaaaatcctcaaaatttctcaaaaaactacaaaaagcctcaaagcctcattttgaaaagctcattgacctatcaaaaaaccacaaagaacgataaaaatataatttatatattttacattttaaaatattaattttaattaatattatatttaagactgacgacgtattataataaaaaaaatatgaaaatatttgccaacattaaattatagccaaagcgaacatatttgccaacattaaattatacatttaaaaacgattggtaaatgaaaattttatctaaaacatatatcccatctttaataaaaaatattttagcaatttcttttaaaaatgaggatgcaaatatatttattaactatattattatgttcaatgctataaagaaaaatggaaaaaacgatatgattgcgacaacagcttttgtaaatgtctatatgaaagttctgagtgttttctaacaaaagtctgtatttgttttttttgtttaaactataatttttagaatttgttatgttggtctgttaaaatttttggtgaacaattcaaagaacaatgaaaacagaaacaattttttcgcatcaaattaattacactatataatcaacaatttttgaataaatattatattaagcgagttctttctgtaaatatttttatcgttctggcagttttaacaaacgcgctagcacctaattttggatcagcttcatcgcttcttcattttttataaagttctcgaattctgactttgtattagctacaaagttaataagactaaggaatgaaagaagtataaaaagtaaaatttcattctaaaatatatatgaataaaataaaataatttttattaggagataaattttatggaaatattatagagataaattggccacctcacaagtaatgacatggcaaaaaagcttattctatcaataatatgtttacattataaaatatataaaaatacaattgcgaataaaataaaagtgcaatccatttaatggtgtcttcaaatattctaaaaaattttaaaaattaatagattaaaataattatattattaattaattaaattcatttattcagtactgaaatgacccacccctctgaaagtctctcactgatatttttgtcacttcgtcctagcaccttttgatctttttaaaaaatatagaaataaactaaaaacagtttngaaataccttttacatggntanaaaattaaaaattagcctattaaatattttaaaaaaattattatattttatttt

SEQ ID NO: 25431 - DNA, 1275 bp, Heterodera glycines
  unsure (1)..(1275): unsure at all n locations
aaaaaaaaaaaaaattaaatttttaatcctttgtatttaatgtttagtcgtaattttcggaataatcaaaacggatgcccgataagcaaaagagagcgcggaaagaaagaattattctgtagtttcgtccgcctccgccttttttgatttaaaaaaaaattttaatggcataaaaacgggtgcattacgtttcgcaaataaagccccccccccccctccgtttttttggaaactgccgagggtcccccctttactttgttttagagttgtgaaaacatatctatttaggttttttcgggtcgcttattatgatttggcattcattttggccaatttctaatcccgaaagtaaggtatttataagaattgagttttctactttttgttgaaaattctggtccgggattcgaaatagaccaaaatgaatgtcagtggcagtttagagattaatatttttattgtcgtatatttttttctttgctaacctgtgaaaaatccgaggcgggggaagaggcaggcgatgttcagacacgcgtaacgctccgccaccaccttgggcagtggctgtgcccccaattcggcaagcgtggcgtggcggtggccgtgcagtccgatggcgttggacgtcggcggcaggtggtcgtccgcaaacacaatgcgaccctcggcctcgtcctgcaggaatttgcagatttagaaaatctttaatttgaaaaaaaaatcctcaatgggcttttggtaacagtttcatctattttatcgccccttttgttgtaattatttcgggttattttcgttcgagtcggagtcttgacttcgaagctggacaaaatggatgcccatactcaggagatgaaaaaaaagtcaaaaaaggaaggagaataagtgtttcctggagacataaaaatcgaaaaacgacaaatctcactcacaaatcaagaaaattttggggaagaactgaaaacactaaaaaagtttaaataaacaaccagagcctagggcatagcatcaattgaataatcaaattataattttaatcaattgcatccagcagaacagcaccttttggaccaaggtacacagcaacaacagcagaatttcgatgaaataattcattttttatgttcgaagctgaaaattaagcttgagtaaaataaaggaaatgggtgatttgaagggtctgaatctggtactcattcagtttgttcggcccttttgggacaaattttttagaagcgaagccagacagncagacagtgcactatttccttcttt

SEQ ID NO: 25432 - DNA, 1659 bp, Heterodera glycines
gtcaccctcatatacatatacttctgaacaattctaatgctaaaaaacaggcactcgcgcgaaaactgaataaaaattttgtatttgaaaaattttgtccaaaaatttttacgttggaaaattaccggtttttaccggtaccggtaccggtaccggtggaaaaagttggtaccggtaccggtaccggtttttgcattaccggtcagtaccggtatcggtttttttacaattaccgattaccgctcaactctagaaaaaagcgaaaatttttctgttatggtacaccgccaccccgcccgctgcgaatgttttgttttcatgtaaaaaaataattcaattaaaaatacgctaaaaattcctcccgaaatattgttaaaatttggttggagggaggcataagggaaaagtacaaatggacaattatgaggtataaaagtctcaattcaaaccaacatttttatttttgtacagttcttaggcaccatttgttgactttttttaaattttaacttttggggtgaaagaaaaaatcgaaaagcatctttgctttactgaccttccacaatcgaatcgagcggctttttcaacgacactgaaaattagtaaaatttacagtttatttcagttttcagaatccaggttgaaaactcgttccagtccggtatttcccttgtttttcaggttttccctaatgaccggtcactctctctctctcgtaataaatcaaatgaaaaatgtccatcaattgttgccaaatcaaacataagtattgaaaatgctcaaattagcaattttccaaaatctgacaaaaaaaaactttctagtaaggctgtgatttctagacattttgtgtgcgaattttaaatcccaggcattataaagcccatcttggactgaacgccgatttgaccctggaagttttgcatttagcaaatcccagcctttctcattagtagggctgggatttttagggttttacctatttttttgcggcttagttatgatgagagaagcccaaaatagcagtttctcctaacaattttcgatttagagcgactttttagcacctaaaaacacctatttttggcgttttggcacctaaaatagtttacaacctattttggcatttttcgaatttttagcacctattttggcatttttgagaaaaattcttaagaaaaatacaaaaattgaaaatagacccctaaatatcgactttctttccatttcttacagcatttccttatttcttaatttattcaaattccaaaaatgacaaaaaattatgcgccggtgactttttgtgacgttgaacgagtttttcaatttacaaaacaattttatcagaaaaaagaacccgttttacccccgaacacctcgaaatgtatttaatttgcaattgtgctggcgaaatggataaagaatgagacttaaataggattttttgcataaatacacttggtttttcctatttttaacacctattttggccttttttgaggtttttggcacctattttgcacttttttggcaccttttttagtacctattttggaatttttagcacctaaaaaccctagctctatttataatttttatacataatggaaaaattttggaaaattatattctgaaagagatcaattaaagctattgaat

SEQ ID NO: 25433 - DNA, 1348 bp, Heterodera glycines
acaacttttcatatagcgccgacaattctatgcatatttaaaaacgctaaatgttcagagatgctgcgcatcgtgtccatccgctggcggggcaaggcgtcaatttgggtgggagtttagtgtttgttccattgtttctgcccgggggaattacgacttgagtcaattcgtagcactccaaatcgaaaagcgtgccttcagaagtgttttctattgttacagaaaaaaatcttatttttacgactttcataaaagtttactcctttttaaattttccagtcatccccgacaaattttcgtggaatttcctcccaatccccgacttttttgtttattcagcaacactcatttgtctttaaaatgctttacactttttcttaggctggtccgatgttcgcttcctcaccgctgcgcttcagcgggctttcgacgagggaggcgatttgggtgcaattttcacatatttaaattaatttaaatttttgttttgttttaaggttcgttgacatatttgcgcgactttgacagtgcgagccaaaggcgaaatgggccgattatattcgcaattgactgtctaaaccgactttactcgaccgaccaccccttttgcacgttgttccgttccgttgggctcaacattttggaccggattcttccggccaaggtggttttttttcgtttgttgatgtaaaagaatttaatttcagtgatttcagtcattattttttgaattttcttttccttatcaatgaatgcttcgttcttttcaggatttgattgttcatctggcctcatgatttgatttggtctttactcgatttatgacgaatttcgttgatttgtactgccttttttattttcagtaaatttttttatttcaaaatgatttattttgtggagcactagtccatttagaacagaaagaatgggaaaataaggggacaggctgatgagagcgtttttcttatcaatgaatcaaaaagttgacaatttgaatgaattttttcttttggtaaacatcaccatttttattttcatttcagaaaatggagaaattagaaaagagacgaaaggctaaaatagcgtatttcctaaaatataagcccccagggcttctatttttcatattcttcaaaagtgggctcaaaagaatgaatgaggcggcatttgggctcttattcagtttgtcccccataaaaaattttttaatttctaagtaaaaaagtcaaaatataggttttcggggtcgctgatcacgaatccgacatccatttcgacccatttcgaaccccgaacccaaattcgaacaaaaagtcaaaaactcaattttcaacaaaattcacatttt

SEQ ID NO: 25434 - DNA, 1352 bp, Heterodera glycines
  unsure (1)..(1352): unsure at all n locations
cgctcgaacnggaatattcaccgtctgccctcaaatgtgaccttggcacattttttggccgaaatctctcccgcagagaaacggcaacaagttcggcatacggtaagtatcgtaatgctcccccaacaatttattagaaattttaagttaattaattttttaattcctcgcaaatcagctcgaacaactccaaggaattgtctcggccgatgatcggcatgacaatggttggcactcggcacaattggcccattgttttgccaatgccaatttctcttctccgtcggttcgtcccgtcgatgacgtcatttgcgatgctctttatgtgagtaagttttttaattgcttatttttatgcttccctttgctaattaggtttttctgcacaaacacaacgcgccaagtcaatcggaagtggccaattggcgattgctcagcgcaacttcgtacgccttctgcgacgattcgctcaattcgctgcgaacaatggtcaaattaaagggcagcagcagaagggcatttctcagtcattgcttttcaaaatatttttggattggattttaattgggtaaatttttgatcaaaaaaaaaaaatccgtccgtccgtttatttctgatcactttttttctgctcattaaaaatgctctccgtcttcttcacagatcgacacgaagcgttgtgatcagaaattgtccaacgtggcgcccaccgccacaattttcctcggccttctcattttgggcgttggccgcacaatgccattttctctcggcctgccgctgatcgacgacaacgtgcgcaaaagcaatttgccgctttatttcggttggcttttctcccatttcttacaatcatttttgggttatgttttcagcgggaatgttttgcattcgaataatgggaccgatgctcggctttttgctcggctcctttttcaacaaaaattactacactttgggaaagggtgagttcgtgctgtgatgctgtgcttggctatatattttttatttgtctattttaattcaatttaattaattcggttttattttttaattttcccagtgccctacggaatgactccaagagatccgatgtggatcggcagatggtgggctggctttttgctgatcggctctgtgcttttgctcccttcgttggcactgtttttcttccgaaacccaaagcaaaaagcgtcggctggcgaagaaaatgaggacgaaggagggcatcgcccccggggattggcactagtggaccggcatttggaaaagggcgaagacggcgaagtcggaattggcattgacattacaaatttatccatggaatggcactcaggcaattgtgccgaagg

SEQ ID NO: 25435 - DNA, 1024 bp, Heterodera glycines
  unsure (1)..(1024): unsure at all n locations
caaaaataagagatagtcatttttcttgattataagataatttaaaaaattctctgtgaaataaaatggcgattgcgcaccgcacttcctatcatgctcgagagcatttgtaacgtataaaatttctcaaaataagagatagtcatttntctgngatataagataaatttaaaaattctctgagaaattaaatggcgattgcgcaccgccctccctctcacgctcgagcgcttttgtaacgtataaaatttctcaaaagaagagatagtcatttttcttggatataagataaatttaaaaattctctgtgaaattaaatggcgattgcgcaccgcacttcctatcatgctcgagagcatttgtaacgtataaaatttctcaaaataagagatagtcatttttcttggatataagataaatttaaaaattctctgagaaattaaatggcgattgcgcaccgccctccctctcacgctcgagcgcttttgtaacgtataaaatttctcaaaataagagatagtcatttttcttggatataagataaatttaaaaattctctgtgaaattaaatggcgattgcgcaccgcacttcctatcatgctcgagagcatttgtaacgtataaaatttctcaaaataagagatagtcatttttcttggatataagataaatttaaaaattctctgagaaattaaatggcgattgcgcaccgccctccctctcacgctcgagcgcttttgtaacgtataaaatttctcaaaataagagatagtcatttttcttggatataagataaatttaaaaattctctgtgaaattaaatggcgattgcgcaccgcacttcctatcatgctcgagagcatttgtaacgtataaaatttctcaaaataagagatagtcatttttcttggatataagataaatttaaaaattctctgagaaattaaatggcgattgcgcaccgccctccctctcacgctcgagcgcttttgtaacgtataaaatttctcaaaagaagagatag

SEQ ID NO: 25436 - DNA, 1345 bp, Heterodera glycines
agcgccaaaaattttattaatgccattattacctctttttccatgtttaggccgaacaaaatgccccaatattttctttctaaattatgtcatttcggtcagcagcgtcattagggcttaacgtggtaagccaaacaaacaaaaatttttttttgaatttctccgcctgattttcgccaaatttcagcgttacccctcctctctctgttccccctctctttccctccctctcccctctctccccagtcttccccgcttttccccaactctgtccaattgttcattcgctgtaataacacacatttacacattgcccatcatcagtcagtcagtcagcaaccgtagatgaccctcccccctcccctcccaactccgacaacaacaacaacttgaccgaccgaccgaccgaccgaccgaccgaccgactgactactgagtgaatgtctccccccccccaattcgcccccttttggggctgtgcttagtgcaaacactcgccaattcattcaatccattcgatgcctcatccatcaccaaatttgttcacatttcgttgctttcctgttccattgcacaaattcattcattcgcctcattctcccaaatccattaacaaacccaattagcctaattaggcttaattgttttggccaatcccattaagttggccttggttttctttctctttgcccagtgggcttctgtttcggtaagctcaaagtatctcgcacattgtgctgttgaactttgtcacaacactccgtccgtcctccgtttctccattctctgctaaaaatggcatttgcatttcccctccccccggcaaatcattgcgtcagtcattttccgctgctgctgactcccacaaacgctcatcagccaatccgatcgaaaaaacaacggccggggaaacaaattgggcggggcgggggggagaaggaatggaatgagtcaccgcccggcccaacgacggaacgacggactaacgacgacacattccgtcgttttttccatcgccgtcggtcggtcgtcccgccattggcccttttttcaatttgcattaaaaatgcgtccgatggatgcgatgccttagccgtgattaaagcactgaagtgaataatttctcttcatctctgctacttttttataagccccctttttgatcattttctaaattttccaaatgtttttgttcgtttaactctcagaattgcaaaacttatttaatggccagaaattatacttgaaaaaatcattgtaattttttgagctttgcgaaactctgaaactttaaaatctcaatctttgtgaaaattctcattatgcttgcccaaaatgatcaaat

SEQ ID NO: 25437 - DNA, 1146 bp, Heterodera glycines
  unsure (1)..(1146): unsure at all n locations
aaattcaaaacttaaatttcctctgaagttttaactgggctctaacctgcttttaagtcccaccgtgagggccggacagttccaaaanttgtaccacatttactgtgggaaagtccaagtaccttaaggactacagaagagccaattacagcagtcaccttggaccagttatgtaaaagaaataaggaaatatccgatggggtgcgatcctttcaaaaaattactctcgtcttctaccctccctctctttttgtgcactgtttcgttttaaaaattggttccgaaattttttgactctaagaaattaaattgtaaaaattcaaaacttaaaattctcctctgaagttttaaacttggctttaccctgcttttaagtcccaccgtgaggcgggacagttccaaaatttgtacaacattttactgtggaaagtccaagtaccttaaggactacagaagagccaattacagcagtcacctttggacagttatgtaaaagaaataaggaaatattcgatggggtgcgatcctttcaaaaaattactctcgtcttctaccctccctctctttttgtgcactgtttcgtttaaaaaattggttccgaaattttttgactctaagaaattaaattgtaaaaattcaaaacttaaattctcctctgaagttttaaacttggctctatcctgcttttaagtcccaccgtgaggcgggacagttccaaaatttgtaccacattttactgtggaaagtccaagtaccttaaggactacagaagagccaattacagcagtcacctttggacagttatgtaaaagaaataaggaaatattcgatggggtgcgatcctttcaaaaaattactctcgtcttctaccctccctctctttttgtgcactgtttcgtttaaaaaattggttccgaaattttttgactctaagaaattaaattgtaaaaattcaaaacttaaattctcctctgaagttttaaacttggctctatcctgcttttaagtcccaccgtgaggcgggacagttccaaaatttgtaccacattttactgtggaaagtacaagtaccttaattggacaattacttgtcaacgaacacagtcgcctctggcctcttatggaacagaaaagggtgaatatcag

SEQ ID NO: 25438 - DNA, 1545 bp, Heterodera glycines
tttttggtaattgggcagaagcgtaccaaactcttgctgggatactccccggtaatggactaacttacaccgaaacgagcgccgtgctagctcggctcaaaaaaattttcgaaaatctcgagtctttcgtttttctttattttttgcaaaattaattcttaaatcttttttcagaatgggttctcgaaacgcaccaaattttcatttacatcggttagtttcaggcacttctcgacgcttttttctcatcaaaaagggagatgaataaaatttttaaaaatttttaattcctttttaaacaggccaaaaagtttagggctttaacttttttttttcagaaaactgatcagaagcgcaccaaactttgcagggatactgaaaggaagagaaaataacctatttttaaatattatctagtcagttcatttaaataatttttaatccaaaaaatttttttttagggttttcggggcagtccccctggaaccgataggcgcccagaatttatcaggggatgaaccgaattcctttccgagaaatagctttcactctatagcctgtactttaattctgcgttggatttttgcttccccataattgtttgagtaccccaaacggacacttgaaaaaatcgatttttttgttttcggggcagtccccccgaaccgatgcgcccagatttatggggagaccgaatccttccggaatagcttccctatagcctgtactttaattctgcgttggatttttgctccccataattgtttgagtaccccaaacggacacttgaaaaaatcgatttttttgttttcggggcagtccccccgaaccgatgcgcccagatttatggggagaccgaatccttccggaatagcttccctatagcctgtactttaattctgcgttggatttttgctccccataattgtttgagtaccccaaacggacacttgaaaaaatcgatttttttgttttcggggcagtccccccgaaccgatgcgcccagatttatggggagaccgaatccttccggaatagcttccctatagcctgtactttaattctgcgttggatttttgctccccataattgtttgagtaccccaaacggacacttgaaaaaatcgatttatttttgttttcggggcagtccccccgaaccgatgcgcccagatttatggggagaccgaatccttcgggaatagcttccctatagcctgtactttaattctgcgttggatttttgctccccataattgtttgagtaccccaaacggacacttgaaaaaatcgatttttttgttttcggggcagtccccccgaaccgatgcgcccagatttatggggagaccgaatccttcgggaatagcttccctatagcctgtactttaattctgcgttggatttttgctccccataattgtttgagtaccccaaacggacacttgaaaaatcgatttatttttgttttcggggcagtccccccgaccgatgcgccccgatttatggggagaccgaatccttcgggaaaagtttccctaaagcc

SEQ ID NO: 25439 - DNA, 1385 bp, Heterodera glycines
  unsure (1)..(1385): unsure at all n locations
aaaagcgcattattttttcactacttcgacatttttttaaaatttctaaataaaaatgcaataaaaacgaaaaatacacccctaagaatcgtcttaaaaaatttcagaaaatacacccctaaaaatcgcgaaaaattttcaaaaatacactcctaaagaatgaaaatttttattttcaaattcattttcttggcaagaatttttaatttanaaaattatttttttaggtaactattttgggtttttgcccttaaaaatcccagtcctactcatttgcacctgcaactagtgaataaaaattatttttgctcaatttttggctaaaaattatgtcactatttcgcactttttgccactattttggcacatttcgtcactattttagttaactattttgagatttttcgtcactaaaagtcgcggccctacaaatcagtattaagataataaatgattttttaaatcagaaattcttgtcaagaaaataaataataaattttggagatgaatttttgagaaagtttttagtttcttagggatgcatttaaaattttcgggtcgattcttagggttaaatttttcgtttttattgcatttttggcttacatttcaggaaaaacgttaattttggctcaggcgccaaaagttataaaaaaaattgaccagaaatctgaaactggataaaatagaacaaattaattaaattgaagcctatacaagagctaaaatctttttttttttgtttttttagataccagcaaaaatccttacccattgtggccatttttgttctgagctaaaaagcgtactggtgcatttcgtaaaaccgtataattttaaacttttgttaaaaaacaatcaattgtttcatatagacaattacaaaagtatttgtcacaatcatagcgtttttgtcttttatttatgtagcacagatttttttttatattatataaatattagtttatctcataaataacaccaaataattaatttatcttttgtgattgtataatttattataaattatatttgattaatttaaatttatttacgtaaaattatgtaatgaatattttttataatgacgtcagtcatattttgatgttggaaaaaatgttaattgaataataatataaatgtaaaccaaaaattgtttacgtcaggcataatgtaaaataaaaaatgcttattctcataaaattgttaaatattttatctattaataatattttttatagtttttagaaaaaaatgaaattttcttacattttctcgctgggttttcgtttctggattttgcctttttctctatttgatgctttcgaccgatggaatgcgtaaatttgcaacaataaaacacaaatttaaataatatttaatta

SEQ ID NO: 25440 - DNA, 1175 bp, Heterodera glycines
  unsure (1)..(1175): unsure at all n locations
cagaataattacgccgatactaattgttctggaatttgtttctcggcgcgtttgtttgggaaaaatntggaaaattggctatctcattttctgctcaacagtaataggaattccaaccgcattctcagaataattacgccgatactaattgttctggaatttgtttctctgcgcgtttgtttgggaaaaatttggaaaattggctatctctttttttgctcaacagtaataggaattccaaccgcattctcagaataattacgccgatactaattgttctggaatttgtttctcggcgcgtttgttttggaaaaatttggaaaattggctatctctttttctgctcaacagtaataggaattccaaccgcattctcagaataattacgccgatactaattgttctggaatttgtttctcggcgcgtttgtttgggaaaaatttggaaaattggctatctctttttctgctcaacagtaataggaattccaaccgcattctcagaataattacgccgatactaattgttctggaatttgtttctcggcgcgtttgtttgggaaaaatttggaaaattggctatctctttttctgctcaacagtaataggaattccaaccgcattctcagaataattacgccgatactaattgttctggaatttgtttctcggcgcgtttgtttgggaaaaatttggaaaattggctatctctttttctgctcaacagtaataggaattccaaccgcattctcagaataattacgccgatactaattgttctggaatttgtttctctgcgcgtttgtttgggaaaaatttggaaaattggctatctctttttctgctcaacagtaataggaattccaaccgcattctcagaataattacgccgatactaattgttctggaatttgtttctcggcgcgtttgtttgggaaaaatttggaaaattggatatctcattttctgctcaacagtaataggaattccaaccgcattctcagaataattacgccgatactaattgttctggaatttgtttctcggcgcgtttgtttgggaaaaatttggaaaattggatatctctttttctgctcaacagtaataggaattccaaccgcattctcagaataattacgccgatactaattgttctggaatttgtttctctgcgcg

SEQ ID NO: 25441 - DNA, 1480 bp, Heterodera glycines
ttgcctccagatcagatgaaaatgttcgacaattgagttcatccgcaactgatcgtggtgcaacagtcaaactggcgccagtgtccattaagcagcggacgggtgtggaattaatcaatgtctgtaccacggcgtgatgcggcgaaatcgcattcagatttgggagcattggaaggtctgaattccgttttgagcagagcagtactgaaatagtgataaaaatcagaaatggaatgataagcagataaatcattgatggagaagtgaattgaattgaaatttggttattcacatcggggtttgcaaaagcattgggaagacaaactactaaaaacccaatgagtacttttggcgcccgaaaactgaagcgagccctttttaccggtctctttcgttttcctgcaattttgtatgcctgggtttgggcgggttcaatgagcttaacgggactgagttcaatttcgttaccaaattctacagatgcattcagatccatcatattgaggcgtgctggagatttcacaattttctgcgttttgtttccaccaaaagtcatgcgtcgtgttgttcctctgccaacgtattcgtctctaatcattaatccaaaccggatcaaaaagtctgtaaaaacaatgattatcattattgacaggacaattttgccaatttgttcccagttcccaatcattttgctgcgaatggactcactcacctgctcccattgctcggacaaagtctttgtgactatagcgtcctcacttttgatttggaatgtgagttcgctttctcttgccaaattggcgtcgtaaaattggccaataaagtcagacacattcacaagggcaaggtggagaaaggaatggcgagcataagtcggtgccaatgacagattcaggctaaaaccttcaatgcgattggcatttacctgctttacttgagcatcgatttgatcaatttcgtaaagcgaaccgcgcacaaaaatgagttgtttgcggtattgtgagcatggtgccagtctcgcatcggagctcaaaatcattgtccttgggtcaataaatgccattcttttgttgtccttcactcggaatttaattggaattttgtcaatgcattcgaattcggagtccgctgagtttccaattttggcaaattcgtaatcgtgtgcttgcaattcgatgcatggccacactttaatcaattcaggcccagccactcttgccaccagtttaccagattggaataattttctggcaaaagttgttggatctgagagaagtgccgtcgctgcccatcttctcgtctccaacatataatcacaaatcgatttaattgtctgagaaaaggaaagagtcagcatttctcttacttgttcatccaaatagcccaatttggagttcattagcgattcggtgacccaactttcaagtgatctcgtcttagagatctctttgaggattcgttgctatcgtcggaaggcaag

SEQ ID NO: 25442 - DNA, 1104 bp, Heterodera glycines
ttattttgagcttcacccattattgattattactgatcatcacttattctttacactatttgtccatttgctgaacaaaaatcagaggaacataaaaaacagtaaaaagtactaaattcggatggaattcgtttcggtgtgtaatttttaaattaaattcccataaatttgcgttggtttttggccctgaaatatttttgcgattattccccttgatcagtaaataaaacacttcttattgatcagtggtggcatatgaatgggggctatcaattaattaattgttgtaaagtgaaattatcaaaattatcacaaattgggagcacgagggccattcacttggtaattgacgacgaaatcttcgccatttcgaaggatgtttagcgtaatgaccccgcaattggtccccccgctgctgcccctgccaatctcccttatcagtcactcactttacataaggcccccctccccctgcaaattgctgaattttctgccttttgcccttaggggctctttttgtgtccgtacaatttatttctcgtgcaattcattccttttccacctctccggccacccctcaccacaataagatttattttttattttttttgtgctccgttccgtttgttccgtcgtcaccctttcccctcccctccctctcctctccgtcccctcttcccgtgtcgatcatttttgataattattcgcctctcctccgctgacggttagcaaaatgattgaggaagtacactaccgccacgccgacgactccccaaacagtggcggcgcatcggaggcggccaaagtgccgaaccatccgccgccggtgccgtcctcaaatgactcgccgtccgcctcctcaacggcgtccttcactttcgtggcggacccttttttggtgttggacaacgatttggacgacgtgagcggtaagcacaaacaaaattggatgaagccaagcaaattgtttgttagaagtgatcaagcacaacataatgaccgatcagtcgagcggagcatcaacgccgtcgaacagtcggtcaatcaaaagcggcggcggcgacaaagcggcggcagaaaaacggtggacgataaatcaaacag

SEQ ID NO: 25443 - DNA, 1551 bp, Heterodera glycines
cttgatgccgtttttgttgtcgccgttggctctgccgattgtttttccattacaaagtgtcgctgctgtgccgttgttgtcgtggtcgtgtacagctgcagctccatgtgcagtgccttcatctccctgcccacaatgtgttggccgtcctcgcacgggtcgtagtccgggtccatccgtctgtacaagtcgtaccgctcctcctcgtcgatggcgccgttgttcaacaaacacgtcaaatggagcagaaaatgggtgcgcaaatggcggctgtcaatgtcatgccaatggtatttgacgaagacgcgctgaacaaagagggaaatttatatggactgctttgtgctttgtatgtcctaccaaagttctgtaaagcatccgacgcccgaacagagtgattcgaatgcgaagaaggaaagtgttccacatttgcatcattgcgcattcggccgggtgaaggtcgctgatgtcattgagcttcttgaaaatgaatttttcttcatttcccagtattttttgtgagtctaataaaattaaaaatacacatcatattttttaattgactaattgtaaggtaaactattgaattaaattgtcaaaaggttccgaaatgcaccggcggagaaaatttttgcaattttaagtagagaccgttaaaaaaacttgggagtgggactcccgccagtctctctctaaatgtaacgaaatatgttaatttttaatttcccataggttaagggcctatcgggggagggtaaaaaataacgtttcccaaaaattcaaaaggttctccatgcccgcctcttcccctccctcactctgatgctcatctgtcgcatccacagtttgtcaatgcgtgtcggcgtctcaaaattgaagcgccccttcagccgaatgtattcctccgccgtgctctgtttggtggccaacgccgtgtaccgttcaatgggaaaattgtccactcggcgcatttctctggccaacgccctgagacgaaaagtgttttatttgttagtgccgtggccattgtttcctcacttagtgaccagccaagtcggacgcacggcagtccgaacggacggaagctcattggacgcgtcgtatttggtgttttgagagatggaaaagccgggcaaacactgagtgggcgacacggggacggatggctaggacgagaaattggaaaagttcagaatatggaacaaaaaaaggacctcatagcaaaactcaaagcgcgggtggcagaacgtgagatgtttgtgcagggcccacaaactgcgcactttcagcgatgccaaacagaagaaacaacgcgaggagggaaaacgacgacaaacgaacggaggagagacgacggaggaggagggagaggaagcgaagggggaagagagaggagaaaaagcggacagaggggagaggacggagtcggaggacgaccgtttggaggaggagcacgaagctgacaaaagggagaagcgaggagtacaccagcagcagtcagtcataatttaaagaaacatcgagaaatggactccctccccttttggcaca

SEQ ID NO: 25444 - DNA, 1611 bp, Heterodera glycines
gcctttcgctgttttttccttagcagaaagagaatacacaaagagagacgggggcaaagaagacatacaaaaagagaaatagaacgaaaattttctcggtgtcccacctctattgtgactcagcataaaattgttttactctttttccaaatattctcccatttccattggttcttatccctggtccctttgtattcggacgatgaaatctttcgccttttactaaaggtttccgtgcagggggacgcttatgggttaaacccaatttttggacagcgccttctccagggagggtgcgaaaaatttctaatatattttaaaatgtctctccaaaaattggtctaatgaaacagcgaaaacgccttacgcaattgaaaaagtcaattaaaactttttgaataaatttggcaatgtaagggggaagctggctgggcggttaaaactcggaaattgtgggttgataagacgcataaaaaagaaagggcaaatgtgcctcggtagctcaatgcgtactcgtggttttatcaccctttgaataatttttcaatagttttttctaacctctggtcacgaatctgactttatttttagttatcatgtgttttattcggtgcctgacttttgacagctgtatgtatttaacatttaatgctgataaattcgatggaatttggaaaatatatcagattatattttaaaatttggaatttcattaaaaatcttagattcatggtctgcgtcaaaattaggctaaaaattagttccaaacccggaagtcccgcacaatggtagagctgccattttctcctcgatgagggtgttgcctcggacatttttttcaaatttctccagccatcccttgacaaattttgttggggaatttcttccccgatttttctctccccgagggtcgggggaaaaccccaaattttaatgcattcatattttatttaaacattttttatgagtaatgcttatgttataattaaaaatcaatttatttttgctgtaaaactgcttatcaatcgtttgtctgatcattcttttgttttctccactttctgatcaccagtaacctccaataaaaaatgatgtaaaattttaattcgaaaggtcaaaattaacctcctacatactgtgaccagcagaacccgcaaaattgtctaacaaattcaaagtttcaattgagggatcgattccctaaataaaatttaaaatacatttttgttttgttttttccatttattattttaccacattctgttgctgattttgatcactttgattaccaacaaaatttgccaataaatcctttgttgttttcacctcatctaaatggtcccgttttgcacttgtttctgcttcatttgaatcaatactaatttcgctttcttaataattaaaataaataaatttattcaaaggtgattagaaatttatcactttttggctttaagtctccttttttaagacaatgacattttaaatttgttgggccattgttgataattaacaaatcataatttatttcattttgcccattcgcttttggtttaggacattttctataggtataaatttcagcctaaaataattaatattcaattaaaa

SEQ ID NO: 25445 - DNA, 1810 bp, Heterodera glycines
atccgcaattattataattttaaaatgggttaataaatttttattcgaattctcattttagtggctccatggcaaagttaatttgagggcttgtactttaccaaatgaaattgaaaataaggcttgtttaaaagccttatcttccaaacgaaattaaaaataaggtttatataaaagcgttggcactccttgaaaaaatggacgatcgtttggtggaagaaacaaacaacgaatttcccaaaactgaatacaacgagtggaaatcaagtggagttttaatttgatcatttgtcaaaaaagatttattcaaaatttagattttctttaccagctgaccgaattaccttacttgtatgcaattcaacacatggtcaaaattgaaaagggttagaaaattaaaaaaaagcaaaaatgtttatttttaataaaatttttttttgtttaaatgaaaacgaaaggttttataacattcatttaggcctatcagattcgggtaccctaaacttctcattggtgtacactgttgccgatttgtcgcagcaattggtccaagcaattgggtccattgtgcataaaggattgtatttgacgcattctcggaaaaaaagggaaaagcctttcaagtaagaaaaaaaatggaccccttgaagagtcgtggctagagacaggcatggttaattattcggtctctaatttaggttgttttaccgaaaaacagaccaaaaatttggaataatttaatgttaaattctgaaaatttgtaaatttggcgattttactgcaataaatcttgcagagataaataacattgaataatatttaatattttaattaattctttcggcaaaaaatatcataaaatttcattttttatagtgttttgatttaatcaggtgaaaaaactaaaaattggattaaaagaaaaatgagtttatttttgggggggtggttcatattttttaccgaaacatttgaaaatagctgtaatttagatgcattctgaagagcataacaatggcatatgcgagattgcgaacaccgcttctcgaaataagcaacatgatcatcgctgatgtcaccaaacttgtaggttctaaatgaaataatcagcccctaataataatctgaaaattaatttgttttattaaataataatttttttaaaattaaggatttcattggaacaatttgctcaggaatcctttcaaaagggaacactcttgctttggaatctgacatggtaaaatatgatcaattgtcgaagggcatcaccgaatccacgcatttgtggtggaagaccgaatcttgtcagtgtgttatggtatgctttgtggcatttatctagggatgggtacggtgttaggatgttagtcaagatccatcacacccatttgtcaaaaaaaacattgtatgttatagatttactcaagaaagccgaattttaaatcttgatatcattagacagccctaattgttttatattatcctgcaaaatttcaaaaagttcgtcaagtttcaagaaagttaagacgacaattaaaaaaaaatcttccttttttgagtttctcagatcataatttttttgaatatttggataatttttttaaaattttgcaggatagcagaaaacacttaggactagtgaatgataatgatatattaaaatagtttaagcgaagttctgatattctagtgtcaaaatttttcatttgatgttttttggtgaacgcccactctgatggatttgtctatctccccagcatcaatgggtctctgacaatagagaaggatggtattttcaggattcagc

SEQ ID NO: 25446 - DNA, 831 bp, Heterodera glycines
tttttgggaaattttctcagccattcttaggggtatatttttcttacatttttgttaagaattttttttgaaaatcctgaaaataggcgccaaaaaccacgaaatagacaaaattaggcattataagtcatcgtagacaccccaaccaagctgaaaaagcgtttttcgtgctgataagccatttgcctaaaattgcattccctaggtttgggtaagacaggtgttttttgcaaaattgttcattcaattttaatggaatttatttatgtcattgtattttatgtttttttttgaatatcgattttccaaaatattagtatatttaataagtgatttatagggattgtttttttatgtaagaaaatcgcaaaatatgtaaataaaatatatatataaaatgctaaaatatgtaagaaatatgtacaaaaaacccaaaatatgtaccaaatatgtaaataaaatgttttttaatggttattttttttgcaaaaaattcctagtaaagggtgaagaaggcacaaaatgtcttaaaaattacctaaattggcttaaaatcaattcttattatttaaaaattatttttgatatctcattttttgaaaaaaaaagttttttaggaatacattttcaaaattttttttttatttttcacaaaaaattttcaattaattctcaaaaatcctcataatatgcaaaaaatgaaaatatgtacgaaaaaatgaaaatatgtacgaaaaagtccaaaatatgtataaaaatatgtacatatgtaatatgtagaaaaatccgaaaatatgcaaaaatatgtaaataaaagtcccaacttttgtt

SEQ ID NO: 25447 - DNA, 1158 bp, Heterodera glycines
  unsure (1)..(1158): unsure at all n locations
aatggatcaaatggcaattcatacacacaggcaaaagtcaaacattttaaaaaaattatcttntaatttcaaaaacgaatttttttaaaagtaaaattgggcaaattcaaacagtntaaaaactgaaaaaaaaatttttttttntaattttgatggtaattttctcttaaaaaataatttagaagatttttattaacaaaaaaaattgtacgagttgcctttgtatggaaatgtcatgacatcaaggaaattggaaatactagcatgactataatctcaaaaaccggtcgtcctcctaatttatgctcaggggatctctttggattcatttttgtcctcattcggcagttcgtcctccgccttcaattcttcgctatcaatttcattaccaccttcgaacattgtaaaatatttacgatgcccgccaatattgccaccattcttggtacggcatttaacatcattcattttttgaaggtggtcaactgcagacgattggtgcagcagcagctcattggattcgcgaaaaagcggatgggctggcgaattggtgttgctcaaagtacgcgctcgaattgcgtccaacgcattgctaaatgacatacgtctctgaagtattattattatttttttaatttttccttaaaaattaaatttttaatccttttaaatgctcatcacggtgtccttgaaaatatgtcttactttttcaagctacatgggcccttgaaatctcatacaattgttttcgttgttagcataaattgtacaaagtgatgcattttgttccagttcagggaacaccagtgctttttgggtccagaaatctaggttccgtattctgtgaatttttaagaaactgaaatccaagcagaaatttttttgggggcatccaattaccccctcatgttatacgcttctaaagtaagggaaaaagtttcggggaatccggcatggcattgttcggagaatgcttctaaattacttgctgagttagtgggtcatgttgttgttgtaaattttccgcctttgtctggttcttgaaactgtcttttttctccaacttgtgtaacttttttgcagctgctttacctcttccaacatatttgcgcagataaattggtttagttagcactaaaaaatgcttctcaaaaaaca

SEQ ID NO: 25448 - DNA, 2681 bp, Heterodera glycines
ttttgctcatcttaaagatctcttgtcccaaactctctataaaccaataaattgcgcctaacaattctttatttcaactttggaaaatatttattaaataatataacttcaaccattatgatttttacataatttgttgaatatttgtataatttttaatatttcaatctcgaaaccaatgatttataatattataatattaattacattatattccattaaatatttctcttacaaaaagttttactcttatataatttttcttttcaaagttttttcttggcactgcatccaatcatatatatatatatccatgctttgtaatgaaataaaattattataatatttaaaagttttttgttgggtcaaatttaactcctcgccaaaaactgagaatgtcgaaaatctccatccgccttgtgatttaatttggacccaaacaaaataaaatactgaatcatgtattatacgtccttttatattgtatattattaatttggtttttttttcttttcaaaaggtctaaaatgcatgatagtattttaattttttttataattatcttggtttttcttatttttaaataatattatttgaagccaaaaatgcatgcacacaaatatttttttgacaagcttttgggtgcatatgcaaaaccattttttacaatttttaaatcattgacaagaaatatcagccttttgtgcgtataattaattaatatttaaagcgttttcacacagcaaaaattacattaaatgacagttttaaaaagtaaacatttagtttggctcaatacgattatattattttatttcgctttatttataaaacaattacaatattaagttggtaataatattttcatttgataaaactaaagtaatttgaaatctgaaatttttacattgtccttttgttcgatattgtttttaagtgttcataattacttataattgcgttatttgtaaagaaattgtaaataataatttttattaatattatttttcgatattcctattttaagaataattgcttatattaggattatttagcaattttataaacatttatttaaatattattacatacatcttatgttatgaattaaaataaaattttaaaaatattttaaataaatttatgatatatttttctttttaaaaccttcatttaatattttttgtaatttgtgctgtgtaaaaacgcttacaattcttgttttcctgccgtttctctggcacattgtcaactagcattttcgacgcttttttggtttaccggccgattcaccgcgttcacattcctccaatttttaggtgcttcgatttctttcgcctccacaattgttgcctgaaatttatcaggtcttccacgaccccatcgtaagtaatattcgttccgtctgctgaaagcttcgccaaaatactttgacgaaatgccgaatcgctgtacgacttcaatgccgttaacagcatcaaacagttgaattgttctttattcaattccctgaatttaaaatcggcgagcaattttcggtgcctgttgatgaaactcctaaagaattttatacagaaataactaaattattgtcaattggtttaatctaatattaattattttattagtacaaataattaattaattagttaaaattattacaatttttttttcatttgcaaatgtaaatattattttagctttttcatttgctggaacgaaaaatttaaattttagactttttcactaggtcatggataaatcgcataagcaggtcgtgtaaatacaaaagtagttctttgcaaatgaaaagatttatttgatttttcaattatgtaattttggacataatctgtttaatatttatcaaaccaattaaacattttatttcttatctcatgagtatatttttattttctttccgattcattaattttttattgtacattaaatgtaagtaattctttatattctgttctatctttttgaaataaattaaaagttttaaaatttcctttctaaaattaaattttatttaacttattaattttaataatttttttaagttgtaggtgcgattagttttagaaaaatttacgtccaaacatttgtataacagattgatacagaaaagtttagtttttttgtcagcttcatttaatattttaaaagtactaatattaattattttattagtaaaataattcatctatttattaaaaattactaaaaaatattctttttttgattttgcaaaatataaatatattttggtttttttttgttgctattttaatagtttcaaaagtgcaaggaccaggatttcaaggaacaataatagaaaaattttctaatttcaatatttttgtctgaaaattagtaaaattttgctattcttcagggtctaattatgcatttagatttcttaaatttaatatcaatattcaattttttatttatttaagttttaaaattctcttgcctggaattcaaaagattgttcttttaatactagttgttgtcggtaatctagcacatattctttatgatctctagaaaattacaattatttaaatgtttattataaatttatatgaattaataaaaaccggattgttgaaactttttagaaaattttgatgattctttttttaatcatttcatttattttatttagatat

SEQ ID NO: 25449 - DNA, 1111 bp, Heterodera glycines
tttttcaattttttttaccaccctccaaaaaatccaattcgcaatataaagtgcatattcgtgttcagcacctcaaattaccctagaaaagtattttttggcaattttaagagcaaaaaaatttctcatgaaatgcaaatccatggggtcccccctttggttttgcatttaaaaattcatttttgttttataactttttttatattaaagataaaaagaccaaataaagcacataagacagagcttaaaattctctacaaaaatggtctgagaagattttttgctaagatcaacgcctgacgagttataagcctcaaacggaaatggggagctcaattccggaaaatttttctatttccggaaaattttgaaattttttcaaaaatgccaccaatcgatagagctcgaaaaacggttgcttgaaagtggtctccgttttcctgggaaaaatcggcaaaaaataataaaattcaaaaacgaaaaattttcgagggggcctagctcgaaaaattttgaaaattttcaaaatctgaaaacgccatcggatgcagctttaaaaactacacaaatgctcaagcggcgccaacccgctccgcttaacccccagcgagttattcgcgaaattcgaaaaatgccaaaaatggttttcaaattttgccaaagtgtacaggctaggcttttgcagctaggcatgccaaataagcgccaaattatcaattaatgatgaatgaatgaaagaggaagggaggggaagagaggaggggaaaagagtggtgagaaagtgaagagaagagaagggaatgagaagaaagcaaattaatgatgaatgaatgaaagaggaggagaagggaggaggggaaaagagtggagagaaagggaagagaggaagggaatgagaagaaagcaaaaactgtgatggctgaaacgataattgaatcgccataggtgtttgataattgttacaattagggtagcacgagaccgagaccggtaccaaaaaaaccggtaattaccgattagtaccggttaccggtatcggttgaaaacctaagtaccggtaccggtctcgggttttccagtaccggctagtatcggtaccggttttcgtcaa

SEQ ID NO: 25450 - DNA, 1583 bp, Heterodera glycines
  unsure (1)..(1583): unsure at all n locations
attataaggcaatttccatgtgngcatattgctctcgaccaaatcatttgaaatgtgatttttcaagttaaaagacntaaataatgatntaaaaatttatggtaataaaaaaacacccccgccccctcgccctgccgggggtgcaattccaacgccttaattttcgaaattgtattccgatttaaagttattttttaaaattaaattattgaaacgcaattcaaatgttgaatttataaaacagaaatttctagaattcaaaataatatttgtaaaaagataagtgaaattggtaagattaatttaaactttattaaaatagctatagctaaaataaacaatttgatgctataagcaagattagtcaaatgcaattttgaatgttcaaatttaatatactatcaaagggaatttctgatcctaccgtatcatttttattgttatatttttacctatggatttcaaaaccatttctgtaagcaaatataaatgccttcaaataattgccaataatttgctcattttgttcaatttgtacacacacaaacggattgccaatgagaaaagcaattccaaaaaactgaattttttcttgcaaaattgaattttggtgttgctcaaactcatggagcttcaatctatggtcaacagacacaatgttttgtagtgttttcacaaaacacagttcttcaccaaggagaaaaggcaagtttttttgcttcactaaaatttaaaatttaacaaaactcgcttaattttttgaaattcaatttgttcatttattcttttttgatactgaatatattgcagttgaattatgtaaaaattatccttatcttttttattttatttggattttcattcattaaatcttaagtaaaattatttaaaacttttgttggcgaaactccatgagtaaaaccttatttaaattaacaaattgggctttcaatttacaaaattttattgtatttggctttttaagaataatagtaggacacttcatttattaattaattaattagttttaattcttgtcatcgtatttagccgagtcggtgttttggtcgagagtctcgaacaatatttgtccaaaagtttcaatgggccaatcattgtaaagttccgaattgctttttccatgagtcattgtggtgataatccataatcagttgccgtaaaatggctataagctcatttaaagaagccattttctcctccgatggcatttcttttgcaaattatacaaaagcaattctaatcgttcataattttcagtgtcaccaattttttaatgatttttttcaaaattttatactcattcagttgtgtaatgtttgtgattaaatttttctaatcatttttgaccatatcaacttttgtacataatgaatgcatcagcaaatcctaacacgcctaaaaaggaaaaaagttatgatttaattaataaacattaattaggcaatcaattaattttacttttgcatttgttttcatcaattttaattgctctagcataattccacaacggttcattgaataagtgcaactctaattgtttgcatctgaaaatagttaagtat

SEQ ID NO: 25451 - DNA, 1612 bp, Heterodera glycines
gcattaaaaacggttcaacatttaaccagttaggcatcatataatacaaacaataacaaaaaatcacacaatggctttatgccttcaaattcacaattcatttttggcactaagcccttggcacatagtcattttaagcacacagcgttacctgccattttcgcttgacactagaagcacacagcttcgactagtccatggcttacgctcatttcacccattaattatctcttttctgggagcacacagcttcgaccagtctcgtggcacacagccacaacggcactcagcccagctaggagcacacagctgcgactagcttttatcttttcatgctcaaaaccgttgcacttatcctttcgaaaacagccaaaatcacgaaaattaacatattatcacattaaaacacaccgcattgatcaatcaatgaccacaaaatatgccataaggtttttgtattaccgtactcagccatattagccacagaaaatttgccaaatttcttttgcaagacaatgcatttttgttggctcatttacgttttactgaaaaatagcaatttcccattgctttagtcctttttttttgttgccaaaacgtactttaatttactcttcctatctccaacaaggaattaaaatttaaccagattaaaactgcttttgggtctgcgtccctttttaagtctgcattgttcaaattagcctttaatggcctcagacactttttgtctggaatgctctggaattttaattctctctctctctgtttaacaaaaaaattttacacaacgggtcgtggcaccaaaaaggtgttgtgtccccgggtttaaggcttcaagccatttcaaattactacttttaggagagaggaatttattataaggaaaagcattgacaaataattatgaattgaaaaccgggaatatgtttgggtcaacaacaacctcagagcattttgggtgggtcagtgcaattggttatttgggaaaggattgccaaaggcaaggaacggcacagactgacccaccgcagacatctcgcagcccccaagggggaaattgggaggacttatatactgacacaatggggatggactttggataggatgaggggtatgacggcaaaacacaaaagggaataagagaaatggatggcatatgcaacagaggtgaataggaagaaatggcaagataacattggaaatgagagggataggattggcttgggataggatgaacagatggataagtttacgacgggattggtcgggagaaagtagggcaatgtacattatgcacaaaatatgaaattttgaatgctgcggatacagcatttctctcctcctcgaaaaaaagcctcctggcttttgcctcatcacttctgatcacgtccatcgttctgatcagccttcgggcgcccattgatggtcaaacattgatgaacatgatcattcgctgtcgatcagttgaacatctgacaacgctcccatttgcttcattcaatcatgtcattttctcttgacacccatatctcgggttatttcactttaatggcaaatttcgcttttcctttctttataacagtctccggttttaatttcatattcattt

SEQ ID NO: 25452 - DNA, 1918 bp, Heterodera glycines
tttttacaaggcgaatcgtgaccatttttcagcattggctgcttacccgaattccgggaaattgttcttagaatacatcaatcgactttgtgcatagtagtgatacagacattttataagaaagaaaatattttaaaagtatatttttcaatttatttaggataattgctcgcataaattattgattttcatatttataagggaaaattcgttctttcctatagtatgcaattaaatgataaaagcctaacacaggcttgagtgtagcgatacaaaactgcgtgcaatggcttaggctaggcctaaactttaggcttgcatgggcctagatcttggcttattttattttgtaaaatttttattgtgtaacttagtgtccatctgccgaactgtcccatcagctaagtgtctggcagctaaatggtcctcagctgactagtcccgaagccgttggatcaaattcttagtactttattcaacaatttagcatcatcggcgcctctaaaaaaccacagaatgaagcgaaaacttcacatattctggcagccattgcttattagcacaaaaatccaccaaatcgatggcataagaattgagacaaaaattgttgctacaagaataaatattattgaaaattgttttcttcatgaataaaaattgctttatttataacacttgttaattctaataaagagatttttgttagagaaaataaatttttattggttgcgcaaaaatcgtaaattaataaataaaaattttcttcctgtagctttgttgcgctgagaaaagtaaaaataaccccttaggactgagcattattgaaatatttacaaatttgaaaattttctaaaaattgatccactaaacgttatattcttgtccaaaatttgtaattattaatttaattacagcaaataccagttccttataatttctcgaatagtgatcagaagcgcatcaaatacagggacagggtatcagctgagaacaatacttatttcaatgagtcacagagttttcttaaaaaatttttgagttttcctatgtttttataccacttttaattatgcctatttttaggcttttaaatttatattttatgcgctaaaacaaaattacattttatataaataatttttttccacaatttcttacaaaaagttaaaaaattttcgtttttaagggtgtattttttaaaaattaccaaaaaagtcgatccttaagggtgtatttttcgctttttttttgcatttttcttgtgaaatttgtcaaaaatggcaaaatatgcatttattctcgaaaccccaaaatatgcttttatatgcactaaaaaccttcactaaatcaaaaattttaacgtagaattgctatttttgagcgcctttcttcatagcatatgcgcagaaaaatatgcaaaatcatacacaacttcgaaccctaattattataaatccaacaaagaaatattttttttttgcaaaaaattaagatgccaacaaaacatttattacggataccaattgattattcacattcaaatatttgctatccttttttacgtcagtcaatgttatgacggaaaattgggaagctatgtgatgtcactaaacgattattataaagcttttttgtggcaaaaaatgattctagccatccattatcaatggaaatcaattaaataataaattaattcattttaaagaaaattatctttttattactaatgttttttttaatttttaaatattcatccaattataaaattgcaagaattttgagaaaatgattttaattatcttaatttttaaaatatttgcttttgccaatggccaaccatcaccagcagagcaacacataagttaataaaaaaatttaaattttaatacctaactaataaaataggaatatgattttt

SEQ ID NO: 25453 - DNA, 1321 bp, Heterodera glycines
tcttggacaaaaagggttatctcttttttctcatttttttaccgcaaaattgataccaacagttgccttctcttgtctggccctatcaaacaatcttacgatatttgaaacgcaaacaaaaaaaattcttgaccaaaaaatggttatctctttttctcatttttttaccgcaaaattggtaccaacagttgccttctcttgtctggccctatcaaacaatcttacgatatttgaaacgcaaacaaaaaaaattcttgaccaaaaatggttatctcttttttctcatttttttaccgcaaaattggtaccaacagttgccttctcttgtctggccctatcaaacaatcttacgatatttgaaacgcaaacaaaaaaaattcttgaccaaaaaatggctatctcttttttctcatttttttaccgcaaacttggtaccaacagttgccttctcttgtctggccctatcaaacaatcttacgatatttgaaacgcaaacaaaaaaaattcttgaccaaaaaatggttatctcttttttctcatttttttaccgcaaaattggtaccaacagttgccttctcttgtctggccctatcaaacaatcttacgatatttgaaacgcaaacaaaaaaaattcttgaccaaaaatggttatctcttttttctcatttttttaccgcaaaattggtaccaacatttgccttctcttgtctggccctatcaaacaatcttacgatatttgaaacgcaacaaaaaaaattcttgaccaaaaatggttatctcttttttctcatttttttaccgcaaacttggtaccaacagttgccttctcttgtctggccctatcaaacaatcttacgatatttgaaacgcaaacaaaaaaaattcttgaccaaaaatggctatctcttttttatcatttttttaccgcaaacttggtaccaacagttgccttcttttgtctggccctatcaatcaatcttacgatatttgaaacgcaaacaaaaaaaattgcttgaccaaaaaatgtctatctcttttttgtcatttttttaccgcaaaattggtatcaacacttacaaaataagggcacacaaattgtttcgatatttaatagttattgacacgaacacttataaataataaacaatggaaatcgtctgaaataaatttgtttaacggtaaataaaataaatgtaatgttttaaagaatcattacgtttatgctttgcataattttcgaatgcttgaaataaatcgaaagcgacagagagagagagagaaagggggcaaaatagagaggggatgggtgagggaaagaaaa

SEQ ID NO: 25454 - DNA, 1061 bp, Heterodera glycines
gtcagaggcatcattccacaacaacgccaagggttcgcccttcggtatccgaattcgtcaataataaagccgtgccatctccatccgcacgagttaaagcgcaggccaaaagaaaaagagccaatcgaaacatccgccatagcacttcgaagaaacggagagaaaacgacggctcgacagcttttcgccgacgaacggagagaaaacgacagctcggcagcttttcgccgacgaacggagagaaaacgacggctcggcagctttttcgccggcaaacggagagaaaaacgacggctcggcagcttttttcgccggcaaacggagagataaatgacggcttttttgactcacgaaaagagagaaaaaatcaaagctcaactttcgcccgtttttcgaacggagaaaaaatgggttttcttcgagctggtagttggattttagtgcaattaaatgtttaaaggtttttaaagaaaaatcgattgggacgcatcaaaaatttttattgggacgcataaaagtcgaataggacgcataaaaatttgattggacgcataaaagtcgattggacgcataaaagtcgattggacgcataaaaatttgattggacgcataaaagtcgattggacgcataaaagtcgattggacattggacgcataaaaatttgattggacgcataaaagtcgattggacgcataaaagtcgattggacgcataaaaatttgattggacgcataaaagtcgattggacgcataaaagtcgattggacgcataaaagtcgattggacgcataaaaatttgattggacgcataaaagtcgattggacgcataaaaatttgattggacgcataaaagtcgattggacgcataaaagtcgattggacgcataaaaatttgattggacgcataaaagtcgattggacgcataaaagtcgattggacgcataaaaatttgattggacgcataaaagtcgattggacgcataaaagtcgattggacgcataaaaagctattggacgcataaaagtctattggacacataaaagtcgattggacgcat

SEQ ID NO: 25455 - DNA, 1057 bp, Heterodera glycines
aaaaaaaaggtcatcaaaaaaaatcggcggccgacccccttcacaaaaattttggccgacccacccccctttttaatgtatgatcttgttctaacctgctttggaaacaagacgcgcaccgatcaattctccaagcaaaactgtgagatttggcgcaagtgcattcattcggttcttcaaataatcgtgtaattgtgcgcgatattgtgccaattctacgatctggtcacacagctcgacaatgtgtatcaaatccagctcggaaatgtccgttcccatgctgatttcggcctcctgtcgcactttttcggccaattcttcgggcaaaatggcgcttaaatcggcgttttgcgcattcgctttcattccaattgctttcacgcactgaagaaacaatgtttaatgaacttaattttaaacaatgtattaattccccattaccttcgcatacgcttgagcatccgcaattagctttcccagctccggaaaatgccacccataccattcacgacaacgcatcacataattgttcaattctttgtccaaatcatccaaaagagaaacagccttaaaaaagaaattataaaaccacaaagtgcgccgcctctcttcacctggacgatcatcgtgtcaattttctcggggttaaatttcactttgtaacggccgatggaatgggcgacacccaatcgcatcgcattcatttcatgtgctgtttcttcgcccaagaaactgctgacatttgcacggattgagcgcatcaattcggaaactgcgctattgtgtaagcatttgatatccaacgaattctaaagggaaagcacattttaatgaccacgggtttgtgtcatttaaatgttaaaaacattgccataccttaatgattttgccaatttgtgtgtcgtccaccgccaatttctcagtttgatcgatgatgctttttttcaggaagcgtttcaatgttttgtccaactttccttcatttaaggccgttgcatttgacacagcttcagcgacaggtttgtactttttgaaggaaaccaattgaagcctttaa

SEQ ID NO: 25456 - DNA, 1632 bp, Heterodera glycines
tcatagcttaattctgataaattaaattttttttcaaaattggggtggatgcttaactactccaaaacagtcctcaaaacgcaaaatttggtcattttttgaaaaatctgttaagcgattaaagtttttctcacccccacccattcctcaaaagttttttttttttttgaaaaaatgcggcgcaaaaagtgtcgtgaaaagaataaaaaaatttcataatggtcgacatgctaattacttcaccaataatgttaatgaattggccgatgaattgggacgggccaatgatcagaaaattcagcagaaggcacaggatgaaaggatttgagaagagcattttgccagtgtgcagcaacagttgctgttaatgaccgttaattaattaattaattatcaaccgggcacagcgcctaatctgtttggcgtgtcacagctatagccctaggaattggacggaaaacaattgccgtgagttatatttggttcctcaccatgccataaacgcaaaaatttaatcattaaggataagaggaaaattaattttaaaaaagtttggcaaaaaataaattaatttaaattgactggaaaactatatggttataaaaagtggtttcgatcacttattactcaaactcatagctaaattttggtacattaaaaagaaaataaaaatattttttaaatcattaaaaaatgaatgagtcaagcatattgtatttataatttataatttatttattttaacttaaaattttaatatgaatattaagtattttgaccaattttaagtaatcaattttttaaagaatttgttttttaatctttaacaatattccatactgtactttagctggctggccattttcctgtgacttgtcgctaattaattaattaattaaaggtaaacatatccaagggatctgcccttcacttttctctaacattttcagaacaaatttgtaatctttttttttctccggaggtcatttggtctttatatcccactcattaatgagtcattcattaatggtcgaccgttgtacaaattcgacatggccactttcaatgtggcccatctcatcactttaattggcgttggggtacaaaaatttaaattaaattttattcctattttttataatatttgattttgttttagtcaattgctcataggttgttgctgatgagcaacaaaatcaaaacaaaactcaaattggaaaagcaaaatgaaaatggtaagaatttttatttaaaatataatttatttttaattaaaaataattttattgtatatttaaattaatattttattttgggaatgcgagagattcaaaatgcgatggccgagaaaatatcgggaactgaggccaaattgtaaaaacaaattgaaaaaggtaaaaaatagctagctacccaatttaaattttatttttgattatttgttttttttaaatattttaaaaaattgttttagtattcactgaattgcacgacaaccaaaatggactgtcaaccaaattggaaaatggtggaaaatgaatatttttttaaaatttaatatttttatttttaatcatctgcaggaattcaaaacaaccaaaaggcattgtctctgatgaagaatatggcaac

SEQ ID NO: 25457 - DNA, 960 bp, Heterodera glycines
ggaacttttggttccatctcagttgtcaacgccgcgactgcatcgttattatatcagtcgatagaattttcgaatcgcttttaaatcgtctcttttgcgtcccttaatcttcactctgagccgagttactgcggtctaaacacgtttttggtagaattgcggccagaatttaaaaatacagtttgctatggcttcgcatcacccgcttcaacgggtgctcagtgtaaatatcgactggccattcaaattctgcctttccagccttatggaaagatattatggaacttttggttccatctcagttgtcaacgccgcgactgcatcgttattatatcagtcgatagaattttcgaatcgcttttaaatcgtctcttttgcgtcccttaatcttcactctgagccgagttactgcggtctaaacacgtttttggtagaattgcggccagaatttaaaaatacagtttgctatggcttcgcatcacccgcttcaacgggtgctcagtgtaaatatcgactggccattcaaattctgcctttccagccttatggaaagatattatggaacttttggttccatctcagttgtcaacgccgcgactgcatcgttattatatcagtcgatagaattttcgaatcgcttttaaatcgtctcttttgcgtcccttaatcttcactctgagccgagttactgcggtctaaacacgtttttcgtagaattgcggccagaatttaaaaatacagtttgctatggcttcgcatcacccgcttcaacgggtgctcagtgtaaatatcgactggccattcaaattctgcctttccagccttatggaaagatattatggaacttttggttccatctcagttgtcaacgccgcgactgcatcgttattatatcagtcgatagaattttcgaatcgcttttaaatcgtctcttttgcgtccccttaatcttcactctga

SEQ ID NO: 25458 - DNA, 938 bp, Heterodera glycines
tttttaattgatagaatttaatgtatttttttaattaaatttgttaaaaaatattttcgttttaatttaatgaatttactaatcactgttgtacctcttctaatcactgttgtaccaatttacatttaaagatttgttgtaaattaataataaaagaatttatgtaaaaaataataattatcttttaataaagaatttcatattttttttaattgaatttataaaaattaatttcatattaatttaaatattcaattcttgtacatttcaaaattatctttttaattaataaaaggaataattaatttattttttaaaatttataataaattgcattcaatttttgtacctcttctaatcatttttgtaccacattcaatcacttttataccccttctaatcactgtttcacctcttctaatcactgttgcacctcttctaatcactgttgcacctcttctaatcactgttgcacctcttctaatcactgttgcacctcttctaatcactgttgcacctcttctaatcactgttgcacctcttctaatcactgttgcacctcttcgcatcacttttgtacctcaaaatttaaataacgggcgctaagcgcccgtccaaggccgcgaagcggcctaacaagctaaaaaacgggcgcgaagcgcccgtatgagttcaacgaatttaaaaaatgggcgcgaagcgcccgttcaaggtcaacaaaaattgaagaacgggcgcgaagcgcccgtccaaggccaacaaaaattgaaaaaccggcgaagcgcccgactgaggctacaaagcggcctaacaagctaaaaaacaggcgcgaagcgcccgtatgagttcaacggatttaaaaaatgggcgcgtagcgcccgttcaaggtcaacaaaaattgaagaacgggcgcgaagcgcccgtctgaggccgcgaag

SEQ ID NO: 25459 - DNA, 1352 bp, Heterodera glycines
  unsure (1)..(1352): unsure at all n locations
aacaagtagagctcgacctggacctggatccaggcctggatttttcctggatccaggtccaggccatttttcggcaacctggatttttcctggacctggatttttgtccaggaaatccaggtccaggtcaaatgtgaaaaaaaaatccaggtccaggtccaggcaaaacaggaaaaaccctggattttcctggacaaaattttaaaatttattatttcaagtgaccgatgttttttcaagttttcaaaaacagattaaatacattttaaaacacattattatcattaattagatatttttagatgtttctaagcaaataattaaatttttcaaacatttttttgatttttaaaatgactttcaaaaaatcgagctctaaaaacagtattacccaaaatgacttaatacaatttgccaatttctgctcactttaaaaacatcaaggtccgtgaaccgcgtgtacacttcgtcctggtgtttgttcaacttgcaatgaataaatagggataggaaaacgctaatttttaaagaaaaccatacgtaaaattaaacatttgcacttaatttaaaccgttaatttatcgtcattatttgaatttgtcactatcaatgagttatttgatccttaacccaaaatggttcacacaccatctcaaaaaatgataatgaactaacaattcgctgcgttttgttttttgtgtttaaataataataataataaacaggaagtaattcgaaaggtttttcaataaaccaactcatatttaaattttattttttgatagaaattcatttttgggatggtgcgccgaagtaccaaaaacaggcactaaaggaagaaatgaaaaaggcaaagccatatgcacaaagataatagtatcgcctgagtcgaatgagcctttttcttttctcagcacattctcttttgaccctttcatgttcctcaaccagttttttaagttgttctttgttagcttcgcgtgagcgctgcaaaaatgccttagaataagaaaataaggcattttatcttatacattcattcaatttggcctccaaattaaaaaagctgtgctcacaaaggaaggtccccaggtgtccgtgggatttccgaatgaaatttggtgggtggatagagcacccacaggttcttaagaaaagtgattttattttttgcggaatgaactcgagtgccgagttatgacgtgccaaagtttttggttttttctaattaaagaaaagaaataattacttcactacgcaacgagcatctattggtgtagcggtagtgcgttagtcaaatttattttgtgtctcanggttcgacgtctctttgctatgctaataccatttta

SEQ ID NO: 25460 - DNA, 1279 bp, Heterodera glycines
  unsure (1)..(1279): unsure at all n locations
atcaatagaaagcgttctgagaatgaatttccacacaattggccaaatggacgccgcaacgctccttcagccaatcaatntggaagtaatcagcaattaaaaggaaagtgagcacattttgagctagaaaataaaatcacacaaaattgtttaaatttttctttaattttaaaataacaaacaagtatagaattattaattttaatagcccaatggctcataaatactcaattttaaaatggtaaaattttatgtttgtatataggtattttgctgattttagatgaataatattagagtccggaattttaaagtacccgacccggaaccgcgcttagacaattgaccgggccgggcggcccgcccgtttaaacaagcgtccagggctcggttccaaattttgtccgggcgctgactttttcaaaatttgtggaagttgattaataaaataataataataaaaaaaattttaccttgaggattggttaagtcatccaacgactttatttttgcttttcaaagccaattttttaagagaataagtatttttaggaaccggtaggaaaatttttttagtttttagcttttaatccattggcgccgacgggaaaaattgaaaaaatctaaacgtgaaagggtacaatttccaaaaattccttaagttcggtcttcaaactttgaactaaagacgtttcgcaaaagaattattaaagtattcaaatttggggcagtttcactggtggaaattaagcccgttttaagccgttcaaaatgaccaggccctggcttagccaattgaccgggtcgccccgccaaaaaaagcccattttagcgggcggcccggttgtttgtcgaagacgggaccgggcagcccggtaaaacgggcttgaataattattatataaaacaatttgtttacgatttggaaaaaacggttgacccaaggacgaaattgagatggcatcagcaaattcgctgaactgctccatcgtgatacccaatccgtccagcttgatcgcccgctcatgcttctccttcatctctacgctgagcattcgtttgatcattggcgaaattgacataaaccaatgagcagaaatgttcatctgacgttcgccaatgtgcacagtcaaatcgtcgtccggcgaacaaattggcgggcatggactgataaatgggggaggcgatgacaacagaaatcaaggacgtacccagcccccttctgccccaccaagcaagaaacgaaattttttgggcgctggttttaaagcaagcaaaa

SEQ ID NO: 25461 - DNA, 1228 bp, Heterodera glycines
  unsure (1)..(1228): unsure at all n locations
ttctggccttttcagtctcgagtttaggtttcggacctgaaatttaaacagctttgtttaaaatctcggccttttttcctctctacatagaataactcttgacttttcccaatttccatttcaatcattgctttatttaaagcatgtctttttcccaaagtgcaattaactaatgaagcaattaattaattaattaattgtccgtccccacccagtggtgtttgttgttgttgctacatgttgttattgtggttgtggttgtgctgttgttgctcaccaattcgttgccattgttctgttcgcttttgctgtgcctttgttttctggcggccattgacgacggacttttggcattggcactttgtgcgcagtcgcgaaaagtcattttgcagctcaaattcatctgcaatttttgcaaatcaatttttaattttattaactttttactgctttttaatattaaatttttattaagattaaaaatcgttttataatccataagataaatgatcattagttaatttgctcgtttaaatgcttaattggcggattgtttgccttggccagcagtgggaagcatgccgtgtgtgccacaatgtgacagccgctgcagcggcgcttctcccccatcttctggcagtccttctcgcccaaataacattcggtgtccacggcggacgaagaagcggatgaagcggaggagggcagccaaatgtgctcagagggactcaactaaactgggccgaaatggcagggcgctaattggccaattagggaaagggccaaaacaattaattattgtgtaaacaattaacaaaaaatatatttgttaattaatgtagaataaaagcgaaggagcataataattcccaattgttaatgattaaggaataattaacaaaattggcgaaaaactttgcttatttaattgattataagtgtatttttgatttaaaaaaagttgttatatttatttttaatcaaattgcattatttaaattaaacatccaaaatccgtcccacctgttcatccagccaatatctgctcgtcctgtgcttgctgacccgcttctgctcctgctcctgaatggcggcggctcgcttcaccacgggcgatttggctaatgctcttctgaacacaaaaaaagaaaaatcatttttttatttgattttaataaaattaaatttgttcgatgagaattgagaaacaaaatgggatnaaagaagt

SEQ ID NO: 25462 - DNA, 1498 bp, Heterodera glycines
  unsure (1)..(1498): unsure at all n locations
ccactgttttttgttgttatgtgttgtttttgaactccccctggaattgtttttgctttttgacatttcaacatttacttatataggtagaagcaatatttccctgggctatcaaatttagcttatcttttgaataaaaaaaagttggatgatgattgttaaaggagaagacaagcattatcactaaaataaccccatgaatatgaacctaaaattgtcataacagcgtctcacactttatttgcatattgaaaatgatcaataataaaagcgcaaaaaacataatttggggatttaataacattcgatgttaatttgagaaaatacacttttactcagccatcagcaattggagtgttgttcatcgaccggatcgcactatgaatcctaaaaaataatgtttgaacaactaaattagtgacccattcgctgttattttcaattaaattgtcggcgctagtgaaaaagtcaacacttttgaattccatcaaaatgtaaaaacaaaaggggggacccttttggtttgcaaaatttttgaatattcaattgggtttttgggtccatgacctcgaattagatgtcagattcgtgatcactgatcagcaacctctaaaaccccggataatacaattttcatgggttttattacaaaaaaaatttcctaaacaaaagggtcccccccccctttattttttgataaaattcaaatgtggtgactttttcactagcgccaaattgtctattttttaaccaaccactaaaagttatatttgacgttatacagcgtccaattcgcgtattgcaccttggatacaatttcataaagtaaaggttataaatttctgattacgtagaacataataatcccatgggttgcgttgcgtgttttgcctctcagttgccacaccaaatcctccatccttttcataaatcggtcaattaaagacacaaaaaatgcttacaaaacatgcccctggccactaaaacgatccccatttggatcatttggattagggagttcgacaggcattagcagatagccacggtgttttccagcatacagctgaaatacgattttacaaaggtaagaattacacaaaatgactgaaataacaaaccttacgaacactctgtttatactccttctccattgtttggacgaactgagaaagactcatcggcccgttgaccaaaaatggttcaagcggcgtatcatacagcgaatttccagcagacgaagcaacgctattatccattaaaatcgtttttggagtttgctcgaaaatttaaaaaaaatgtttcgaagaaaagagccccaaaaaacggttgaaaattttcatttgagatgtccagggaacggatttatatgttttttttgcgcatatgctatcgtatgaaaagctcaaaaattttggagtgttggtcgtttttggcacatatttggcgattttttgagaaagtttgtaaattttttcaaanagttcctttttggcaatca

SEQ ID NO: 25463 - DNA, 1078 bp, Heterodera glycines
cagggtttaatccaaaattcatgccaaggaatcgaataataaaacttgggcccaggtttttttttcaaaattgcgagacctcctcctaaattcacccaaattttggatgcattttcgagtttgtgccaacaaatctcagagcacagtttctggcaacaaattcaaaatgtttgtaacggtaaaaactcataattttgtgccacaattttgagtgtttaaaatgtttttgattcctttgtttttgtgcatatctctcatccaaaaacaaaccttgatcaatgccttgcagcgtttggccaatttttcgtctttgattttcttgcggaattcattcaaaacagcgccaatgcgagttttctgaaaagcgcaaaaattggaaatgagattttgtggaaaattgctagagtaaatgtgaaaaggaggtatttttccattttgatgacataccccaatttaaaaaagcacaacaaacccattcaatatgtgtaagtaaatcaaaatagcagaaggatgagaaaactttatctcatttgaacccaacccaatttttttatgcgtacaaaataagtctatgcatactgaacggtttctgtgctctttttaaatggggtgtgtcatcaaaacggaaaagtacctgaaaaggttggaatatatatgtctagtttttacgagcatcaaaccctggggcattgaatcgaaacaaaaccagcaaaggttttaaaccatttttgcattggcaagatttctcagaaatatgtccggaataaaatatttgtcggtttttacactgagcaggtcgatgttcacccgcatgttctccaaggcagtgaccaattcaacggcgtcgtccatctgaaaacaaaggcccgaaaaatgtaattgccaaaagtcaaaggaaaacactgaccgatttcgatccatcggtcattttggtcaatttgcgtgagatttccacgatgtcttcctcatgcacattcattgtggacaaatggaaggcacaaaaatgtaggaaaatttgattaatagggatgaacttttaaaaggtagattataacatgtattttacgagtcagctttt

SEQ ID NO: 25464 - DNA, 1465 bp, Heterodera glycines
taaaatttgatccattttatgcgaaattatgaatacttttctgtcaaaaattttccatttgatggttttgactaacgtcccagcacctttatgagtccaatggaccttaataactggattcaaacccaggtttttaaaaaaaaattgattttttttataaataaaaaaaataaatttttaaacaaaatataaaaaaacctataataaattttaaaaaaaatctaaagttaaaaattagaaaacgtatagccgattcttctggaacgttttaaagaccattaataaggaactaattaattaattaagaaaataatttaaacttaaataaaaatttttttattaaccaacgaactaaaacaaaaaataaaaagattccgaaccacgggtccgaacttgaacaaaaattcgaaagtcaaaattttagaatttaacattttttgttcaaaagaggcggaactgatcgcttattaaaggattgatggctttcagcttgtttcagtgtatttaaaccgattttgaaccaaaaagtttaatcgaaaatttggattttcgaattgttattccaattcaggagatgcacaaccaaaagttagccccgactgcaaactttcagcgctctagctattcccgttctaaattttttgaatcattgggaaattgggattttttgtaatttaaatagaaatcgatttgtacctaatgaataatttccttagaattgtcgaaacaataaaaggggtcgcaataatcttgcttatattgtatttttttttatgttttttttaaaaatttatttccataaatttataactgtatcattaaacttcgaagacaaccttttttttacatattttggagtttttatacatattaaaatataaccctttaaaataaaggagcgcgtccgtgcgcggtggtgcgtgctggcattgggacactggggtttccaaattggggagggatagaacggtgccatgtaatcccgacacttggtaatttcgacactgagtattttcgacactgagtaatttcgacactacaatttcgacactgagtaatttcgacactaaagagttttttgaaaaaaattcatgccaaaatttgaagattggtcaaaaacgaaatataaataaactgcagatatttgtacatataattttctcattatataactggggacaagaattcacaacagtttttaaagtttgatatactttcgttaagcagtttgagcggaaagtccaatcatttccttaacaaaaaattgatgatggaataggaaaaagtgcaatgcgatttcctaaatgagagcacacaccattatttaccaattctatactacccttattcaatgaaatttacaattaaatcacctatattcaatgcctcgatacgaccccggatccaggcatctgcgcgtcctcccatgttttatccattttgatcaaagatcgggtcgtcttct

SEQ ID NO: 25465 - DNA, 1723 bp, Heterodera glycines
atttcacgaattacaaacacctgctgctgtttgtttcaatttaaaccaattctttccccaaaagtacaaaagactgtcattaattagattatcaattttgaatgaaatgatttagaattttggaaaacaaaaaaattggattttgacctaaaattatattttagacctaaaaatgtgcgtcgatgatcttttttatatccaggccaagttggtcagatcactcactccttaatttatcattgtaatagacaccgacaaaacattctgaaattgggggaatatttaaactaaggcgcaaaaataaaaagtgaaattgaagttgcaaaagtttgaaatgcgaaagtttataaaaagacaaagtgaagcatgcattaataaaaaatttttaatattttaaatttttgatttactttttcatgcagattcatgttttgtgattttagagagactaatttggctgaatttaagtagggatgggattcttaggtttttaattattttttctgcggctttaactcgacgagaaatgcacgaaaacacaatttttgttcgaaaaactttcgttttaacgccccaggaatccctattttgagtgttcgcccctaaaataagttttatcccttttttggcgtttcgcccctatttcgcgatttttgggaaaattattaacaagaatgcaaaaaaatgaaaaatacacccttaaaaatcggcctaaaaattttcaaaaaaatacacccctaagaatcggcccaaaaaaattcggaaaaatacaccccctatgaatcgacctaaaaattttcaaaaaaatacacccctaagaatcggcccaaaaaaattcggaaaaatacaccccctatgaatcgacctaaaaattttcaaaaaaatacacccctaagaatcggcccaaaaaaattcggaaaaaaatgcaccccacccttaaatcccgaaaatttcgaaatgtacttcatttctaactacaatccgtgaataaaattatttgccttaattttaactaatttacatagagaaaatgtcaattttaataaatttcacccgtacatttgaaactttttcatcactatttttgcccctattttgcgaattttttgcccttatttaggccctaaattagaatttcccccccccccctaaaaatcccatccctaattataaggtttttaattgtttttagaaaaaccttaaaaataagatttttgatagtgtgataaagtgataggattaagtgaaagatgtgagtttaattacttaaattcatttaatttgtatttgatgaataaatatttttcgcagataatttacgtcgggtgctttttcttattttgaatttttaggggtttttctttcttttttttgccccaatttggaaaaattttcgagattttgttaagaaatatgcaaaaaaaaaaagaagaaaaaataataccatcttatccgatcagcaaactttgtgaagaaacggcacagaaaaagccaagaaatgaatgaatcatccattcacgtacacaaatgtgtaaattcattcataaaacaaacaaaaaatggagttgaaatgggaaagaatgaagaaagaaagcatttgtctccataaaagtgtttagccatgagatttaggcacacatttggcgaaaagtctttcactattaaatgccaaaatcagtcgaaaaaatgcaacaattattttattatttaaataatttttatt

SEQ ID NO: 25466 - DNA, 1704 bp, Heterodera glycines
  unsure (1)..(1704): unsure at all n locations
caggcaaaaatgcaatggcaaattcagcatcatcatcatcatcggcacatttttgtgcttctcaagcaaacattgaggaganaatttgttgtcaatttgtacaacttgtcaatttgcctgaaaagtaaaaaataaaaaataattaacggttgctaattaatctctgattgactctaattgctttcttttttatgctcccattttgcgatggcttggcaaattttactacacaaaatgaatttcttgaaaatttgcagcaaattaatttctcaggtctgctgaaaaaatgcccccatttaaaatggaaaaaattgaaaaattggaaatttttaggcctcccaagccgaggttcagcaaatgcaaagccagcagtttctcaattttttcagcagcgatcgtacccaaaatttgggccccctcaaccgacaaatttaaaggcaataaaattgtctccgttttaataaattaaatttttattgttcagcattaaattaaattttaaaaacgaattttttataaattaattttttgaaattatttttagcttatttgatatttaaattgttttaaattttattaaattctcctgttaatttgaataaaatggttaattcattttttgtttagcattaaatgttgaaaaaataaataatttttaatttattttctaattgcaaataaaattttaaaaaaaatgtttttcgcaatttttaaggtttcctttgaggaggcccccgcggagcatatggtgtttctgtttggcatttttatgctcatttccatggtcatcatttgtacaatgtttttgatgaaaatgaccagggccagcggcggcgggtaattttcaacaaaaaaatttcgaaaattcttaaaaaattgaaattcttaccccctcccacccttcaaacttagtggcgccattgcgtcgacgagggcagctcttggcgcaattttgccatcaaattattccatggttctttggatgccaaaaacgggtcaaaactattttttgaatgttttgtccattaactttggcacaatgccaaattcagcggatgtcaaacggcactaccgtaccccaacaaatcaccacagacgtcattcacgcccttcactgatgctgctgttacgctcctccttctcatgcgcgaacaatgaaagtgcgttttgagaaattccaacatttgacagtatgccttaaaaattacagtacacggaaaagtaaaaaattaaattttttaaaattgtaacagcaaaatactgtacaggttaagaaatgcattaaccatttgttaaataaatcaaaaaaaatgcattaataatttgctaattaaatcaaattacagtactcggatggttactgtaacaatttattgaaatccccaaaatttagctgcacgacatcagcgagctcgttatgctgctcgagggcgaagtttcgtttctgtggtgtcatcgagcaggcaaatgaagaaacagaaacaatatttattaatatttttaattgcaaaaataaaatttgtttaattactaatccaaatttttgaacaaaaatttttttgaattaacaaaaaaatatagcatttgcatattaatttatataataattaatttcaaaattgtaaatattaattttttttttctgtcctcttttgtcagtatgcatccgttgctgccccattctttgaccattacgccgtccct

SEQ ID NO: 25467 - DNA, 1542 bp, Heterodera glycines
ttttgtctgtccataaataggcaccgaaaagccacccaaatcacacattttccattcaaatcacagctaatccttcctttcattcagtcatcaatcagttgaaccttccttgcacccttcatccatcccatcactctgctcttcatccaatcaaaaacggtaaattaaagaattagtataaaatgtaattttttaaaaattaatttaaaaaaagctagggttcgagccccgtgggcgggggtggcttttcgcgggggcgggggttggcgggggtcagagtcgcgggggcggtggcgggggcgggggtttgctttgaattagttccaaaaatctcacaaaaaaatattttttatgaataatttctttggctccacattcttttattcgttgatcgccttgataatatttattttgacataaattgcacagattttgactaaaaataatcaaatttagcgatttttgggtaattttttaagaaaaaaaggtttttttgggggggggggcggcgtgccgataggagcgaattttaaatttatttctaacagatattcaaatttgcaaaatatctactaaaatatgtaaataaaagtccaaacttttgtttgcaaacacaaaaaagaaagtgtttttcctactgattaggctatggagaagccaggaaaaatatgtatttacataaaattagcagccctaatcatgatttactcaaggaaaattggaactcagattttttaaaattttcttgcggtacatttttccaaaaaatttgctgaatgtgcgaggggagaggtccggcggtgccgacaggcgccgccggggaaattttttgaaaatttgaatgcaatttgttaacaaattttgtacaaaaaataagcaaatttttcgatctttggctaatttttaagaaaaaaagataggaattttgggggacggcggtgcctatagacagcaactattcaaataatctagatttatgttttatgattattatcccacatattaaatatcataaatttcttaaaaatttcagggtattaaaggttgaaacttcattttcaataacctaaataacattttcatggaatttacacaattttttaaatttttactttattcttcgtgtttcaaatatttgcctaaaatcccaaaagtgtatcaattaatgtcatttcattttcatggagagaatctcattaaagcacaaataaattaagatttttttcggaaaaataaatataggggacacgtttttaggaaatcagtaatatctgagcatttaatttgagcgaaaaaagaatttctcatcagagaatatgaataatacaaatggcatttcctgtgccaactaaaataaaaaatagtgcgtaatttaaaggttatgaaattggacataaatacataaaggcgtgggattttgtttaaaaattgtgaataaaatctgagttgaatggtcagaagataagaatgaatacaaaatggactacaaatatgccacaacagagacaaaaaagtgccaattgcttacgtaaatccccaaat

SEQ ID NO: 25468 - DNA, 1342 bp, Heterodera glycines
actttcgctcttatttcacgattttaaaattttcatgtaaaattcacaaattctttagcaaaaacggttggggtcgttttcgtacggcagggggtctttttcgtacgagatgttgtacaagcgacagatcgaattgaagaagcttcaaaattatacagacaaaatatttcattttaatttcatttataaaatttatatcgaaaattcattaacatatacgaaaacaaaacaacaaaattccatagcaaactaattgcatatcataaaatttgataaacattgacatgattatgatcatttggtgggacgaggttgttattgagagatcgttataactgtttacgagaagaatttgagcatcgccatcatgatacttccttttcttttggggttcgaattctcccaccacacaaactgccatgtcggcatcaatcgtcttctgctcacatctgatcgtgtcaatgaagcaccaaattgttggatgactgcaactaaatttccgccaaactttgtgacggaatgcaatgcctcagcgaagttgctggtccgatcaacatcatccaagtgagttgatgaacactccattcgttcgggtcaaaataaggcaccgtcaatgcaccatcatgctccaactccgcattgtttcgttttgttttaattacttgatgttggttcctttgtagttattaaaaacctaattttgtcaaaacattaaaaagcatatttaaagattagtaatatgtagggccgcgatttctagtgaaaaaatttttttttttgctcaattgttttgaagaaaggagctcaaaaaaattttttttttcatttggatgtcatttttcgtcactagaaatcagtattttgctgttttgtcacttaaaatagtgaaaattcacttttttggcgttttgtcactattttttcactatttcaacatttttggaaaattccttaacaaaaatgcaataaaatcaaaaaatacacccctaagaatccatttaaaaaaatttcaaaaaaatacacccctaagaatcgaccaaaattttttttaaaaatacaccactaagaattggaaaattttttcaaaaattcttcccccaaattttttttcttgacaaaatttttgatttaaaaaatgtcaatatttgttaagagaattttataaagaaaatgtagctcatttgcaactgcaatcagtgaataattattttttgctcaatttttggctaaaaattatgtcactattcgtcactatttcggacttttttcactattttgtcacttttttggcactttttcgacactattttagttaactatttcgggatttttagtcactaaa

SEQ ID NO: 25469 - DNA, 1323 bp, Heterodera glycines
ccccccccccccgcccttcaaaattttgaaaaaaaaataaaataataggagactcagaattttgaaaattttttataaaaactgatgacaagctaatgtgataaaacaggttaattcttttcctttcagtatccctgcaaagtttggggcgcttctgataagtttctgaaaaaaaagttaagcctaaactttttggcctgtttaaaaaggaattaaaaatttttaaaaatttattcatctccctttttgatagaaaaagcatcagagtgcctaaactagcatgtaaataaaatttggtgcgtttcagagcattttctgaaaaaaatatttatgaattaattatgcaaaaataaataaaaatttctaaaaatttgatcgtccataaataatttgtaattgatcaggggctcaccaaattttgcagggatacgtatcggaacactacaaatgcttactaattttcctagattttttaaaccgcggtgaaaattttttgcagacaccaccacttttgcacttaaaaaaatttcaaaaaactttaaaaattcataggaaaattttaatttcataggtactactgctaaatcaacgcagagacgcctttccttgacctttttaggcccctgcaaaatctggtgcgcttctgatcactactcgaaaaatgagtgattgaattttcactaaaaagttaagcctaaactttttggcctgtttaaaaaggaattaaaaattttaaaaattttattcatctccctttttgatagaaaaagcatcagagtgcctaaactaacatgtaaataaaatttggtgcgtttcagaaccctttctgaaaaaaatatttatgaaacaaaaaaatcgattttttcaagtgtccatttggggtactcgaacatttatggggagcaaaaatccaacgcagaattaaagtacaggctatagggaagctactcccgaaggattcggtctccccataaatctgggcgcatcggttcggggggactgccccgaaaacaaaaaaatcgattttttcaagtgtccgtttggggtactcaaacaattatggggagcaaaaatccaacgcagaattaaagtacaggctatagggaagctactcccgaaggattcggtctccccataaatctgggcgcatcggttcggggggactgcccagaaaacaaaaaaaatcgattttttcaagtgtccgtttggggtactcaaacatttatggggagcaaaaatccaaggcagaattaaagtacaggctatagggaagctattcctaaaggattcggtctcccccataaatctgggcgcatcggttcg

SEQ ID NO: 25470 - DNA, 1208 bp, Heterodera glycines
tttaacggcgcgcgaaaaaaaaatttcaaaaattttcgcataattttttttttttttttgcagaaaatcatctcgcgcagtgccagggctggcctccaattcccggtgggacgcatccatcgcttcttgaagaagcgcacaacaagcaccggacgagtcggtatgttttggcgaattttcggggataaaatttgaaaaaaaaaattttttcaaaatttcccaggcgccaccgccgccgtgtacagcgcagcaattctggagtatctgacggccgaggtgttggagctggccggcaacgcgtccaaggacctcaaagtgaagcgggtgacaccgcgtcacttgcacttggcaattcgtggagatgaggaggtgagggggcggtgaaacaacaaaactttgctaactttaggattcccttgaatcctttttttggtctttcgaatttaaataattttgataatttccctgtgtcttctgaaggcatcatccgttatccgtcttaattttgctttttccgttcagttggattcgttggtcagtgcgacaattgcgggcggcggagtcattccgcacattcaccgttcgttgatgggaaaggtcggcgcaatgggcaaatagaacaattccacccccgtacggttgttttccttcagcctccgagtcaactcaatcacagtcagcagcagaatcattcgcagcagcagatgaccaacgttggcaatggcgacaactgattttggccaaatgaatatcgttctttcaataaaaaaaatattttgacgatttgtgcacttttaccaaaaccgataaatcttttgctcttcaattggcttttaccttttaggtactctttcggtttgtatccccctttggggtgatatttacgaggagtgttaggcagacagagggatattaccttctttattttataataggcttattcttttgagactattttttcgtcttttcacaagagaatttattaaaagaggaaagtttcgccttacgttaataaggtgaaagttagagaatgtttattaaaaaatttttggatgaaatattattataataaatcaaaaagaaagaagatatgatttatttttctagataaataaaaaacattgtcagaggcagtgcctgcctaaaaatagacaaaattttttcaaaaaagccaaataaattgaaaatttaaataaatttaaaagtgt

SEQ ID NO: 25471 - DNA, 995 bp, Heterodera glycines
  unsure (1)..(995): unsure at all n locations
actttcnaanggtgttatcaattcggtgagagaatgccgcgaattgctgttcagacgagcttgccgaagtgttcgccaagtcgtcgtcgtgtcgtcttttagatttgggcatttttgggattttttggaggagagaaaagggtttatcgattggtcaatttggtgaaaaagataaggggtgaaaatcggttccgctcgaattaaaattacactcttaaaatttcacatccgaatttcctttccaagatgttccaacaaaaaatcatttgaaacttcattaaattaatctattctctttctatcaacttttcttctcttaaccaaacaatcatatatttccaattcatctttattctattcaattgagccacacgtttggtcaaactgctttttcagggagcatttaacccttttattcaattttccgtctttttcgggagctttgaacccgtcatttctttgtgtatttgttgaagtggaaaattttgtttttgtcgcatcattatctaaaagggacaaataaggtaaatattcatcataggtcccagactcaaaattgcataaaattagagctgatttttatgttagttatggcgagagaagcccaaaaatagcattttctccgaacaattttttgatttagagcgacttataaaaacatattttggggttttggcacataaaaacatgtgcatatttcggggtttggcacatatttttcacatattttggcacttttgagaaaaatctgaaagaaaaatacaaaaaaaaaaatgaaaaatgcacccctaaaaatcaacttttttgtcattttttaaatattttcaaaaaaattttttttgtttgccgaaagtaaccaaatcgatttcttaattcctcattggatttcgatgttccctgatggaactttcaatttaaaaataatttacagaaaaagaccaattttagcttcgaacaccttgaaaggtattagatttgcgattgtgcgggcgaaa

SEQ ID NO: 25472 - DNA, 1025 bp, Heterodera glycines
tttttaaatttatactctatccagaaaaaatgctattctttttttttgagaaaattttatacctcacaaaagcgcttgcgtatgagacggagggctgtgcacattcgccattttatttcacagaggatttttatatttagaggttatcccagaaaaatggctatctctttttttgataaattttatacacatacaaatgctctcgagcatgatagggagggcggtgcgcaatagaccttttatttttgagggaatttttaaatttatactctatcccagaaaaatgtctatctctttttttgagaaattttatacctcacaaaagcgcttgcgtatgagacggagggctgtgcacaatcgccattttatttcacagaggatttttatatttagaggttatcccagaaaaatggctatctctttttttgataaattttatacacatacaaatgctctcgagcatgatagggagggcggtgcgcaatagaccttttatttttgagggaatttttaaatttatactctatcccagaaaaatggctatctctttttttgagaaattttatacctcacaaaagcgcttgcgtatgagacggagggctgtgcacaatcgccattttatttcacagaggatttttatatttagaggttatcccagaaaaatggctatctctttttttgataaattttatacacatacaaatgctctcgagcatgatagggagggcggtgcgcaatagaccttttatttttgagggaatttttaaatttatactctatcccagaaaaatggctatctctttttttgataaattttatacacatacaaatgctctcgagcatgatagggagggcggtgcgcaatagaccttttatttttgagggaatttttaaatttatactctatcccagaaaaatggctatctctttttttgagaaattttatacctcacaaaagcgcttgcgtatgagacggagggctggtgcgatcgccattttatttcacagaggatttttatatttag

SEQ ID NO: 25473 - DNA, 1183 bp, Heterodera glycines
cgtgcgattgcatctttcggcgtccctcccggtacattttgatgattttctgccggtcgcacaacagcagcggccgtcccgaaatgtaagggcggccaaaacggttgcgggccgactcgccgacttaaattttaattaatttggaaatttaaaagataaaatgagccgaatgatgagaaacaaacataagcttattctttacttcggtccacaaattcattatttgaagccgaaagagtcgccgaagaaagcgaaggcgacgcaaaagcggaagaagaagaagacggaggagggaaaggcgagacggacgcattggcacctttgaaaacgaaaaaggcacttcaaaaaatgaatttaaaatttcaaactgcgcaaaaaagggacaatttgaagacaaaaagcaaaaacggaggggggggggggacactgaaaagaaaacttagtccaaccaacactaaggaatacggtataatgaattaggaaaaaatatgggatgacaaacagtagacatccttgttacggtacagtaccattggcacaaggaaatgttccgtggcagccggtcagcggtgggggtacggtaggtgttgtggactgaaaaagccactgactgttgccgaccagagggtactgtagcagatgagagtggaaagcagaagtggcaacaacggaagacgcagcggaagaggacagactagcagcagcggccgcgagagattgagaaaaagacggtaacagccaaaatggcaacggagggggcgcaaaagcggaagaaacggaagcggacgaagcggaagcggaataagctgaggaggacgaagcgggcggtggaactaagccaatcgaattggtagtggcgtttttcggcggctgttgctacaaaatgaggaaaagctgcttataattttgaaaatttaaataattcaaaagagataattcgttcattctttcctcactttttcctgttccgattgcttttgcttctgatccgtccccaatttcccctcattttccactgaccattcttcgctttgcctcttcgacccgtccagtgaatgctgatcaaaaatcgcaacaaattgcgcagttactgtcagccagcagagtttgtttggctaaaacgagcgatctgtttgcgctgtgtgcgtgacgctctttctcgtctcgcccgttttattgcctc

SEQ ID NO: 25474 - DNA, 1336 bp, Heterodera glycines
  unsure (1)..(1336): unsure at all n locations
taatgatgcagaacacatacagaattgcccatattcgcactctatgacttaatgtgtgtctttgaaattttttattacaaaaatgtatacatattaatagtgtatttcataaaatttaggtccaaaacttttagaattttttgcgaattaaaaaaagaattggtaattacttattagataccttaaaaaaagttgagattacttgaaggttaattaaattaaagaacctaaattcaaagaaaaacattaggcacaaaaatgtggaaaataatgttgattccaatagttaaaacaaagatattttattcactattttgattttaatgattttttaaattgatatttaacaaatttaaagagcttgatgaagtatgttatcaactgaatcaatataatatttggaaatatgttgcttcaattatttgcaacattggtagcccattttgcttggtcttctttgtgcgcagtttcattcaaattttgaggatgaatattttggcgaaagaaaagctttacgaatttttctataattaaaaaacaaaattttaatgtagattaaaaaatgaaaattagaatggtaaaaaataaagtttatttattaaaaattatatttttaaatccaaaaaatttaattttcattgcttttaaactaattgtacacttaccagaagaacgttttaatcccgaaacaagttcgtaacggtaatatttgatggtgcaaattgaaacaattggatttatggcagagggtaaaaacattggaattgatgacaataaaatgtaatactgtaagaatttccattcctttatatcaatattgcaaattggaattaaaagcaaaaaaagaacggaaaaataaatgatgaggggcattgacgcctaaaaataaaaaatgaattaattaatattttaaaattaatttatttagctgtaaccaacctgaattataagatttagagaaacttgtttgttcatttcaatcatccttttggctatttcagaaaaagaaacgcttcaaaaaatataaaaataaaaataccctcaatttttaataaaaaaaaataattaccttttcgatttcatgactaaatggctattgatacgaaaagctaaaccaaaaattatgaggtatgcaaaagtggatattatcatcaagtagaagaatccaataaccgaacggatatcctaatttagaaaaaatattattaatggaaatttaattttaatacatttacattaaaagaatatccggccaaaacaattcgatcgtcgagattaattccgagaaattccgcaatatatttttcttccnatattgagtgttcaacgggcggaa

SEQ ID NO: 25475 - DNA, 1700 bp, Heterodera glycines
ttgccgtttgagccctggtgtagacattccaaaacgagatcgggaaacgtggaggacagacgatgtcttgttcccagcgtctaataagctgcaagctgctttcttcggacaatgggattgtcggagttgatggttgtggcgaatgcagtccgaattgtattggtccactgcctgctattgtggacgtctgtgatacactgaacgctaaatcatttaaaattatgttaattatcatgaaacagtacatatatgcgcttacgagttgtgctttgagtgcgacgtagaaagaagcgtccgacatcagcattgggttcaaatgcctccgctccatggtcaatctcaaattgagtggtgccaatgtaggttttgccaaaatacgccagccatccttgaactctaggcggtgccgcgctgacaatagttgaaaaagctcgccgaacgtaaagtggcggaatgagtgccaaagagagaactgatcttatttggaaaaacaaataaatacacatgagctaatgaaagacacctgaatgttttgtgaacagccttcctttgaaccggtgcttcgtcgtcatctccgtccaataaattaaaaatgcccatgcttctggcttttcggaacaccgcttgcgctgtaatgtgaactttaaaatatttaaaaaatttcaaaagttgcgcattttttgtgaattggccaaccacacatttttctacctaattgtcgtccattatgagtgaaaatgatccgtcgagaggccaaattaaccccacatccaatggtatcaccacgagaaaattcataacgttcttcgtttagccagacagacccactggtctcaaaagtgccattgcttttgtatccatagttgtcccaatgacatccgacacattcgtccaatggcatcgctttggaggcgattccaatggaaaaatggtatttctaataatggcacacaaattaaataatttaattgcaaaatgtaatttcctttttaagaaacattataccctaacatccttaagattttggtttcataataaaaaatgccggaagaacaggtcgggaatgggtgttttgcgaagacagatgagcatcctttttgacaaaataattaattaattaataaaaaattttgtacaaatttaaatatatatatatatatatattatacatatttagagaatttataaaaaaaattcttgtgaaaaataaaataaattactttggaaaatatatttctaaaaaataggtgaaaattttattcgcatattttatttacatattttgggtttttctaaatattacttacatatttctctctgttttaatatatatatttttactattttgcaaattttcttacataaaattcacatccctaattataaaagataattcaccttcttcctctgaccaccaactgacagtcaaacatttgtcatcaatgattctgagctgattgtcacaagcgttggcatcccaacaattttttggcggcgaatttgaaaaattcagtgaatttagaattttgtataaattccataattaaatattattttttacctcaacgaaattctgacgaaaattcggatgaacggctttcaatagatcttaattaacaattaatttggatgcttttattaatctcgtcttaaatattgcataaaaatacccaatttaggacattcctaaagaatggggg

SEQ ID NO: 25476 - DNA, 1128 bp, Heterodera glycines
cagaataattacgccgattctaattgttctgggattttgtttctcgggcgcgtttgttgggaaaaaatttggataattggctatctctttttctgctcaacagtaataggaatttcaaccgcattctcagaataattacgccgatactaattgttctggaatttgtttctcggcgcgtttgtttgggaaaaatttggaaaattggctatctctttttctgctcaacagtaataggaattccaactgcattctcagaataattacgccgatactaattgttctggaatttgtttctcggcgcgtttgtttgggaaaaatttggaaaattggctatctctttttctgctcaacagtaataggaattccaactgcattctcagaataattacgccgatactaattgttctggaatttgtttctcggcgcgtttgtttgggaaaaatttggaaaattggctatctctttttctgctcaacagtaataggaattccaactgcattctcagaataattacgccgatactaattgttctggaatttgtttctcggcgcgtttgtttgggaaaaatttggaaaattggctatctctttttctgctcaacagtaataggaattccaaccgcattctcagaataattacgccgatactaattgttctggaatttgtttctctgcgcgtttgtttgggaaaaatttggaaaattggctatctctttttctgctcaacagtaataggaattccaaccgcattctcagaataattacgccgatactaattgttctggaatttgtttctcggcgcgtttgtttgggaaaaatttggaaaattggctatctctttttctgctcaacagtaataggaattccaaccgcattctcagaataattacgccgatactaattgttctggaatttgcttctcggcgcgtttgtttgggaaaaattggaaaattggctatctctttttctgctcaacagtaataggaattctaaccgcattctcaaaataattacgccgatactaattgttctggaatttgtttctcggcgcgtttgtttgggaaaaatttggaaaattggctatctccttttctgctcaacagtaaataagaattccaactgcattctc

SEQ ID NO: 25477 - DNA, 1712 bp, Heterodera glycines
ttaggacacttcctcaggccagaggccttcgggcgctctatgtctcgtgttttttcgaatgcaagcacactggtccccaggcaaggagttccgatccacgaactcatagggcttgtcaaccatggcaatacgccactcactcgtataccaacaccaccaccaactttaggttcagcatccccagtgctgagttccccacagcatttgtgccttaggccacatttacacaagtcaattaactcgccaaatttctttaacacacagacgagctgcatgttttattcatttcgacagctgccaatcgctggagaaactgaggccacggcaaaggtggcaccccagcagcagccatcaccgttcaaagccgagcacaagcgcaagcaagcacttgaacccagacggccgcgctccccacagcgaaatcgcatcttttttccagccacaatatcgcaaaaacggcccaaccaccacactcacccacgccaaccaaccaacgcaaagcacatacgactaggaactttatacaaattttaaaaaagtaatattttgtatatgcatttaatcaaatttctactttctttataaatgttagctaattagtcagcgtctatttattttctgtaaaaatttgcctctttatttaaaattaaattatatataatttcatgaaataagacactaaatgtatagagaatgaattaacgtgggcgattggaataaatggacaaaaaagcaaagtcaaagacaaaaccttaaagcactagccgattgaaataaatggacaaaaaagcaaagtcaaagacaaaaccttaaagcactagccgattgaaataaatggacaaaaaagcaaagtcaaagacaaaactttaaagcactagccgattgaaataaatggaaaaaaagcaaagtcaaagacaaaactttaaagcactagccgattggaataaatggaaaaaaagcagtcaaagacaaaactttaaagcactagccgattgaaataaatggacaaaaaagcaaattcaaagacaaaactttaaagcactagccgattgaaataaatggacaaaaaagcaaattcaaagacaaaaccttaaagcactagtcgattggaataaatggaaaaaaagcaaagtcaaagacaaaaccttaaagcactagtcgattggaataaatggaaaaaaagcaaagtcaagaacttatcctacctaatttcatggtgactgacgaggcatttgactcccttaagagagccttcccttctcatgtacttgtacctaaaatgttgttggcacaaaaagtaaagggggaaaaagaagacaaatcatccgatcaagggctaagtctcaacagatcgcagtgtaaaagctgctctactgctaacaaccccctgaccagtagtcaagtcgtatacaagtgattttgcgccccgacgttccaccatggcacacgagtgctacggctttggcaatgtgcgagcaattaagcacgcacatcgggccagatgctggggcatttgtgctgcaccgcaagcggcgcataagtagtacctcccgacaccggggagcaagaatattgctatcttgcctaggcgggattctgacttagaggcgttcagtcataatccctcagatggtagcttcgcaccattggtctaaagaacaagcacatgaaccaaactgtctgaacctgcggtcgaccgcaggcagcaagct

SEQ ID NO: 25478 - DNA, 423 bp, Heterodera glycines
aaaattaaagaatatgtgtacttcaccgaattcgacggataatatatcattcgacgccttccagtctgtaatgaacgaatccacaagaattttttggaacggaaaccattttgggccgagttatgggcccgggactgaagtggccaaatggctgtgggactgaaccgtacaaagccttaaaacgcaaaatgcaaaacaatattggtcagtcgattcctcttggtttataattgccaggaatccatttttgagggcgcacagcgcccgccttagcgagcatgcgaagacggagcaagtagtggggcgagacggagggcggatgaagcagtctgacgaacgacacaggcggttgactgctggggcccgaagggcccccgacaatcagataaccgcctgcggatcacgcgcggacttcttccgtag

SEQ ID NO: 25479 - DNA, 2953 bp, Heterodera glycines
tttcctcatttctacggatcgaaatataatttctcgagaccttgccagaattgaaatgattattatttatattatgtcataaagtttaaaagatggtatacgcgagtgctttacaacaatcatataaaaatagagtaaatcataaagcaatatattacgtttttataattttaaaattttttgagtgtctaatagttttttttcattttatttcaagtaatttgtctcattttttctttattaaattaataaataatatatatttaaatcggttaattaacgacttatgaattttattttttgggtttttattcatttattaactcattaaacattaaattaattatttttttgttagttgttttctcatattttgtattaattttaatcgggtttaaaattttattgtgataatttatagtgaaatatttttgaaataagtatttttacaaaaatatacttccgttcgtaaattttgaataaaattagaagcgacgctcaatttatatttattcaaatctattttatttttctgatcgataatacttatcaattgtacaattaaataatttgtttatctcggttatgatcaattcatgttaatatttttttcaattgtataattttggctaaataaatattcgaaaaatcattatatttagattttatcataaaataaatttttgtttattctcgttttaaatgtccatgtttgctagcaaagcgtgatgatttttgccggaatcaataaataaattaaaaaattgttatgtgaaaatttaatctatttttggtgttctggttttacctcaccagagagcacaaaagatttttcaattaaattccacattattcttccattaacccaaaaatatttttctgtttaacttaaataattaaattttttcattatttttttaaaatttatttatcattttattttagaacaggatttttgcttcttttataactgaatacataatactcgcacatttgaaattagagtaaaacgttctagaaatttgaatgtaaaatattaaaaaaataattgaaaattttcataattaatttttctttctcaaagaaaatttatgtttatttaatttttatatttttaatttctataatactatttattctactattattcttttttaaattaatttagttcattcttagtaccaactttcaattttatttataaaatgtaagtatcttcataatacatctttattgttaacattgctgtatattcaatatgattaactgtaattagtataaaataattttgataattttaattgttcttttctaaataaatcaattattttatttgtttcggttaaaagcctaggttcaattctctcgctcgggatatcataattttttctattttgatgagcagcatttttaaatttatttaattcgttatgttattttctattatttgttgccaaaaatatgaaaaattaatttcttttcaaattattcttcatcttcattttaagcattttttatttttattttgtaaattattcattgtttcgtttgtgaagctgtcttattttttaaaaacattttcttaattaatattctcaatttggtgggccattcaatctttttttacaattattatttattttttatattgtttatgttaaaattttaaaatatattcaattataaaatgtacccatctctcattattattaaaaattgctgtaaacataatttgtttaactgtaaatttcttataaatcaaaattttaaaaattatgtttttttgtcacatttatttttggttttttacttaatgattcattaagaaattattattatttttagaatttgttaattaaaaataattaaatttatagaaacattaaaataatatattaaaatcagttaaatttccaatctttttatttttattgatttatctgcaatataagcatttatgattataattttttaaaattttgctaattttgaataaaaatttaattattccattctataaccggaaaaatttaaaaaattatttgataatctgtagtttaagtcatatattttaattttatcatttttgtatttttttttggtttttcggttttatttattttataattgcattgaaatatgcttaaagttgatatatgttgtattcttttttttccactaacgacggctttcattgtcaatatttagttcataatgataattaatttatttaattaattgttttttattcacgtgttatctaattgcttccttttattattgaattcacacgttacatatatttttttcttaagctgtttacgcatttgggcaatttatagttaaattgttaatatttctatttatcatctttgagtttttttcaataaataaatttttctattcattcgattacaaatttttcttttatacatttgaattttcattttttgaaagtaattatttctttagttgagctatgactgaaagagacaaatctcatataaattttatgactttaataattcggtgtaaaaattataaaatgaaaaagcaaaacaaaataatagttaacaattttggtttttctatgttaactttcagttggaaagttttatttattgttattacaaatggtgtaattttaaaatatagaaaaatctttaaaaagtcataaactggcctgatctatatcataataattcccttttttcagaataatgagcaaatatttaaaattgataaatataaatcgaatttataaacataattttcattttaatgtataatttaatataaaaattacatatttattcatttattcaattatctgagtgagcggatttatccatttgctatgcgcacaaatcagatttaagttatttattctcgaaagtaaaataaattaatagatatatttaaaaaattaaaatttaacattaaaatttagaaa

SEQ ID NO: 25480 - DNA, 1134 bp, Heterodera glycines
aaaacggaaaatgccgaaaatggggtgccaatttttgcctttttttgaaccatggctttttaatgatgggcccgccaaataagcgccaagttttgcaaaccagtccaacttaaaaatcttccctccaaccattttccgctcccggcttctttccggcaaagttacagggcaccaaaagacgggcaaaaaaaatttcacgccgtttcagcgccgcgggcgctgaaccgtccaccggagcggaaaacccatatttttcccagatgcgcctcaaaaagttgtaagacccttccaccactttcagacccctcccgacagccgttcgactcaaattagtttttaagccgagtccccctttttctctatggtaatataaactagcgtgtggcgcagtaattgctcggtgtagacagtatgctttgcacagtatttgctcggtgtagacagtatacttttggtatatatgggcgggcgctgatatgagcgcttcgcgcaaaggacttcgttgctagtgcatgcgcgtttgataagtgatgagcaagtgcattcggccgctttgcggcctcagacgggccttgcgcccgttttttaattttgcgggggacattcggccgcttcgcggcctcaggacgggcgctttgcgcacgttgtttaattttgtggggaacatttggccgcttcgcggcctccggacgggcgcttcgcggcctcaggacgggcgcgtcgcgcccgttttttaattttgttgagaacattcggccgcttcgcggcctcaggacgggcgcttcgcgccaatgattaaaagaggtacaacagtgattacaagaggtacaacggtgattagaagaggtacaactgtgattagaagaggtacaacaggaaatagaagaggtacaacagtgattacaagaggtacaacggtgattagaagaggtacaactgtgattagaagaggtacaacaggaaatagaagaggtacaacagtgatcagaagaggttcgtttttcaaattttgttgggcttgggcgggcgcttcgcgaccgttttttaaatttgtttgggccagacgggcgcttcgcgcccgttttttaaatttagttggggccagacgggtgcttcacgcccgtttttcagatt

SEQ ID NO: 25481 - DNA, 1573 bp, Heterodera glycines
cagggatgggccgaggtttcgcttttcgcatttcgcctttcgcattattggcattttttggcgtttcgcatttcgcttttcgcatttcgctttttggcgcgaaatgcgacttttacacccctaagaattggattaaattcccataaaatttttcaaaattttacctataaattggctaattttcagtgaaaactgtttataaatgatcaaaatttccaatttttttccccggcggcgcctatcggcaccgccgcgcccccaaaactcctatttttctctgaaaatggcccaaaatcgcaaaatttggtaatttgatgaaaaactgttctcagcggcgcgccaaaactcttatttctcattagaaaaatgataaaaatcacaaaatttgatgattttttggtgaaaatctgtcaacaaattttaatcaaattttctaaaattttcccggcggcacctgccggtgccgcctgccccctccctcttcccaaaaagtttttttggaaaaagcgcgcctcaaaaaagcgttttattgatttttaaatttggaataaaattttaaaaaatgatttttgctttatgattttaactattaaaaatttgtagaaaaaatttcgcttttcgcatttcgcttttcgcattttcgcatattttggcttttcgcatttcgctttttttttcatttcgcatttttcagtttcgcaaatttcgcttttcgcatttcgctttttatttttcaatttggcccatccctgattcaaacagtgtcagtctgtttagttgttattcttcttcatttttcatatctttgataaacctaataaatgttaagatttttaatgattaaaaataaaaaaattaatgtttatctttaagtagtgattttttgaaatttttcacttcgttattttcgtcgttggtttttagtaatcttattgatattagtgaaattgaaatgaaaaatattatttttgactgcgcggcgcaaatgtccatttttactaggcggcgcaaatgtcgcggcgcaaatggagcggcgcaaatatccgcggcgcaactgtctgcggcgcaaatggcgcggcgcaagtgtcgactttgctgagcggcgcaaatgtccatttttgctgtgcggcgcaaatggcgcggcgcaaatgtcgcatcaccgcagaaattacggagttatgaatttttgaatttggcagaaaaaatttgtgcgaaacttggaacagaaagtttctaaaatttagaaaaaacaaaaatatatgggatttgattttaaaacttacaacaaatataatgagaatattctacaaagtgcggaagacattgtcttgaaatctgatgagaagacttgactttgattaaacaaatgaatcggtgcaaggaaaaagaagagtcaaaaaaatcccaaaatatatacgaaatatggacaaataatataaagtcctaaaggagtatgctacttatgatgttatataaaatcttagaatcttatttgtccacttaaatgaatagcaatttaaataataaatttactaacaaaagaaaataaataaataaatttcaattgaaaaaa

SEQ ID NO: 25482 - DNA, 1499 bp, Heterodera glycines
cggggggccctatttcgtctcttctctctcctccctcagggtagtttcgttttctccctagtcccaggggtgattttcgtcttctcctcatcttaggggtattttccagggttgttccgggttacccgaaacccgatacccaaaacccggcctttttctcgacccgacccgaaacccgacccgatgattttgggtcgggtttcgggtcgaaataagcactggtaagaaaggggtctgggtgaaaattagataaggaaattgagaattttttttgaaacgattgtgttcaatggaatcgaaaattttgtatttgtttttgttcattattatcctttttctaaagatattttgtatgaatttcttgaatttaagcaaagcaaatggctgaaaaacctgattccatttggttttatttccatcgtcctataaatggcgcaattcgctgcaaatattgcagtgccatccgcacccatgcaccagggttgttccgggttacccgatacccgaaacccggcctttttctcgacccgaaacccgaaacccgacccgatgatttttcggccgacccgacccgaaacccgacccgatatttttctcgacccggaacaaccctgcaataaatataataatttttttttcttattattacttaaattaattaagcgaagccatgaaatttaaaatattctctcctttttatcttctaataaatattattgtataatgcaatgttaaaagtaaaaacttattcatttatttatattcttataccttatcttaaattttaaattttcgaaattataaaaattttattttttacaatttttctttttacgtctgctgctgatcatttcgttgtttcagagctttgccaatgagtctaattcatttcataactttatctatcattataataataatttaaatttacagtatatgttgaatacatttttgtaaatgtttttttaataactattcaccagcatttgaattaaatttatgaaaaaaactgtattttttcttatttgctttacttttatttgaccattaaataatcatataactgacttaattgtataattgtttgattttttcgttttatggtttatattatttgtgtttttttaaataaatttatttggcttttaaaaaggaattcaattaaaatcaaaattctataattaattttcagttaattagaaaaatcaaaaaacattataatatatttaaactgtttattcaaattgtaatgtaataattgatgttaatgtgttcatcgcttgtctgttgcatttgcaattgacgaatttattttgtaaaataataatatatttatttgtttcaattaataaattatcaatataattgtctatgaaaattttttaaaaataaaataatttttctcatggaataaaatttgctttatttatcttattttatttagttgtaaattaattaaatatcatttttacacttctgtttaataatttttaggttta

SEQ ID NO: 25483 - DNA, 1144 bp, Heterodera glycines
aaaagcgcgccgaaaaaaaattatgtgaaacgtaaatctgaatttctataatattcgttcatttagtccaaaaatgattaattgtttgaaacgactgaagaaaatttgatttgaaaatttttattaatttaatttagctttaacttttggagtttattcaataaaaaacaaagtaaaaatttaattttgttttattttcaattgaaataaattaaaataaatttttttgaatttttaaaatttcccggttggtcccggttcccggtcccgaaaaaaaatcgaggtcccggtcccggcttctcaggtcccggcaagtcccggtcccagttttgcccaaaattcccggtcccgctgcactactttaaatcgcctgtggcggcacggccattttaatgttcttttttaaattaatatttataaattctgaaatataattttttgggtctttggcagatcgttaataaatttacttttacacacaataattgcataaataaacactcaattacattgctttgcataaatgtacaaaaaatagactgttcaaaattgttcaataatctcgaatggtcaaatgctcataagagtcccgactgtttcagtccatccattaaagctctgcttttgtacttttcgtccatcaatttttgaatttgttttgcctccgtttctttttggccttggcattttgttgtttttgctgttgttctgctgaccagttcgggctccacctccgttgtgctgatctcttcttcgttgctccactcaatcagcggcttccgttcgctgtcgcatccgctgatcgaattggaccttttgaatttctgtgaaaaaataacatattttagtttttggtttattttgtcatttgaagcaatttaaattattgaaatattcattttttaattttattgaagcaattattttttgaattttggttttcctttttgttcgtttgccaataatttccgcttaatatatgaaaatcgttatggcaacaagcaaaaatgtgaatttaaaaaaagcgaaatgttgaattttctcaaaaaatcaaaatttgattttctaaaattttatttctttctgtaaatgtcggtaactcttgggttttgaccccccctgaaattttttttaaagttttcct

SEQ ID NO: 25484 - DNA, 1026 bp, Heterodera glycines
  unsure (1)..(1026): unsure at all n locations
atctgttcatattatgtccagcacttntgatcaccaatctgtggtttgttcaagctccccggttacaactacatgttggtcttctgttctatgcttagctcattttgcagtttaatgatcgaaatcagcattatcatgtaaaaattagtatttaaagggctttaagaattagaatagactcggacagggatttatgagctgaaacactcgggattgggaaacaaattcgctgctcattgttcacaatttagtgacaattatctataaaaatgcatttaattccgtgcaggtgccatcccttcctgaagagagagttcacgcacatcatgaacagattcggcatcggttcgaggtagagaaaggcaaatcaacatttttctcttagcgcacattgttttaataaataccaacattgacgttgatatttattttgttcaacatacattatgccaccaacgctaatagcaacgctaattttaaaattggaataattttttaaaatttaaaaaacaatttttttaaaatgacttggcggaaaataaaatggggagaaagataacgcaaaaatgagagggtgttaaattcagccccagtcatacataagtagggttgtaaattatatggattaacatattttttctgcgcatatgctatgaagaaaggggcttaaaaatagcatttctgcgttaaaattttttgatttggtgaaggtttttagtccatataaatccatattttgggggttttcgggaataaatccatatttcgccatttttgggtttttagtccatattttggccattttttggaaattttcacaagaaaaatgaaaaaaaaacgaaaacacacccctaaagatcaactttttggaaatttttaaaaattacaccccacaaaacacgaaaaatttgagttttcgtcgtcattttggcattttcaataaatattttcgtcatttttttgcgaacatttatttttttaatgagaattttttcgaaatttggcaaacttggaggtgtttttgat

SEQ ID NO: 25485 - DNA, 1260 bp, Heterodera glycines
  unsure (1)..(1260): unsure at all n locations
aattcagcagtgttctggtataacgactttcggttcgttccaccccttgtgcaattgccccaaagagaatgctagtagttcttaattattgatgattcaaaaataaattgagcaattcaactcacagcgaccatcctcagaccgggattatttcctatcttttcacgcgcaagccgaaaaccttcgacacgttcgaaatcaacaatgtactcagcccgttgttgctcattttcacagcccgcaggccacccactcgcttgaactttcataccgacaaatgtgttcatgtatccacgaaacatttcaccatcccaagcatcataatgccaaacctatttttttttgatgaaatatatcttcatttgattagattacttcaaatagatccgtgactgtgtatccaagttcgagtgctttgttcaattcgacatgagtatacctgaattttttgacatagactttaaagaaaaaaacagcatacgctgagttccatgagcgtaaacggtccgtgtgtgtgcatgggcgctgttggcgaaaatcagcgcatcgtgcacagagaggaaaagtcagtcgtccatcattggtccggtacggaagcagaggaattcgtagagggcgaacatccggatttggtggtaaaacacaaacaaacaaaagtccgcgaaaagtgttgcaatttgaattttgccagggtaacggggccgttggaggacataagagaacctctcgcgttattacatgtggatttccaaccggaaactcaaatgctttcatcacataggggtaaaggctcacctcaaaacgtaatacatcttaaaaagcataatgtaccatccacttacaatgtcgatgagaatgatttcctcgttttgggtgcaaacgtgctgcagtgtaaatggctctgtgcgacctccacgtagggcatcttcacgtggatccagcgggcgagggacaaacgcatcattgtatagttgccgaagcatcggatttgtgcgcaaatttttcttcaactcacaaccccatataacatggagttcaagcccatgcgtgtgctccaactcccataaacgccgctgtgtctgctcatacagctcttcagcagtccttccaccagccaaatggcgctgacgttcgtttggatagcatttggggcaacctgagaaattttanagcttaactcggnccctcactacgncattaccatggtaataacaanccatgtactctatcgccacatttcgctgtggaggcgaacgaaca

SEQ ID NO: 25486 - DNA, 1771 bp, Heterodera glycines
agcgcatttctgtggaccgtcgctgccaccatttcatcacacggccaggggaactgatcaaacagccgtacattgaacttgtcgaggtgagttgccatgaaaaaggaggggttgcgattttcagctaattttttaagaaaaattgcgggagttttagggtccggcggtacaaatagacgccactagggaaatttgggttttccatttttagtgaaagttggtaataacattcaaaaaaactataatactttatatgtcagtgaattaaggctggttcggctttggactccaaagaggaaaagtcgtcggacattttgtggaaaatggaagaaaagttgcgcattaaagcggacgatgaggactcgcgtttgccgaccagcacaaaatgggacaaatacttcacgaaaacgttccaatttcagcgctgccaaataaggtgacccaaggaaaaatgaactggatgtgccaaagtttcccttctgtttcccagcaagtccaccttcaatttggttgtcgttctgcacgatgtgttgcgcgcggctgcggagacggactcggagatggaggcgagtcggctggtcaccacagcgcggaacattgtcgaaatgtttgccaccactgcgcccgaataccaccgactcactctttcgtccgtcccgcacatggccggtgggtgtttcagctgttttccatgggaatgtcctttttctttcattaatttgtgcctttaatttcagctgttttcttcaacaattgtcatttcattgtgcaccgattgagcacactttccgccgacattttgcagaacattttgacagtttcgaaggtttttttcaccgttaattttgtaaaatttgacagaaatgactcattcattgctgcctatcaattatttttcgtaaatttatcattcagatcactgggcaggactgcgcgttcaccgatttgttcaccgaactgcgaattttggctgccacgactttggagcagcacattacgcaagcgcgacgccaactttcagccacaattggcgaacacgacagtgagtgggaggagggaggggaaggaagaggcacttcattcctaaaaaagccaagataagccagaccaaatgcttcccagatgtggcacccaaagccctgacaaaatgattgcaactttggaaacccgaatgaaacagaaaatacttttcaaatgtcatggtcggaattttagtttttgtcggtttgcgtgacgacagaacgaacaaacactgtgtaaagctgctcaatggctgtgtgatgcaactcgagcagactgcttcagtttggcgagaggtgtgggaaaagagtgaatttcttaataaaatgccaataaacgcatcaattttgccgcattttcccaggtgctgtccgatttcgtgctgacgcattgtgtcggcgagttggtttcgtatttgttgtccgcaatggcgaacataatcctggccaaggaggacatcgcctccagcgacgcggagatttcggccaatctgctgaccacgactgtcgaccgctgcaagaaattgatggaggtcggcatgcttttgcggcgcttttcgatttacaccgaaaattttacgcaattgcttctgacccccgtacgatttacgaatttttagattgactgtcagccgacaattcaacgcgcgtgcgaagaaccctaccacaaattgcaggaaatcatcttttgtttgaatggcaatttggctgtgagtactaatgtcatcccaacattttccaacttttgccct

SEQ ID NO: 25487 - DNA, 1835 bp, Heterodera glycines
cggttttgtggcctgatttttaaaaagtttggagtttggctaagatttttgcatccaaaaaaatttatgaacatttttcttttcgtgcccttttaggcccttcaactttcgtgtttcaccctttttacgaattacttctcccccaccattttccgacagattgccactccgttgcgttatgcctgcactttggtcggcattcgtatcgctttcaacactttgcgtcgtctgggcaaattgcgcaccacgcgcgagattgacctgacggtgcgccaacggctcgacctgctcattgagcaccgggatcagaaacggagtgccaaaagggcggtacggcatcagaacagttgagttttgccatcattcgcaggagcagatcgaaatatctgtccagattcaacaaatctctaaaaattcaaaaaaaaatatatatttttttcgactacggatgggccacttttgggacttgtgattttcccccaaaaatcactttagatagcatgaagaggcattcactgtgttcctcgcggacgaggacaaagttggactaattagtgcctttgaacttattgttgtagcatagagaactgctgaccgacaatgagtttatttagtctgtccgttttgtttggttttgttttgtttattgtcattgctcaaatgatgcgccattgtttttctttcattaaataaatttaaataaaaattgttttgcttttttcctatttcaatgtgatttgctttcgctgtaagttcgcgattcaatttgcctttttttacattattttccactaatgtttctttgctttttctgtttgtttcttcctccacaacggccgacggtgagcagcgaaatttattgcctccttttcccattattttaatgcgttttcctatcaatttaaacaatttgttgtgtatttatcatttccatttaattgattttccgtcccttttcagaaatttgtcccccacccattgcgatgagcgctcggcgtgtgctggtcgctgttggtcagctgaatgtgcagcacgacttgcagcagaatttcgagcgatgtgcgcggatggtccgacgggcgggcgaacggaacggctgtaaggtgggaggactgaagaggaaatggtgaaaataaatggacaggaaggaaacaagcgatcccacagcattcaaaaattaaacattttcttcatgaaaaaaaactttgtaagccggggaataaattgaaatttctttgagttagctataaaagaaaatgtattcagatggttttcctgcccgaatgcttcgattacattggccgtactgttgccgaacagattgaccaagcgctggatacccgtggcccatacattggtaaattccgcgagttagccaagcagcatggcctttggctgtctttgggtggcttccatcacaaggtgaatttgttggattttcatgggtttcatttccgggaattgaatttttcagcgtcccgaacttcggtccgaccatttgccccgaaatacgcatttgctgattgactcggatgggcaaacgcgcgccgaatatgacaaactgcacctgttcgacttggacttgccgggcaaagtgcgactgatggaaagcgaattttcttcccacgggcacaaagtgagaggcgtcccacttttttatatactttggcattttgtgacattattcattttaaatgtgtttaccctctccccttttttgagttggtgtcccaccgttgctgaaacgccggtcggtcgccttggcctgtcaatttgttacgatttgcgctttcccgaactgtcgttgtaccagcggaacagaggggcccaggtgc

SEQ ID NO: 25488 - DNA, 1003 bp, Heterodera glycines
caaaaaatgtacatcgatttaagcctcggacttgatccatgtcaatcagccgcgacattcggtggaagttgatcggagaatagcctgaatttggcattttggcataaattgtgccaaaaatccggcatttaaaaaataattaaaaatatttgcatttttaaatcaaaattccatttttccaagttttccgaccctcaacatccaaaaggccttcgttggccccgctgtccaacaaaatgtcgaagcattccaactccgcagcatcgcgcgacttctctttgtcgtcgccgccgcttccgtccgcgtcatcctcgcgcaatgttcctgcaagtgccgcggcataatgcaacgctgtacggccctcctaagaaaatttttgaaaaatttaattgaccctcacgaaaaaaagggaaatttttaaatttttaattgacgaacggaaaaaaatgaaatttttaaagtttacgctatcccgcgcgtcaatgtgactcccgtcctggtccagcaaagctcgcaaaatggccggatgctcataaattgcggccaaatgtatgatggtggccattgtgcgcgggtgacgagctgaaaattaaaatttgaaggccaatggccttgcgcaatttttggaaaattttaatttccaaaattcaaaaggatggaaaaatattagaaatttggaagttgtaggcattttttgtgaaagattttcgaacttgaaacagagcatttgataaatagttgaaatttggaaattgttagctaaaattttaaatttttgaaaatttaatgaacgaagtgtcaatttagattttgaaaatctcaaaaataaatgaataaaattaaaataaacttatttaaagtaaataattatgaaaaattgaaaatttgcgcgaaaaactgcaatttaattgcataaaaataataatcaccgcgcataaggtgccgaaaatccatcaatttgtgtacggttggctcgtccccttcaacaattgctggagaaaaa

SEQ ID NO: 25489 - DNA, 1629 bp, Heterodera glycines
agttgccaaacgatggcatgacccagggggaatcggtcgttttggcgccgccgtttggtgccagtcaagtgaaaaaccaatttgtttaaacgcgttgtgcatacctttttttaaaatttttctcgatttcagcacataaaaaaacctataaaagtggttttgtgagtttctggctccggtctgtcaagtacatatttacacatatattagtacataatatacagacaattccgggctaatatacaatatacagacaatttcgggctaatatacaatatacagacaatttcgggttcgctatcacggtgcatcgcggtatttccacgcatctgtcggcgccccggatccctctctgacaaagtggcgcgcgctccatggacgtccctgtcgtttgcgctctgcagaagccgcacgctcgcgttgttcaattgcttgcttgactgtaggaagggaaagcattaattactccctccatgcaatttgaaccctttcaaaactcactctgtctcgaaaggggcaatttcttcttgtacaatgctgcagtgagatgacgccaaagctttcggctctcattcctcctcttgctccatcacccgaacgcactcctgacaaaaataaaaagattaaattcagcttaagtgaaaaatcgaaaaaatccctaccttcttgcacaaaggaaacaccttttctcaggtgtggtttcgtaagccgcttaccaattcgtctggatgggctgaaaaatgagacggagccggtcaattcagtgccgacgattcagtgccgacgattcagtgacgacgattcagtgacgacgattcagtgtgaagacgattcagtgccgacgattcagtgccgacgattcagtgtacgttgaaaagccgacaattcagtgccagaaaattggcaaaaaattttcaaaaaaaacccctaaaaatacaatataaattgaagtggttagaaattctgtctgatgttattgttatactcttatgctaaatcaatccaaaattaaaataatgacctaaatatgtttagaatcaccggtgctactgtaaaggaagaccttttggaaggttctgcggaacggattaccctttgggttacgagatataaaattgtgctaaaaagagatagccatttttctgagaattaattcacaatttccgcaaatcttgcggaaaagtaaaaaattttgaagaggctctgcgtaacggattagcatcggtgttacgagatagaaaattgtcctaaaaagagatagccatttttctgagaattaattcacaatttccgcagctcttgcggtaatggaaaaattttgaagagtctctgcggaacggattagcatcggggttacgagatagaaaattgtcctaaaaagagatagccatttttctgagaattaattcacaatttccgcaactcttgcggtaatggaagaaattttgaagaggctctgcggaacggattagcatcggggttacgagatagaaaattgtcctataaagagatagccatttttctgagattaattcacaatttccgcagctcttgcggtaattgaaaattttgaagagtctctgtggaacggattagcatcggggttacgagatagaaaattgtcctaaa

SEQ ID NO: 25490 - DNA, 1135 bp, Heterodera glycines
aaaaatggcctatctcttttttaggacaatttttctatctcgtaaccccgatgctaatccgttccggagagcctcttcaaaaattttttccattaccctaagagctgcggaaattgtgaattaattctcagaaaaatggctatctctttttaggacaattttctatctcgtaaccccgatgctaatccgttccggagagcctcttcaaaattttttccattaccgtaagagctgcggaaattgtgaattaattctcagaaaaatggctatctctttttaggacaattttctatctcgtaaccccgatgctaatccgttccggagagcctcttcaaaattttttccattaccctaagagctgcggaaattgtgaattaattctcagaaaaatggctatctctttttaggacaattttctatctcgtaaccccgatgctaatccgttccggagagcctcttcaaaattttttccattaccctaagagctgcggaaattgtgaattaattctcagaaaaatggctatctctttttaggacaattttctatctcgtaaccccgatgctaatccgttccggagagcctcttcaaaattttttccattaccgtaagagctgcggaaattgtgaattaattctcagaaaaatggctatctctttttaggacaattttctatctcgtaaccccgatgctaatccgttccggagagcctcttcaaaattttttccattaccctaagagctgcggaaattgtgaattaattctcagaaaaatggctatctctttttaggacaattttctatctcgtaaccccgatgctaatccgttccggagagcctcttcaaaattttttccattaccctaagagctgcggaaattgtgaattaattctcagaaaaatggctatctctttttaggacaattttctatctcgtaaccccgatgctaatccgttccggagagcctcttcaaaattttttccttaccctaagagctgcggaaattgtgaattaattctaagaaaaatggctatctctttttaggacaattctctatctcgtaaccccgatgctaatccgttccagagagcctcttcaaaatttttttccattaccctaagagctgcggaaattgtga

SEQ ID NO: 25491 - DNA, 644 bp, Heterodera glycines
caataatcgcaaattgccgtcacttttgggcagatgtgctcttcgttgggctatcccccccccctcccccctttaattcggcccatttccctttgtaaatgccgctctttcccatcgcttccggcttttatagccggaaggcataaatttgcgccactgatcatttcattaattgccctcgggattttctttcttttttacccttaaacctttctcattcattctccaaaagcccttgacatttttgcttcagctgcaaaaagagacaattctcagctaattaactgccactcattggccgcagggaatgcaaaatgaggcgggagaccaaagagaaaaggtcaaagaatggaccacattgctttagcattgcttccaattaaggtgttacattaggcaaatttgggtggctaattacccataattaattaatgccaaattaatctcagccctatcgatcgattggtcgtgcttttctctctcctccattatttatttgcttttcgtccttttccaacttcgttttgcgtttgttctgtcgcgtgtctctctctcttctctttgccttatcactttcttctgtccctttggctgtctcttatcgtccaaatgcaaataaataaactcaatttgccagatttagc

SEQ ID NO: 25492 - DNA, 464 bp, Heterodera glycines
aagagtggtggaagggggggggggagggactagggatgggggagggggaggggtcattgaaattagacttggaatggaaggtgatacgggggagagggggagagaggaggggatgaagcgggagaggggggggggagatggggacgagtgttttgaaccttccgggccattgaaatttaacctttgataaaaggaacggaacataaagcgaagagacttatagcacaaagtcaaaagaggagggtgggggataatagctagcaaaagaaaaagaagcgcagaaatggaatttaaaatgaataatgaatatcatcagtccttaaatgttcaatttatgactaatcaaaaatttgcaatttttcccccccccccctctcttttctctctctcctctttctctctcttgccaacctctctcttttctttctatctctctctttctctctctgactctagaggtcccc

SEQ ID NO: 25493 - DNA, 1133 bp, Heterodera glycines
ctaaattgtattaaaaattaccgtatcattttcaaatattttcaaataagacactcataggaaatgccaaaattggaattactttttttgtgaatgattttggcgttccaataagaaaatgttttatctgcagcaacaaaaaataaaaaaaaacatttctgacgtggaggccaaaaaataatctatctttttttttatttgtttaatttgtgtgctctttttgttcgggttttaatcatttatgtaaaagcaaccttctcaagttccaatttgataattttgaagttcatttccatcttggcacacttttcacgaaattccttttaatttttttaaattaatatattaatattaattttaattgctcacttttggctgctgctgaacagtgacttttccatcagattgtccatcgttgtccaaactaattgattcacaattaacttctgaaaatcatacaaaatttaattcgtaaacttaaattaatatttattttcacacctaccaaaactcaatttactttctacggtttctttctctttttctcattacctccatctgttggtatgaaatcgccatttgttgaattggtcgaaattgacatttttaaaggtattgaaaattcaaattccttaaatcattttcagatgtttttttaatatataattattatttcgataaaatttcaaagaataaagaaatgagcatttatttttctgctgattttttaaatattttttagggtcaattaagaataaattgaggcaaaatgatgacccataggaattattcatatttaaatttgccattaaaaactgtgacctaataattgaatggatgaatgaaagaataaataaaataaaaaataataatctcctctgattgtttttgatgacttggttccttttttgccttcgactcgttttctttgcgaattaaaagtgattaattttgcgaaaatgtgtctataaaaaaattactgaactcaccccttgagtcgagtttggcaaaagttatacattccgaaaaattgtatttttataagggaaaaaattaattttccaattttggaatttttttttttttattaatttttggccacaaattttttggaaaaaattaatttttttttt

SEQ ID NO: 25494 - DNA, 2032 bp, Heterodera glycines
atttcccgagactcgagaccgagacttgaccccgagactcgagaccgattccgagacttgaccccgagactcgataccgagaccaaaaaaacccgagacttttctcgagtcgagaccgagagtctcgaacatcactagtaaacaccatcatttttatgctcacaaattgaaagataaattttatttttcataaactacataatataaaattatgcataatttacagcttcctaataaaaatatttaatgtgatcgatctattgactgctcgattaaaaacaaaattgatgatcaatttaaattaatacaaaaaaataatggacaatatcatttaaaaatattttcatattttatttttaaaaaatgaaaacattcttcgtattaatattatacgttttattattaaaaaatgcaaatgaacaaactgaagcaggcaaaataaacaaagaaaaaagttttgatcaaatatttggccaaggatgggacgacggagaagaagaaaacatttgtcgaattgatcaaatatttaatggacagacagctgatcaggataaccaatttgatcagatttttggtgaaagtttggaagtgaaagaaggggagagtgaagaaatgtccacaaacagtgatcaattggaacaattgcaagaaaatgttggacaaatttctgatcatttttcaaatgctattggtaaaaagaaaagagaaattgtggaaaaatttgataaaattaaagaaaaagttaagcaaatgggaaagaaattcacaagaaaagaatggcataaaattgaaagaaaaattgccaaaaaattgggagtaaatcaaaggaaaatttacaaatggaaaagagaatttggaatgatgataaataaatattctattgatgaaaagcgtgaaacagtaaagcgatttgatcaaatatatggcaaatttaaaatgaaatttaatgaaaatttggagggaaaaagagaaaaatgcaaaaaaataatagcaaaacatttgggcataagtttaaaaagcatttataaatggaagaaacaattaaaaaatggaaaacctttgaaaaatcaacaaattgatgatgaaaaaagagaaattattgaaaaatattttaaattaaaaaatgaatttatgcaaaatgagaaacattcacgaaaagaatggaaagaatttagtgcaaacattaagcaaatatttggaatttattatagaacaattgaaaaatgggacaagaaattcggcattaaacaaaatatttcaaaaggtgaaattttttaaaagaatttttaatttaattatttaaatattaaagggcggaagcattatacaattgtcgaaaaaatggaaataatgaaacaatattttgaattgaaaaatcaaaatccaaagctcaccaatggagaaattggcgaaattttgaatattccaaaaggatcattagaaagatataaagcggaattcaagagaaaaagtgaaggcgttccgaatacggaatgattgagaatttatttcaattttcaggttttagtcaatgtgttgttatgtttggtaaatttttgtaatttgaaagaagaatcaaaaaaaggctggaaaaatattttaataaaatattaccaggaactcattaaatttataaaattgtaaatttgtgatttttgaaaaaaattcggttgaaagtcattcaaaatgccttcattttttaaaatttgtcatgaaaaaagttgttagtaataaaagttttcataaaatttatatagttaaaaattaaaaaaaaattaaatattccgatgtaaattttattgtaggcaattgtttttcaattattttaaaatgtttttttcttactaaaattttactatttaaatttctttttacgcataagcaccatttatcaaattatagttcgttgaacttttgtgaatgtctcgacctcggtctcgagttaggaaaatcgagaccgagaccaaaaaaacccgagacttttctcgagtcgagtcgtgaaaccgagactcttgaacatcactggttgtaa

SEQ ID NO: 25495 - DNA, 1887 bp, Heterodera glycines
  unsure (1)..(1887): unsure at all n locations
aacattgccatccgaccataaatgccaataccttcgtctgttggcaaatccatcgcactttttggcgcctttttcgcttttccactcgcaataaatggccattcattcatttcgccgagcagattttgttcgcttcgggccgagctccgcttccgtccaaccaattgccattctccaattattaatttattaattagttgttaattaaggtttcccaatttcaattctttgccttaaccaaccgttttcttccttttcctttttttcatttattcgccgattgtccccgacattctcttcaactttggttgtttgacttaagcaattaaactgatttattctctcctcttttgcttccccttctcctaccattccgcttcctttacattttttgccgggggtgccaaattattttttgcgtttgttccgcggatttcccatgcgattggtaccgtcggtcttctgcataaattaatgtctgacaagtttaataacaaaaaaaaacagcacttttctagtttactcacaaaaatccaaaaaagaaaaagaaaaaattatttttagagcaaattagggactataatcaaaaaattttgtacaacctgaatctgaacccgatactcgaatataaaaccgaagaatttttattttatattagagcggctcaaaaatgcaaactaaattaatgatttctttttgattttaagcaaaaaataattaaaatattgtaataatgatttaaaaacgtggtacttttccgtttggaaccgcacattcaattttttttttgtccaaattgctgctttcctctcaaaaagtgaagcgctgttctttaatattcagtgcgcaattgaatttatttaattcagttagaagttaggaattacatttttactctaaaaatatttttttttaattttagcaattattttgtgatataaagcagaaaagtaccaaagaagcgaacttctcagaattctcccaattctgctcaattttaattgtatcgatcagactgagaaagtcgcgaatgccattttttaaaaacataatcgcttccttaacaaatttaaagggattaattaatattggtcggttggtcccatcggttacctcacagcccaaaatattttgctgaattcggcagatttcgtacattgaatcgactgatgcttttagagtgtcgatgcagtagctccattctcgggcttctcgaattttgtcagatatggacatttgaaattgaagtaatatttgtatttttcgttatttttttatttcttaaatgctttaagcaattccatatttttaattaaatttggcattatggcattctgaatctttttaaaaaaaagtcagccaagtgattgaagattttatgctctcatgtgatttgtaagcaaatttttgtcaaaatgagtcatgacaatggtaacaacgcttttcccgccgcctcgtccatttacccctcccttccgtcggccctttgcgatgaaaagccttcccccgccgccgttttgtcccattgcgatgatatggaaggcatcagtctcttggtaaaagctgcggattttgcagctcgtagacaccgtttccaaaagagaaaggacgagcggacgccttacataaatcacccaatcggagtcgccnctctgctgataaggtaaaacttttgccaggctaattcgaacaaagcgaagtctgccgcttttgcagcgttgccaaagtgtacgaccccgccacattggctgctgcttatctgcacgatttggtggaagacacncaaacgacgtttgaggagttggaacacttttcggnagagagtggcggaaattgtcagagaatgcaccgacgacaaaaacttaccgaaagatgtgcagaggaaaa

SEQ ID NO: 25496 - DNA, 1167 bp, Heterodera glycines
tgctgctttttgtctcctcacattgtcctgaaaaaacaaatggattttgtagtgttcgttatattataccgaaggttggagaagagtttggcgctctctgagaatttcgacctgaaatgctttcaaaaaaagtccaaatgttttcattttgagaccggctgcgccttggaagcgacggttgtgttcccaccagcgaccgttattcggcttggcacaaacatttcgggtttcgtctcggacttcgcgcgatgtctcggcatcccagccacataaatgtggtcgggcacttccattggacgatgaaactcatctgagggcgaatttgaccggcgacatttcctaaacgctaaatttaataagaaatgaacgaatgaaacgactttcgcttgctttgttgttccccggttttgttttcttttgccatttagtggattttacaatcacaatgactgttattatttcttaataaatcaaattatggagaaacatttgtgtaaagttgtgaaaacatgtttccgtgggttttcggggcccattgatcacgaactgcattcattcgactaattccgaaccccgtactcgaattcgaataaaaaaacgaaaaatttataggtatttctcaaattagaaattgtttaaatacttttttggcgttctgtaaacttaggtttcaaaaagttaaagaaattctcgtattaattctttttctggatccaggtccgggatatttttcgtagcctgtgtttttcccaagacttgaatttttgaccatttagaagaatctgaaaacctatgaatagatccacatatcacttttaattgtatctaaatgttagcctacacttgcgtcacggcagtttgaagctcagtgacagtagctattttataaacaacgcatacaaaaatcaaatttactgaattcaataaaatttattcgaataacaaatctttaaaagagcagcaaaatcggtgttaaaagggaagggacagctggtctgacagccgaaacgtatcgggggaagtaaaactggtaaacaacaattaataagagaggaagtccacccaatcaagaaagcaaatctgatcgatggtctacaattatggcagctaataaatgtacaaaaatctgaaaaaacaactaatttttggtaattttcttttattcat

SEQ ID NO: 25497 - DNA, 1765 bp, Heterodera glycines
tgccaaaactcaacgtaaatttttcaaaaatctgctgtctgttcaggtacagctattcgggcattgcctactcattggccaaaggaatgtccatggaatgggcgtgccattctgaggtcggactgatccggcccgacttggtgctattctttgacgtggtctgtctcccgccccctttcagacccgtaaccttcgggggaggggcacccaatggatttgttgggaaaaatgcaagaaaatggacgggaaatggcacttgtgaagttcacgaaggacgactttggcatttaattactttgataagctcctccgaaactatagtaggtaatagccggttcattcttttgctgtatgtattacataatttatgctattttatttatacaatttttgtacattttcaatatttattaatttattcattcggtctttgtaaaaaaatgaacaatgaatcatttgttgggatgtgctctattcagtgatgtggtgaaattacacaataaaacattgtcattagagctttaaattgctttgctgggaatggaatgcgttttaagagggacggcaattataatgaaattgaattaattacaaatgatggaaattaaatgaattaattacatacaaatgattaaaatagatcgatggactcatccccgaacctctcctcacgaccccctttaaatgaatccccactttcgatgcttcttcgtccgctgagactgctttcctttccttttcttccatcagagtcggtcctttgtctgtctgtcgtccctttgtccgcttttcatttgtcctcctcttccgttgtgtctccgccgccgcgtctcttttccgtttcgtccgtttttcgctgtgcgctgatgaagttgcgtatgctgctgaatgcgcttccgccgcccatctctccgtccgcctgcgtttggtggtggcgtcgttttccctccgtcggcggtggcgcggcgttcgcttccgccgctttcatttcgctttcccttccgccgccggcggcgttcatttcattctcgtgcttcttcaaatgtcggtccaaatttgtttgttgcccgaagcatcggtcgcaatagtgacagctgaagcaaatgaattgatcaatcaatcaataaaccaatcaatcggttgatcgatttattaattgcagaatggagcaatttgaccgactgaattaaacaatctaatcacagttatttaactggtctgccaaaaaacataccgaaatggcttttccttgttgtgaatgttgcgcacatgccgctgcaaattcgagctgatggagaaggaccgttcgcagtattggcactgcaaatatgggaaattagtccaaaatgtaaaccttttccctctctctccccctcgctcctctctctctatttctctccccttctctctccctccctccctattctctctctcctctccccccctccccctccgctcatttctcattttgctcactttgtacggctgttcgcccgtgtgggtgcgcaaatgccgcgtcaaattggccgaacgcgggaacactttttgacagtatcggcactgatagcgctctttgccaccaccgctttccttcactccgtccgccgatcgattcgaagcgccgttcgaacgccgcaagtgcgtcacggagtcggaggcccttttctccgcctgttgcgttgagctgccagccgtttggtttttgcgcttcttctgctcgctcggccgataatgggttgggggagcggcgctcagttgggcggtt

SEQ ID NO: 25498 - DNA, 1080 bp, Heterodera glycines
gcaagaatttttttcgttagcatttcaaatatcgtgtgagtgtttcttgaggtagagccagactagagaaggcaaatgttggtaccaagtttgcggtcaaatccccaagagaaaaaagagatagccattttttcggcaagaatttttttcgttagcatttcaaatatcgtgtgagtgtttggtagagccagactagagaaggcaaatgttggtaccaagtttgcggtcaaatccccaggagaaaaaagagatagccattttttgggcaagaatttttttcgttagcatttcaaatatcgtgtgagtgtttggtagagccagactagagaaggaaaatgttggtaccaagtttgcggtcaaatccccaagagaaaaaagagatagccattttttcggcaagaatttttttcgttagcatttcaaatatcgtgtgagtgtttggtagagccagactagagaaggcaaatgttggtaccaagtttgcggtcaaatccccaagagaaaaaagagatagccattttttcggcaagaatttttttcgttagcatttcaaatatcgtgtgagtgtttggtagagccagactagagaaggcaaatgttggtaccaagtttgcggtcaaatccccaggagaaaaaagagatagccattttttgggcaagaatttttttcgttagcatttcaaatatcgtgtgagtgtttggtagagccagactagagaaggcaaatgttggtaccaagtttgcggtcaaatccccaggagaaaaaagagatagccattttttgggcaagaatttttttcgttagcatttcaaatatcgtgtgagtgtttggtagagccagactagagaaggcaaatgttggtaccaagtttgcggtcaaatccccaagagaaaaaagagatagccattttttcggcaaagaatttttttcgttagcatttcaaatatcgtgtgagtgtttggtagagccagactagagaaggaaaatgttggtaccaagtttgcggtcaaatccccaggagaaaaaagagatagccattttttcggccaagaatttttttcgttagcatttcaaatatc

SEQ ID NO: 25499 - DNA, 1044 bp, Heterodera glycines
gcactctgataattttagcgttcataatggggatgtataaaggcgattgtagaaggaattggatgcgctaaaattgtttgagaagctttttgagcgtaattacgatttttacttagaccatttttttaaggcttagatcacatgcgattttcggcactctgataattttagcgctcataatgggatgtataaaggcgattgtagaaggaattggatgcgctaaaattggttgagaagctttttgagcgtagttacgatttttacttacaccatttttttctaggcgtagatcacatgcgattttcggcactctgataattttagcgttcataatgggatgtataaaggcgattgtagaaggaattggaagcgctaaaattgtttgaggagctttttgagcgtaattacgatttttacttacaccattttttgctaggcttagatcacatgcgattttcggcactctgataattttagcgctcataatgggatgtataaaggcgattgtagaaggaattggaagcgttaaaattgtttgagaagctttttgagcgtaattacgatttttacttacaccattttttgctaggcttagatcacatgcgattttcggcactctgataattttagcgttcataatgggatgtataaaggcgattgtagaaggaattggaagcgctaaaattgtttgaggagctttttgagcgtaattacgatttttacttagatcatttttttaaggcttagatcacatgcgattttcggcactctgataattttagcgctcataatgggatgtataaaggcgattgtagaaggaattggaagcgctaaaattgtttgagaagctttttgagcgtaattacgatttttacttagaccattttttgctaggcttagatcacatgcgattttcggcactctgataattttagcgctcataatgggatgtattaaaggcgattgtagaaggaattggaagcgctaaaatttgtttgagaagcttttttgagcgtaattacgatttttactaagaccattttt

SEQ ID NO: 25500 - DNA, 1615 bp, Heterodera glycines
tcaggaaacctccagggtgaaattccaaatattcgcgttacatcgtacacctaaaatggcaaagaacctttttaaacggaaataataaatgcaaggatggacctttaagtaccatgtcaaacaacaaaatccaacaatcgtcttcagagttatgctttgaaagttcgtcttggtcaaccgaacaacgcacattgtgagtggtcaaacgaccagcatttgacaatctaaaagaatttagggaacatgccttagggcctctcgtaagtacctaatccagtcgaggagtccttttccgggttttaactccactttctgtcttttcatcttaatgtctctgtctacgcaggcagcggcgggtggtaggggcagacaaaggaaaagtaaaagaaatacgataaaagaaatgaaaaggagagacaataaaatttgtctcgcattccttccttatttatatcccatcttttattatttaaaatatttaataaaagaaagaggaaaggaatgcccattgaatccgctttggccataacaaaagagaaatctctaaattttaaatttaatatatggatgagttgggtgtatagatgagttgggtatggatgagttgggtgtatggatcagttgggtttggatgagttgggtgtatggatgagttgggtatggatgagttgggtttgactcccgagcggttcccgtgcgggggatcgattaagcgggtggtgcaaatatacccaaaaagaccagggaaatatccagaaaagcccataaattataacacgattgtctccattgagaaaaagagtactttaactagctaataaatgaaacactttagggtaagggatgtcttcggctcgacttccgaaggggtcgaacgaaggaacgccaagcagtgacgaaggggagttcaaaaaggtgggtttggaacgaaatcgatcgaaagctgcattgggttatcgtaacttttcgcttttcagattgtgatcggaatatgcgcaatgcaacggaaggccaacagcaagccgatgcgttcgatcatgcttaaaatgaacgagttctacaaggtatttaccggcttacaatgaatgcccttcatctctatttaaatattttccaatattttataaaatgttttacccttttaggactttctcgattttgtaatttttcccgaggaaaccattctcaatgaatcggtggagaattggcccctctgcgactgtctcatctcttttcattccaccgatttccctctcaaaaaggcaattgaatatgaaaaagcgagaagaccttacgtgttgaatgacttacaccgccaatttgatttggtaagttattattttaatttagtaaaagtgaaaaatactgacgggattgaaaatgtatatctctaatgaaagaatctgaaagaattttttggcggcaggaactccctgaagagttacagacccgggactgaagtggcaaaatggcttttgggactgaaccgtccaatgtctaaaaacatgaatctccaacataacatacagaaatagattatttttgtctctaatgtagaatatgtgacaattttgaacaaaggtaaaccaggaattcccctttttggggaatcttt

SEQ ID NO: 25501 - DNA, 1701 bp, Heterodera glycines
ggagtagaaacaaagagaattgacaggcaatgaatgagggagggaaatgccacttcagcagatgcctttttcattgggacttccgttgaattttgctcaaaatgccaataaatgccaaaaccaattaaggcgtgtaattcccccaatccgggcgatttcgtgacaatggcaaaatgatagggacccaattaattttgcggcacactcaaagaggcgatgaaatgctgccattcgccagcagacaaagaacggcacaatagccattccccccacccccgcaatttcctgtccctaatgagctcctctctcaattcgctcattttgggagaaatcatcgatttattgttattgttgtggtcaatgaatgcttgttcttttccccattgaattcattatgcttcttccccgggttgccctgggacatgccaaaatttagccctaatttgaacccccgagggcacatcaatccaattagtcacgggaagagaaagaaaactgtcctcaaggccaaagttaagtggattaaaagtgaatgaaatgaaagtggatgggatgaacacagcaaagcagcagcagaggtggaagagaaagagaggggaggggaaatgaacggggaaacgtaagggggaggtaagggaaaaaggggagacggaggggggtaagaaaaaaaaacgtgttaaggaaaacaagtgagggggggggggggggggggtaaaaaaacttgggaaggtttgggggaaaacggaaaaacggataaaaatggaaatgcctaattttctcatttgcctattagccgttccttttaaagttccttgccatttttgtcggctctctttaattttccgttgacttcgaaagggtgccaatgattcgttccaatttaacttcggttgtccatttaaacccccagcagcaattccattatgtttttacaaaactgctcaattcgattcggccgtccacttgaacaattagggacagaaggaaagttggcagaggaaaagcacttgagaaggcaaatttggacaaatgttgttgccgggggaaggaaaagaaaggaagggaaggcattgattgtgccgtgccgaagaaggatgttgccttttggacgaactaatgaggcgaacagagcgcggatttgaatatgggctgaaggaatgaatggcaatttggggtgggggttaatggggggacgatggaggacgacgatgttgtttgtttgtttgttttgttgtctggattaaccaaaatttgcgcggataatccctccccatttttgggaccgaaaagcattcggaaatgactaatgaaaatgcgaaatgattggttgacttgttctgcttggggttatgccagaaaatttttaaattttcctttacagatttgcggaagcatttcccccaggggccaatcgctcggcgggtcgaagagggaaaaacggtgcaattgcactgtcagccgccagagggcgacccacggcccgaggtgggccaaaatggtatttaaagacgaaactgagccatttgcgcaggtccattggaacaaagacggccaagcggtaaacttcgcccctggcggcccgctgattcaggcggccgacggaagtctgatcattagtgcggcacggttggcggactcgggcaattactcttgtgaggcgcgtaacccagcaaacagacgcatcagtgaagcagcacaact

SEQ ID NO: 25502 - DNA, 1228 bp, Heterodera glycines
ccccgacccgagacattttttggaccttttccccgacccgacccccgacatgtcgcccccgacttccccggccctcgactttttgccccccgaccccccgacactaattcgggggattggggactcttgaaaatttttgaaattttgaacaattttcttaataaaattaattaaaaatttcgaaaaacttttcggcggcgcctatcggcaccgccggcctcccaaaactccaaatttttcctaaaaattgcctcgaaaatcacaaaatttgacaatttttggacaaaattctcaacaaattatattcattttcaaaaaatttcccggcgtcgtctatcggcaccgccggacaccccccccaagttttcaaaaagtttgaaaaatgcaccactaaagttgtcaaatttttgagattaaatttttgagcctcggaattgatttctgaaaatttttggagcctgagatgccgggaaagggtcgtttcggcggcgcccacgtttcggcgctttaatttatttcaggtgaaaataatacaaaattaaatttttatcttgttttttattttataaaatccaaaaattaaagctcacatcacttttttcggcacgctttttccaaaaaactttgggcagataaaagtggtccggcggtgactgataggcgccgccggggaaaattttggaaatttgagtatggtttgttaacagattttcaacaaagaaggctggtttttgggattactattctcaatttgtacggattttctttaaaaaatgataaaatatttgtcaattaaaaaaaatatgagggaaaaattgaaattaaaatcaaacttttgctgcgccattgatgaaagtgaaaatttttctaattagagaaacagtattaatcggaattgtaaaatagttacctcaagaattttcaaaattagggaaaataaatgaccgggctaaaacttatgttttttgtctaaacctaaatcaaccgcgctttgtatgaaaaaaaattaaaaattgtaaattataattgttttcataaaagaaaaaaataaatattaaataagcgtttccttttcttcccaattttaatttcatttgaaaattcaatattttgttaaaagttaactgcaaaatttcaaaaaaatatataaatataaccgtcgatttttgttttattcaaattaggcccgtaatccaaatatcgaccgatactcaaattagccagaaaa

SEQ ID NO: 25503 - DNA, 2206 bp, Heterodera glycines
ccccccccccccccggggggataaatcgccttaatccccgctttgtttcaaaattttccttcctttttcatcccgtgtgcccttccgccgacggcaagcacatggagatgtatgttgtgtgccatgccacatttgtcaatcagtgtaaattatgtggtgcatgggttatactttggttcattggcacggcacattttggtgccatcccatcccttactgatgaaatcacttctgctgacgaaatcctgttccgtgcgcacgttttcgtgccaggaaggtttttaagaagccataactgttttcacagttgatcaaattctgtaaatctggtgttattcaaaagccctttataagctctattagtcctacaaaactcataatgattttccaacttgtaaaaaagatttaatcaactgataaaaaagctacggcttcctaaatcttcctggccggaaaattcctatttttgggtatttcttggccataacttttttgttttgtggtccaaccaatttgttttgaaatttgcatgccaatttagactcttaataattcatactctaactttattaaacttggttgacaaataaaaaatttacaacgtttggcgtccaatttgggcttaacctttaaattgggtccccctctttacttttggcatttgtttcttaaattgggtgccattttggcactttggcacgggacatttttggcgccgtcaaatttagattttcatatctttgttcttttcatatctttgttcttagtatcatacgataggcaattgttctcaattaacttgcaaaatttcaataaattttttgagatttcttggccataactttgtttttgtggcccaatcaatttgttttcaaattgcaggctaaattagattctcaagagctttataattcatactaagttaattaaatatggtcgaaaaatagcgtttggtgcccaattcccaattaggcttaacttttaaattgggtgccggcaatttgcgcccgcccctaattactttatgcaattgttttggcattttttttgccatgcgattagtgccagattttcaatggtcggagtgccaactaaaccagcagcccctccctcattcattcatttattcattcatcttttaatgggccaatcccgttgattggtggcacactctcaaaagcacttcccccatctccccacccccgctttactttccaatttagaaatgccattgctttttggccggcatttcgaaaaaatttttctattaaaaacaattttaataatcacttttcaataattttcgaatgacattaatctattttgatcagtttcatgtgatcaaaatgccattggcataatttatttacttcaaagctcactgacaaaaattttcagtggtacaaatcaattttgatcactttcgtacaaacgaatttttgatcattttcaagtgatacttttcattatatattttttatttaaaaatcacattcactgatcacttttcaacaatttgctaatgacatcatccaaatgatcaatttcatatggtcaaatgccattaatataatttcggtgaattttgattaaaacgcactggcaaacgttttcaatggcacaaccatttttgatcacttcaagtggccagttttcattatttttgctaattgatgagacaaattcggattaaatgctttattaacagtatcaaaaattgctaatttttttaatgattctatcttcatcgttaccacttttttaaatcgatcagaagatatatatagcaccagaaaattaatttttcttttttttgatcattttaaatattttcctggccattttatctgccaaattaaaatactccaccgatcacgttaaattaattagatttagaaatattttcataatcggacattaaaacaaaaattgcttaaaccgtccgtcataataatttcattttttgattctaaaatttattaccaatcccggatgtccgattttttcagggcaaaattcaaaaaacaaaaaacctttctcagtgtttgtcattgttaatttgtcaaccaccaaactataattaaattaattacgttttttgtgtcaaaataattagagacggctggccttgatcaccacgcttgatcacttcctttcattaatttctcattaaccacacactcttttcattccactctctttctct

SEQ ID NO: 25504 - DNA, 1375 bp, Heterodera glycines
tgatcagtagggctgtgaattttagtgacgaaaaatcccaaaatagttaactaaaatagtgagtaaaaatgccaaaatagtgaagaaatagtggcaaaaagtccgaaatagtgacgaatagtgacataattttcagacaaaaattaagcaaaaataatttttattcactgattgcagttacaaatgagttggactgggatttttaagaccaaaaaacccaaaatagttacctaaaaaaattttttaaattaaaaatttttgccaagaaagtaaatttttgagaaatttttttttgatttcataggagtatattttgaaaaattttagctcgattcttaggggtgtattttttggttttattgcatttttgttaaggaattttgcccaaaaatgtcaaaatagtgacaaaacgccaaaatagtgatttttaactattttagtgacgaagtcgccaaaatagtgatttttaactattttagtgacgaagtcgccaaaatagtgatttctagtgaccgataatgacatcagaatcgaaaatttttaatgcagaaatgcgttttttgagctcctttcttcaaatcaatcgagcaaaaaatttagttaaaacctaaaattcacagccctagtgatcagcgaccccgaaaacctcataaaaaattttttttaatggtctgtaaagtacatagtaaatacccacaaaaatctaatccctaaatattattctgaagtgtttgccgattattttcgtaatctttacattttcacttcactaaacacagatcattctgcacacatcgcatcattcatttattgttttcttatgacaacggaaccaaatggtgccgttgaccagcagcagcagcagttgctgtttgcctcaactgcttgcgcatgtcgtccgaacaccatggaatggtgcaaaacaacttcatttattgtgtttgcttctcagaggaccatctgcattgtctctgatcaggtttgtttttccttttttcttttcgtcttcgtcgttttcccgaatccttcggaattggacggaaaattaaaaatttttttttttcgttttataggtaaaaaaaaattgatgacactcggattttgcaaaatcatttagtttttttctgatttttcatcaagttgttgatctttttgcaatttaatcattggtctcttaagggtccctttgcggcgggggtctggggttcaaacccgcttggctgcggatgtttattgtaatttttacacaaaaaaatcatcaaaaattaaaatttttacttttctatctcagaacattgattttgccaccaacaaaatttgccaaaaaaccaagtaggtgtatttggtgaaaaatcgtggacaaactcaatgattt

SEQ ID NO: 25505 - DNA, 1657 bp, Heterodera glycines
  unsure (1)..(1657): unsure at all n locations
ccataacttttttcttatttggtctatactacattcgttggtatcaaatgaaagcttgaagtcccagtaattcataaatacaagaaaaagcaaatattgacacaagaaaaaaattacaaccaaaaaacaggaaatgcagatttttgtgagtatattcttgaatatttttttgtttatctgttggttttagcacagattttagttctttaaatctatagactttaagttttcgtttgatgccaaaaatgtggatattgaccaagcaagaaaaaagttatggcaaaagaaactgatgattggacaataaaagccgattggactcataaagtgcattagagccgcaaaattttaaatttaatctgcttacaaagaatttatttgaaaaaacaaattaataataaataattatttttaagttcgaagatgacttggcagtcaatgataaatgggcaatgagcaatttattgggcatggcatctcaactaaattttacattccaattgggaccacctggtggaaaacgtggctacatggtgcaaatctttgtatttaaaagatcaatttaaatcatatttatttaataataaaaagaaaatgcgtaataagttatttgcttgggaggcaatgaatgtatttaattgaaaaaagctttccaataaataaaataaaaagagtttgtacagcggagcctgtatggcctagtggataaggcgtcggcctccggagccggcgactcgggttcgaatcccgatacaggctagaagatttttgtaatttattttattttttagatttttgtaatttggttttattttttctagtcaatgttgaatgtagctcgaccgccaaaatatgtgtggtatgtgaatggatacattgccgatttgtacctgaagcgtggaatcacatacacatttatgtacagttttaaataaattaattttaaaatatttaatttttatttttactattcgattaaaaaagttcgtttaatgtaaatttaaaataatttttttaaataatataaattttaacatttaattaacagtttaaaaagttaattaaataaaaataattttttgttatatttaattttatttttaatattagattaaaaagttcgttattgtaatttgaaattatcatttaaaattagaattatttttttaaataaatttaattaaataaaattaattttaataatatttaatttttatttttaaaaaagtttgtttcaaatatatgaaaattattaaaattacaattaataaacgaatataaattttaacaattttagcattgaaggcggccataacgaaacagttccagagctgtataacccgttctacctatccgatagtccatacggtgcttattccaaattaaacaatgacgagaaattggtaaaaaagaaaaaaaaagttttttttaaaattttttttcggtcttagaaagtaagaaaggtaacccaagaggagactggacgactttgcagatggactgaaacaaaattggatgccaacccggacgaattcgctactttttctgacttcagagacactcttttgtgcgatttgaaatttaaatttgtanaaataattttgcaaatttacaggcttgattgcgatgaatctgatcggncgtcagtgatcacctt

SEQ ID NO: 25506 - DNA, 776 bp, Heterodera glycines
aaaataaacgcgggaaaatgccaaggaaaataaaggggcaataaaaaaggaaaataaacgggaaaaactccaaggaaaatccctggggaaaatgccaaggaaaataaaccgcggaaaatgccaaggaaaataaagggggaaaatgccaaggaaaataaacggggaaaatgccaaggaaaataaacggggaaaatgccaaggaaaataaagggggaaaatgccaaggaaaataaaccgggaaaatgccaaggaaaataaacggggaaaatgccaaggaaaataaagggggaaaatgccaaggaaaataaacggggaaaatgccaaggaaaataaacggggaaaatgccaaggaaaataaagggggaaaatgccaaggaaaataaagggggaaaatgccaaggaaaataaagggggaaaagccaaggaaaataaacggggaaaactccaaggaaaataaagggggaaaatgccaaggaaaataaaccgggaaaatgccaaggaaaataaacggggaaaatgccaaggaaaataaacggggaaaatgccaaggaaaataaagggggaaaaaccaaggaaaataaacggggaaaaatccaggaaaataaagggggaaaatggcaaggaaaataaacggggaaaatgccaaggaaaataaacggggaaaatgcccaagaaaataaactggcgaaaatgccaacgaaaataaaccgggaaaatgccacggaaaataaacgggtgaaaatgccaaggaaaataaacgggggaaaatgccaagg

SEQ ID NO: 25507 - DNA, 2417 bp, Heterodera glycines
ctatttaaggaataccgtaatgccaatttgctactcttttcattttccctcccgttttattcctcaccataaaagtcgtatgttcaggtaggcaatgtcttcattgtcgtcctcctcaaaattggccgcttctttgatggcacgatgctcctccctggtgattggcacctttttgagaattccaaaatattaaataagtaattatttaattttaaaattctatttttaattttgactcattttgtcaccttttctctggtcattaaattctctcattttttaaatttcagaatccataaaatattaggcatcgaaagagtgtatggttgtgagcgtattttcatggattacccagaaatttctcttgcgaaaataaacatgtgcctagaaaaaaaataaacacttcctaggcaacaaatgttctctaccttcaatcaaattctccttagttattttaatttttgaatttggcgccaacatatcaccatggcattctgtttctaacaaataaaaaaattcactttaattttgctccttcttttttcgtctttttcacttccgtcacttgtggacgagctggagaagtgttgtttttgctgttgttcttggtggtgctggtgatggtcatggttatggttgttgtgtctgttacggtggtgatactgtcgttggccatggcaattgcaattgtcatggactgtcgacatccaaaaatgctgatcaaattttcgtgtcatattacgaattcaaattcggagacaatggcggaaggcatagtgtagcagagtaggtgaaataaagataaaaattggcatacggtagtggtatgtatttataaattaaaaagaattaaattttaattttgtacatgaaaaatttgatgcttatactttttattggataaagtaaaatttaatctacaatattttaagaaatttaaaaattaagcccaaaatactatgtagtaaattgaggatttttatttattctttaatctttttaatgcaaaaaactttgtgaaatttttctgccgaatggagaacactaaataatagaaatatttcttttaagaaatttatttactagtgaaaattactctttcatcaataatcataaataaaaaattaaattaggcgcagtcatttgggcatattattttgcgctctagcagcacaactaccccataaataataagtctacaaagatgcttcttgatggtaaataacgacgacagagcatgataagtcagaagatgtacacaatgtgggtaaataattagtgaaaattagcaaattaactattcattgcccccggcgtctctttcgccgcccattataaaagcgccactttcgctctcagcgacgacaaacgcgcatttttgcggtggccgcggagacggcggggaatgcgcggaatgaatcaatcattggagaaagttcggatcggcagatgagccgaaggatgggaggagtggtgaagagcagccctttgctgtgttcttcgctgatcagtgggatcaaaaatttacaaagaaaggaccaaaaatgggggaagagattcttttctccgatgcttttctcctcctcccgcctaatttgaggcgcttattattaatggaaaatgagctatttgtgcacaaaagaagcacagcaaaaagtctgtctgtgctggaggttccattgatgggaaaaaataatgtcggatcagatcagaacagcagaacgatggtcgaataatttggtggggggggcggctaatctaatgggaaattgttgcttaatcaacagatcgttgctaattgtataactctgatcaatatttaaaattgatgatgccattcgataatcataaatgattatcaattagcctgaatttcaaagaaatttattaaaattcaaaaacctatgagcagaagggttttaatttttgtccaattttttgaaacctaatctttttttttttgaaattttgcagccaaataatgaacccatgtttttgctaatgctaaatctatcgaataattcaagatctaattagttattatgaaaaattttaattataatagaatttagataaccacacaccaccataagaatgatgggaattcgcgatagaaaaaactggcaaaactttgcagttttacgagaagcacttgcgttggcacaatcttatttctacatgtggcagatcggagctaagaaaagggaaatgagacaaaaactgtttgaattgtatccatcgttcaacagcggcgaattattccgcagagacatcaccaaaaagcaccctgctgatcaactccgacgaaaagccgaccaccatcagcacataaatcaaagaattgggcggggtggcggaatgggtgggaggacgcggaaaggggagggagagagagacagagaagaaaaaaagaaata

SEQ ID NO: 25508 - DNA, 1686 bp, Heterodera glycines
tggtattcataaaacacaggttccaaagtcgttttcttaagaacggacaaatatttgatttggatataattttatattattaaaaaaatgttaacctgacgtgaggctggctcagacaagtggaagatgacggcaaggaagacgaaatgggccatgcaattggcgtacattttttaaaattttattttggaattttattttatgttttccaatgaaaatctttaaaaaaaatttttattttaacagtgctttaagtcatacacccataagaattttagtttttttagagaacgatagaagaaatgagtgctggatcaatcagaaagattttcatttaattttaacaattctcacttttttggcgaagatggaagaagagtatgggagatggagttgggttcggttacggtagattgaacggcggcgtattgaaacgaagaaataagaactgctggtgaatttttttgtttttctgaaattgacaaaaattcctaaattccttgcaatacatgaacacagacagcaattttgtcagtaaatgaatgaagaatgagtgacttttgctaggctttcattgcctatttatggacagacaaaaaaggggtggaaaaagggaaaagcagcggggaaagggccaaatcatcacatttacactgccctagcacattttttgtccgatcgctgggaaaagcgttggcaaattgagcaaaagcgatgaaaaaagggaggaaaagcgaaaatgggaagccgaatcatcgccaaaacggccgatggaatgccatttccggtggatgggaatggacaaatcggacaattttgagtttttttgcccccaaccgatcacaattcgctgggaaaagtgttggcaaatgaatggacggacgattttagcattaaaaataataaaaatattattttataaaattaaaaaataaaaattgtaaaaaaaatgaacaacagatatgtagtcaatacatttccttaaaatactatcataggtactcccttatttcaacgagaattcaacaaaatttaaacaacagtttaaaaaattttgcgtacatttaaattaaatttcatgtgatttttctatgaaatttgcagaaatcagtgtcaagaataagcaaataaaatttatctcagaaaattattctaattttctctacaaaattttgcgtcaaaaatttttattacatattttaattaaaaaattgtttttacttttttgatgttttatccaaatttctttaaatatttttctatttttcaagaatttttgaagttagttttaagaagaattggtggcagtttttaagaaatgcgccagcacggtcgaaaaatatcaaaatgcttttttttaaattaggtcaatagtttatgattaattaaaacttaaattgtttaaagaacaaaattcaaagataactaaaaaacatttcgttctttattcattaaaaacaaagtcctatggagcccatggaagccagccaccttgagaaaaatttgtagtttattagattttggccaaaagaacaaattttaactagttttgctaaaatccataaaaaaattcataaatacctttctttgtacattaaatattcttaaaaaatcattagcatttcccaattttatccaaaaaccacaaaaatccacaacatttctcaaaaaatcaggaaatcggca

SEQ ID NO: 25509 - DNA, 1249 bp, Heterodera glycines
tgttttttgtaatgtttcgttttgtgttgtcaaggactgttaatgcccgaattttcttctccattgtttttgttgttgataaatcctctgaattttgcacttctctcgggcaaagtcattatcatttgtaccattataacaaacaaattgggcaaattcccaaaatttaaattttgtgagggttttccatgaaattgactgatttttctcatttgttttcttctacacatccaatattctcaaaattgccaaaactcatccacgcaaaaaacactcaccacaaatgaaaatgcttttttgtggcttcatcactctgtcattatcaccatcgttttatcgttgtatcctccaaatcccttccctccatccttacacatttccatcctccatcaactgccgttttgttaaaaacataaaaattttttgtctaccacctccgaaaacattgcacctctgatgagccttattttcgacacaatcatcaaaattctatagcttaattagaaagaggtgtacatactcatataaataccatatttaaatatttgttttatcaatcaaatgatttccctccccgacaaagacaagcatttaattaaaaaacggtaaggaatggcatcacatttaattcaaacttgtttttttaaatacatcctcaaaaatggaactttttctctgtccgatgccattgcctttctgccgataattttttccaccttttttatgatgaaaatgacctcttccaatctccaacagatttagctccccaaaatacgcacagtaatgcttcaaatataccatacagtatacaaccaacgtacgaccaataattaattatatcacattacccttaatttacccaatgtttatttcttattttcccataagaacatacataggtagtacaattttgttagaaaaacgatgaatttcgactaaaaataaatggaaaattttattttaaaaaaattgaaattcgaatccatcgcctcacattcagaaactgtcaacacaaaagcaagaaaggaatgaatcaaattaatgtgctgtaaattctgttctgttactaccgtattttccctaccgtattcgcaaatgcttttttttattaccgtttccatcttccttttttgttatcaattccaatctgttgagcaaataaattttgttatttgctaatttgtagacccacacaacacatacatatacatacattaaccaccaatcgaaaatcatatttttattgcat

SEQ ID NO: 25510 - DNA, 1675 bp, Heterodera glycines
ttccttcttttgctgtccttcccctcattctctgatgtcgatcactatcacattaagtccatctccgccactttgctccgcccattttgcccatcggttcgcttccatgtcaatcggtccccgtctgatcagccattcgtcgcaattcgtggacaaatttcgtcgactcaatgccattcgttcgcgcgtcctttcgttttccgtctcaaatggctcaatgtcagtggcatattttagcagacgaagaacgatggcataactaacgggcgaagtggcacggagaaatgcctacgaaagggcggcaataattagcattgaattgaatagggaaagcgcatgggaaaatcgaaaagagaggttggataatggcgggaatgatcagtctcaatctcggcggaagaaataatctcataatcagtcactcaccagagattagaaaatgaattatcgaaaacaaaaagctgtccttttcaaccaaaatgccctctgatcagttttgccaactctgatcaattttcttccgccgtttgctgactttgcgcttcattaattgctcatcaatcacttcaatgagttcctccacttttgtgtcaatgttcgaaatgcaacaaaagttgtgacagtgcagcaaattcggccgccgtccgtcgtcccccgggcggacggtgtgcagccatttggacagcgcttggtcagagggagtcgtgccgtcgctgtcatcggccgtccctccgggcaccaaatcgcccgaacggacagagcgaagggcagtgagttcgcgcagaacggtgggcgaactgtgccgtcgcagcagggaaaggcattcggcaccgtaacagcccaaactgacgattgacggggccaacagaggccaaagcagcgacttctccaccacaaattgccaactgcgctggtggtcgtcaagcggccccaaactgacgcaaacgcccggggagagaagagaccgaatgagacggagaaaggccatcacgtcggggtcgacgcacctttgcaaacagcacaatgaacggcatggagaaattatgccgggaatttccaaagagttcccccggtaaatggcggatttaatccgtcggccgggttacgtcccactgattcaattaatggacaactcccagtctcattgatggggactaattgtgcaaatcccgtagttttcgcctgggatcaccgaatggtgatctcccggaagccgacaatgtaacgcggcggcgggtcgatcggcaatggaaaatattccgcgactccgtcggcgtacactttgacaatttgggcacagaagcgcagcgagtacaaagtgctgcgttggatgttgaagtggccaattgtcactcttcggcccttaaaatgggtgcccaccaaagcaccgaatcggccgctgagcagcgcaattttcagccaaagttcggccggggacaaacagaggaaaatggccagccaaaggtcggcacaaatcctgcaaaagttggcacatcaatcagcgcatttgggcacaaaatgcacgatagaatttagttggactgggtcagcccaaattgctttcaaatgtttcaacatctttgaaagtacattcgatttcggaaccaaaatgagatggcaattaaaaatgcgttagcacttgtcactgtttgcccttggcaatgtccgataatga

SEQ ID NO: 25511 - DNA, 2253 bp, Heterodera glycines
  unsure (1)..(2253): unsure at all n locations
ttttttcttagaaaacttaanttatatgttttattattattgaaacagagagtgtcagtctccccccgatntttttctggatcatcgtcctctccaaattttttccaagttttttttttaaaacgaattttccactttttcaggtccgattttccgctgcaagaagtccaatgcttcatcgcaccggcggaacgtgaaaaaattgatgcagtcaccgcacgatcggaccgcgacagtctgtccatgcggtcgcagcgaagcggcagcggaagcaccgtgcgttttgttggctttatgccaagaaaaaaataataatgacgccatcaccagggttgtgccgtccaaatcccaaaatccgacccctttttctcgtcccctcaagtcccggcgctggcctgaaacttttcctgtctcgaatgctaacttttctggccgcattgacctgcctgaatccctgaatcctggcccgacatttttaagacccatgacaatttctgattaccataaccacaagccctaacttttttttgaattttaaaaattttcaatttttaagcagatagggcttacataatcattaaacgctgattagttaattagtgttaataaaaatttgcaattttttcagtttgaaacaatccaagaatgtggcggctccgttggtccaaaacgggacagccggacgagcattcgtcatccatccagcaggtgtgttaacttaaaatcccaaaatcttcgggtttttcaaaatctcggctttaacggcaaccaacatttaaactgatggacagttaaaaaatgccaaattaataaaaaatttaaaaaaaaaaattaacttttccctaattttcaaggcctccctcttcaattgcttcggctgactcacagcagaaattgcaccaaattgtcaacaacaacaacaacactgaggaggacgaatacattctcagcagcaaacaatgaaaaattcaatttcaaatttcaaattttattatttatttttattttttaattccgaaaaaacacttctcatccctctttctcactctctcattttataatgttctctctctctctctctctcatctctcgccgtttttttttgtcttattgtctcaccaaatataacactatttatttttcgtatggaccaatgaaaatatttttttcaaattgaatatgcttaaaatccccaatatttttttttatatatttattaatttatttttattttgccaacaattttatatgaaaatgttttttgttccctctcatttcatttttttgttttgtcactttatttttattttgaaaataaatgtttccgtcaaattttggttttcaatttgcttcttcaatcccatccaactccattgatgccgtcattaaactgcttgaggatgaagctgaaaatggagaaaaattatttttaaacaattaattggtaatttgcgggtttttgtcgacttttacaaataaaagaaattgaaaattctttcaatgggttttcaatttttctactttcagtttttttaaaggaatgtttttttttgcccccaagatggcaaaaagttgaacctggattttttgaaaaaaaacacaatctctaccgaaaaaaaaccgacaaaataaatgttctcagaaagcatcagctgctgtcgtgtaaaaatagcgcaatggttaaagcgcgccacagaaatccatgattgcgggttcggtccagggctggacgtaattactgattacggattacgggaatttttaactattaagggttagaaatcacagtatgcccgtctgttttcagggcaaaattttcggggggagcggcggggggactggaaaacttttgcgctacaccctgaaaattttcatgaaatattttcaaaaagttttggaaaaaaagaaaaaaaatgcatcaaattacatattctgaactggcatttacattaatcaatttttccttatcagtttagggagccgaaaattgtcaatagcaaattgatcatactctaaacggtaaaatttataaagagaaaaattatgggtataaatgtgccaaaaatgcataggttgctgtcgtgtaaaatagcgcaatggttaaagcgcgccacagaaatccatgattgcgggttcagccccacgagcacgcatttatttttatttaatttgacatgtttccacacagataattcaaataattattttttggtaaaatacctaactaattaaccaaacaataataattaatta

SEQ ID NO: 25512 - DNA, 1710 bp, Heterodera glycines
  unsure (1)..(1710): unsure at all n locations
aagcaaaatttaagaccatttccaaagaggaaggaacaaaaatctttgcctaaatnttatattatattgttgaattgtttgaaatgcatctgttgtctgccgttttgaaatttttcaacttttcgcgaaaagatttcccagaaaatgcatgggacaaataaaaattaaacttctattatgatcaatttaaatttcctatcagtttcgggtttgctttaaacacgctggcctatgaaaaaatggagttttatggatgtcaaattttgggacttttcttcgacgtggccatcagcgggttgtttcgtgacaaaaacaaaccagtttgatgctattcgaatgagctagacgcgctctacattttcaaatgtatcaacaaagggtctaccgccactccctggcgggttgtttcctgacaaagcagaacggggccaataaatttgaatttttgttaatcttcggcagttgcctttatttcgagcctactctacttgtgcatcttttcccaatatggcactgcttccgaattattgaactgtttcacgactgattgttgagataatttttttttccgattcctttatctccaagcatgagccttataagtgattgttcatatccttctcttgaaaaaaattgtcagtaaaaaaaacacgttttctgaatattaacaacaaaaatttttagacactttctaaagaggaaggaaaaaaatttttcatttgcctaatatttatttatactgttgaactgttggaaatgcagctgatgccgtcggaaaagctccgattttttggggaagtttttttctttcagtttcaccactgattgttgaggcaatttttttcgccaatttcttttgtctacaaacattatttattgcgtttcatcctgtagtgtgtaaaaaattttcagtaaaaaaaacttgttatctgaatatttacaagcaaaatttaagaccatttccaaagaggaaggaacaaaaatttttgcctaaattttatattatattgttgaattgtttgaaatgcatctgttgtctgccgttttgaaatttttcaacttttcgcgaaaagatttcccagaaaatgcatgggacaaataaaaattaaacttctattatgatcaatttaaatttcctatcagtttcgggtttgctttaaacacgctggcctatgaaaaaatggagttttatggatgtcaaattttgggacttttcttcgacgtggccatcagcgggttgtttcgtgacaaaaacaaaccaggcagttgcctttatttcgagcctactctacttgtgcatcttttcccaatatggcactgcttccgaattattgaactgtttcacgactgattgttgagataatttttttttccgattcctttatctccaagcatgagccttataagtgattgttcatatccttctcttgaaaaaaattgtcagtaaaaaaaacacgttttctgaatattaacaacaaaaatttttagacactttctaaagaggaaggaaaaaaatttttcatttgcctaatatttatttacactgttgaactgttggaaatgcagctgatgccgtcggaaaagctccgattttttggggaagtttttttctttcagtttcaccactgattgttgaggcaatttttttcgcccaatttcttttgtctacaaacgttatttattgcgtttcatcctgtagtgtgtaaaaaa

SEQ ID NO: 25513 - DNA, 1571 bp, Heterodera glycines
aacatggtaagcttttgcgattgattgataccaagctctccctgattttgtccataactaaaaaaaagttatcgtcctacaaccgccggaacgtcggcgccgccaaaacacgacccacactccaatattcacgtcctttttttgtaccaaaaccctcattcaaatgtggttttcttggttccattcaaaagcttagtctcaagaattatttttaaaaaagcaacagacaataagaaaaaacacacacacagtgacaaaactacaaattcaactcttacgaatatactcaagtacgactttttgtctgttgttatgagaacccaaaataagttagacaaaaacttctaaagccaaagccttttcgattgatacccaagatttagataccaaggattaatttttctgtaaatatgtcgtctgctactgaaaaaatacttctttttctgttcgtcgttgctcaacgaatcggcgatatggtaaaaggaaggtgagggggaataaaaatgaataatttctagcccaaaaatatggacctttgcttttttagctgttcaatccctcaaattgttccattgtccgaatacatttttttttcatttacagccccccaaaatggaccgtcgcgtcagcctggagctgctcgacttgcactgcaaccggttgccggacgaactgttgcggtgccgcgtgctgcgcacgttggacatcagcgggaacaaattgacggaactgccgctgaacattggcgacctgcaaaacctggccgagctggtgctgtgcgagaaccaaatccggcatttgcccagctcagtcggtcggtgatgcctcatcaattaataatattatatttaaaaaatgtagagctgaattttgcaaaaacccggacccggatttccgttctatggggtttttaaataaaaagtgatttttgtctttctttttgggaacggtttgtttcgccccgccatttttcctcgcataaattaaaattaaaacaaaaaatagatatttttttttgatttgttttcagctaggttttttcctaataaaaatatttttttcattcttaagaagggaaaacgcattgcaccttttttaaaaattcatggcccccatttttgcaggccaattgaagcggttggaagtgctgaagtcgtccaaaaacaatttgacgctgctgcccccgtcaatttgttcacgtgcggtgctcaccgatttgattatgtgcgacaatcaactccagcagcaggttcagcaccaagggcgtagccagacccttggctttgggggggggggctgaagtcaaaaaatcgatttttaggggtgtatttttgcttttttgaaatctcgaattagggggtgtatttttcagcatttttcgccaaaaaagttgttattttttccattttggcctccatttttcaaaaatatggtaaaattggggtccggcggtgccgataggggccgccgggaaaatttttgagtattttaatgcaaatttgttcagaaaattgcttaaaatttcaaaaaatttactgaaaatttttcactttttgggtttcggggggggg

SEQ ID NO: 25514 - DNA, 1688 bp, Heterodera glycines
aattggtataaaattttcaaaatatgtaaataaagtccaacttttgttcgcaaacacaaaaagggaaagtgtttttcgtactacatattcagagcatggagaatccaggaaataaaaatgtatttacataaaattgccagccctaattgtatttttcccccattaggtagctaatgacataattttttggacaagaatcgtaaaaaaaaaattgttggagcgtagatattttgtgtaaacagaatcttcggggatgggaaatgtgaatagacatttttttttttttgtaaaaagagaatcttcggggatgggaaaataaatatgattcattaaatttcattacaaaatacatataagttaaaaccaatccattcccatcaacaaattcattgaaaaaaaaactaacgataagggtggctggcaaacagaggtcgatttttaataatgattgtgaaaaatttaaataaaataataatattaaaaaaaacatttcaaaaagaatcattcaaaattggaaaaaaaaacgttttttgagagtccgatgaggcttaatttccaaaatgaggctttttgtttttttttctttattatttaaagctttatggggttttgggaaaacctgcaaaaaaagtcattgttttgttaaaatttgttaacaaattgtattaaaaattgcaacattttccccagaggtgtcttctataggcaccgccaaaccatcaaatcatttagttttttttacaaaatatgagctaaacctcaaaaataaagtgttttttttttggtctaaatctgttgtaaaatttatcgtaattttaaaattttcccggcggcatcgataaatttttttggaaataacatgaacaaaaattgtggaaataatgaagtcgttggcccatatacctaaaagtcaaccacgttctttttttaaaaaaaacaatgaaaaaatgaaatgcttataatatttggttttttttttctgtgctctttaaataaatttcttaaaaatgaaactttttgttttttgaatttttaattggcagctaaaaacggaaaatgcttagaattaattacatatttgggtataatttttgtaaagtataattgtaattttataaaaatataaaaaatttatgcaggcaaaaatttttcaattaatttttttgcttaatttttatggtccacacaaaagtcactggcacattaaatgttgtaaccaatttattgggctttgtgtggtcatcgctcgcgcacaatagcaataacaataatggctactacataaattttcttttcgggacagcgaattctcgcgcaccaattaaaatttgggttgggttagtcataaatcaaaaaaaataaaaataaaatgaaatttacgacgacgcacataaaagcggcggccgcaccaatgaagaaacaaaacatgtccataaaatgtaaaaaaaagcaaaagatttatcgtaaatatgcacataaatagtcaacagaagggagtggggacaaaattataaaatcaaattgatgaaaacaaattatttaaaattttgattttaaattatttgaacttttgataaatggaatttaaaaaaattaggggtgctaaaaatacaaaagttcgaacgaaattttaacaaattaaaaagcaaattcaaacaaaaaaaattttttttctgattttatatata

SEQ ID NO: 25515 - DNA, 1889 bp, Heterodera glycines
aaattttatcatttttttcttttgttttttgcccttctcagagtgcgaaatccattatcgctttctttgctgttgacgaggtgattgaaacggcatgagaattttcatcctcctcacctccggcatcatttcccgaggcacttgcctctttttccttttccttgttcatccaatcccggaaacctttgccacctctgctgcgctttttcttcttcttcctcctctttttattcccgacatctgatgatgtcccaacctgttcttcttccccctcctcatcttgttcctcttccctctcctcctcttgttcctcttccctctcctcctcttgttcttcttccctctcctcctcttgttcctcttccctttcctcctcctcttctaactcgaacacaattttcttcgccattcgtcccgggtcagcagcgaaatcctcgaactcgttgatctggttgagcaggtcaatgttttcattgacccggcccaacattagtccatcatggacctccttctctctctctctcttttccgtctcaaattcacgcacatcgtttgagtcctgtttttttaacttttttcctattatttcatatttttcttacgagttgattggtgcccacaattgtaacgcctggcccaagtccatgccagtcgcgttcactcccaatccacttcacggcgtaatgactatacaccaaatcacagtccgggcaatggacatcaatagggcctaaaaaatttctcttttgaaaatccccattaaaaactaaccgtccgtgattcgctctacgacggcatccatgccatcgtatgcttcgcggtggagctctggatttgttatgcgcaaattgacaacgcaagcggggtcgtgctccccttggcatgcctttgcgcgtatgttgtctgcctctattgctttaatagcttgcttacgtcggcaatcctcgcaactctgattcaagcagcagcgtctccgttttggtggcattttttaaatcaaaaaatttttttatatttaaattaatccaacttaattaaataaagacataaaatgagctatacatttttaaaatattctacttaatttctatccaattcgtcccaccccatatttctgtttgatttgacttagtttgacctcaagcaaattctgtcacaatttctcccacacacacacatattttattaatcttttactaggggcatattacgcctccaattcccaatgtacttattcatttaaatttatttgttgaaaaatttcctcctgtcctattttacaacttttattctttgttttttttaaaattttctttttattaattcattttcaatttgtatggttttaaattttccgcttttttctccctttcataatttcctttcatacgaattttctcgacaaattttaaaatttattgcccatccactttggtgaggccggtgcttttcagcgctggctttgggcttctctctctcattctctctctgcccacccactttgatgaggccggtgcttttcagcgctggctttgggcttctctctctcattctctctctgcccacccactttgatgaggccggtgcttttcagcgctggctttgggcttctctctctcattctctctctttctctgcccatccacttgtgaggccggtgcttttcagcgctggctttgggcttctctctctctctctttctctgcccatccacttgtgaggccggtgctttttagcgctggcttttggctttctctctctctttctctgcccacccacttttgtgaggccggtgcttttcagcgctggctttgggcttctctctctcattatctctctgttcacccactttggtgaggtcggtgcttttcagaacgggctttgggctt

SEQ ID NO: 25516 - DNA, 2069 bp, Heterodera glycines
  unsure (1)..(2069): unsure at all n locations
cgactagtaagctacaaaaaaacttctgcaaacatttnaccctctacncaagccataggtacatttatatgtatacttgtattttttaaatcctaaatctttttgatcaatagacatctcatggaaaaatggcttcatcaaaaggcttctttgtatgacaattgctgccggttctgtggggtttaccttcggattgtacaattatttgccaacaaattttcctctgctcaaaatatgccgcctaaaagaaaaacagtcattatcatcgaatgcgtttggaaagccgccaacacgggccgatttgcccattttcagcatggaggaagtgcgacgccatgggaaagacgctgacagaatttgggtcattttccaccaggtagaacaaatatcaattacaaaaaaagtagacacaaaaattatgtatagcaaattttttagggggtttacgatgtaacagaattcattgcaaatcatccgggtggcgacagaattctgctggcggcgggggcctcaattgtaatttccatttgcgtatttaatccggtattagcattcaggaacctttttggacagtttatcctcaacataagacggacgaagtgatggaaatattggaggaaatgcgaattggatcgttaaggcttgaagatctccaggaaattgaaacccagcaaaaagtttccgccaattcaatttcacaataaaatacattttaaggatgctccgtcgggtgatccttttgctgccgacccgcctagacatcccgcattgatcgtcaacatgcaaaagccatttaacgcggaaactcccccgtcgttgctgatcgacagttttctgacacccaaagaactgttcttcgtccgaaaccacatggctgtccctcgggtgaacattctctttgatcgatagtcttgaatttaaaattaatttagcgctttcctatcaaaaaatttccaagtttttaacactttaattttagacaaatgaagaaacgcacaaagtgcgcatcgatgggattggtgtggataagcaaattgtactttcgcttgaccaattgcgcaacaatttcgagcccgtttcaattgtttccgccattcaatggaaattttttttttgcagaacatttcacttaaaaaacgacagcacaggaaaaatgctttttgaaattttatttttttttcgtcgggaccacaattccacaccattgccaaataatgagtctaacaatcaacaaaatgttcagatttatcaatttctaatctatgaatataatgaagataaaaacattttcggtcattttgcgtgacaattccaacaattaaagcaataaaattaatttgtatctgttcgcaacggtgaaaagcgagtcgtcaaatatttcggtcgtattgtcaaatgcattcatcccttgaatcatcgttccggcaagaccaattggaattgaacacgacttaaagggaaaaatatttttaaagccgtgaaaaaattaacacgtcttttcgtgaaaatctgggttagggtcagtcggaaatccgggtggtccaaataactcttatgatagaaaatactaattatttagaattagatttttgcggctagaatgcgttttttatttcttgaaaaaagtttaattacaaatctagattaacttagtgttgtggaattactttggcaaaccacatacggttgtggataaacacaaaacttcgccaaaatgatcgaccaaataagtaatttccgaaggcaaatggctgaccaacattggatttagacaagatctgactaaggtcaccggttccaccgagagcgtacagttggtttctgcaagaaaaataatttcgaaaaattttttataaagtgaattatataaacaaaaagtggaattttttgaaggacacctgggttgctagtgaaaaaatacattgaatgcgcccacttgttttgagtgcccagtaataccaactttatcgccttttctagggcaccgcggtgctgttgaatctgtgaccgggacaaagccagacggtttcaagggtcttcttcctgttcatcaatgcgagtgattgcaa

SEQ ID NO: 25517 - DNA, 1299 bp, Heterodera glycines
tcaaccgccggtggtcgtcgctgtttttcgtcgccgtccttgtcctcatcataccacgctagggcgaactttacgacttgtaagcattttggagaattggcgtattttttggtcactattctttccttcctacccttatcgtttccaccgaaatttttcatgaaaaaatttcaaattgaaattttatagaaaacatgaaaaaaaattttttttttttttttgcgattttttggaaattttttttttttttgtaaaactaaataattttcatcacaaacactatttttttcttaaaaatttcgagtatggaggaggggctcttctgggtgggagcggtgactatgcaaaaaacaaaacaaaaaaaacggtcaaaaggaaaaaaaatttttttaaattttatttgtcccattttcagcctcaacctttgcaaatgcaccaacaaaaacaaagacagaagaaggagaagaaaaagaagcaacaacaacaaaatgtaaaaataataacaacagcagcagcgatgcatttgacgacagctcatttcactgcccgtacattttgacgatggatttcaaatcgctcggttcgtttcagaagaatgccacacaattttttttttttcaaatttgttatttgtacccttttttcttacaattatttagatccgtcgttggcacttgggtttttgacacgcgacttggcggagtacgaggacctagtgcatcggcttaaggtaatgccgccgccgtcccaattgttaagaaagagggaattggtttcgaacatacatgtgcaaggggtgtctcagcccaagggccatacgacggacgattgggacagggggggggtgtctcgggaccgatttttcatacgaaggtggtccattttttctccggcgattaccttttttcgttgcttaactactttttttttgcgacgcgttttttccaaaaaactttgaaagggggggtggggccggcggagtcgagaagtaccgccggaaaattttttgaattttgaaataaatttttctaaatttatggaataatttctcataacttcttcatacttgctagattatagtaacactttcaaacatgactaaatatgctattaaaaggcattttataagaaaaaacactgtaaagctaaaatttattcatttttagcgaaaaaccaacccgaaaacgaaattttacttttttttttgtttatttttgacctaaaatttaaaaatttttagaaaaagtaacattttattccatatttttcgggaaaaattttattaaaaaatgatttttt

SEQ ID NO: 25518 - DNA, 999 bp, Heterodera glycines
tttaattatttcacaataaaaattcaagtgaaaaagccgtttccgttgtgatatggcacactggcgaccaattgagagacttgcctcgccatcgtcgtgctgagcaggtgaaaattattattttttaaatttttcgacataaaattttataatattttgccttcatttagctgtatgttatgatgtcccatgaggtaattagtataatgataattaggttattgattattcatttttgataaacggacaaacaatgggtcaaatgcaaatacacaattttttaaaattttctaaaattgatagaaaattgttaatatttttaaaaaacataaaataaactgatgcaaacattttgaaatttttcttccaaaagataggatttttcgtgaaaaatctcgagttgaaaaatttccgggttttttggtctcggtttttgagccattttggccaaattcagcccagtggccctttcgctggctatgaacctttcacgacacattaattatttaccctaattaattaattcgtaccaaaattaattaattacatcaattattaattaattgttttcctcctcacaaaaacagagtccgctccttggcagtgcgaactttgagaaaatcccttacaatttcttcaacatttccatcacttatcgaagggacagcaccattcacatcaattttggtgtccagaaaatgcgtcattggatactgtatttgtacaaaactccctgttacagtaacttggttttttaaacacactgtggataattgacgcattttctgagagagtgctgccgccctgtggccactttaaaaccgctacttaattttatgacaccattatttttgtttttgcacaaattcatcacaaaaatagctttggcttttccgggggtttggggttttttgcgcaaaataaataatgaaaattaaattaattttaaaaattatggcaaaaaaatcatttaacaatagagcacgcagcactatcagt

SEQ ID NO: 25519 - DNA, 1683 bp, Heterodera glycines
aaaaaagttcgctaatccacgtttttatactattgacaccttcaagattcacgaaattaagatttaaatgctcaaaattacgaattctttaattcttaatttcgagattgccttcaattttttgggcggtaaaaaataattttttgaaataatcgccccaattttacgtacgttttccctgttttggggtagaaaatgttgacgcatttgtccatacagacggggtcattacgcaatggaattttgccgggcaggcacgattctgtgacatcgtctcgaccgttgaacaattgtctcgagacagccgccaacatgaagcgctaaaggcggcatgggacaaatggtcgactcaacgatattttaccaaattgggaaattcccaaaggacaatggccaaaatttgacaaatggtcaatctttgtcaaaatttgggccaaacgggacaaatgaaaaaaaatgatatgcttacggtgccctaaatgtcaaatggtaccgaatcgctttgagcattcaattgccatccgcacgtgccatttgtattcgacacaaacaccgagaaagtgccgttgctgaacggcttgttcaggttggccacaattggcccgtcaagctcggctgtcgacatgcacgtacgttcagtgccgaactggggccgtaccaccaaagtgttgttaccaccgccgccgggcgacaccgttggtgccaacggcgacactgtccgttttatgggaaattggaatatggtagcacagatactgtattagaatatgtagcttggatacagttttatctatattattccaaaaaaccgtttgaatggtccaggtttatcatttttcaagttttgcagaattcttcggtccttaaaatccaaaatttaaaatcccggacataaccaaatttaacatgtgaaacccaaggattatttttaaatttttaacagtaaatggggcgtttacccgttccgacggggaatgtaccttcacggggcgtgccggcacgagttgggctcgacagaatggcactgttatagttgttataattaattgggtagaacttttttgaaaaattggcaaaaattgaatcggataaaaatagtttcatcgaaaattcaggctatgttcaaccattctttttttaccaatccaattttaattagtttcatttgatatttggggaaaaacagcggtcggcggaagagcggaataaatggcaataggtaatttaaaacatgctttttagaggagaaatgttaaaaaatttgaactaataattcatttatgcattaaaaaatcacacaaacagcaaaaattaaaaatcataaatatttttaatttaagtttaatatatatgcgaaaatatgtgcttgggctgtgcgagactcttttcagtctcgagtctcagttagagaaaggggaagaagaaaaaactcgaatttatttttttgttctttagcatcgggaatgaattctcgtccgtggactttataactccccccccccaccgattttttgacctttttgcacttctgtcttttatatattcgctgtgaaaaaatttcaaggatagggtacggctacggccatccaataggtagaacacgggaaatttttggcattttgtataatttttaacagattttcagaaaaaattgttgggtcaaatttgaaaatttaagggaat

SEQ ID NO: 25520 - DNA, 1373 bp, Heterodera glycines
ccctccttccccactgctattttcatccttttcctcttctttctccccctccttgcttcgaatttttcctttttctctctttctcttccgtctctcctccttccccactgctattttcatccttttcctcttctttctccccctccttccgtcgaatttttccttttcctctctttctcttccgtctctcctccttccccaatgctattttcatccttttcctcttctttctccccctccttccgtcgaatttttccttttcctctctttctcttccgactctcctccttccccaatgctattttcatccttttcctcctctttctccccctccttcttccgtcgaatttttccttttcctctctttctcttccgtctctcctccttccccaatgctattttcatccttttcctctatccgtccaattgattatttgatcgattgatttgtgggtggggggataaggtaaaacgcccggcaaatggtcatcattttgcaaaatattctctttgttggtcctcctctcctcttctgttgcgttccctttttctgtgtttttcgagcttctcaaattttgttttcattgttttccgctttgttctctaattataaaaatggtactacaggagtttgtatccacatttttggtcaacattttttcaaattctttttttggtttaaaaagttcagaaaacaagtatccgccgggggtttccgaggtcgctgatcaatgatcacgaatatggaatcctcttgattttctacttctttcccttggttcaatcactctgcagaaattcaaatattttgattttctttttgttcatgggttcctacatatcgacaagctatgcttcctcatacttttttttaattgcgcatattttataatttttttaaagaaaatccatacaaattgagcccagtagtccaaaaaaccagccttttttgttgaaattcgtaaacaaatctcactcaaattttcaaaatttttccccggcggcgcctaactgcaccgccggacccctttcttcccaaaaagttttttggaaaaaacgcgccgaaaaattatgtgaaaagcaattctggatttctaagattattcgatcatttagtccaaaatgattaattgtttgaaataactgaagtaaattcgtttaaaaatttcattaatttaatttagctttaacttttagattttataaaataaatagcaaaataaaaattaattttgtgttattttcacttgaaataaattaaaatttgattttttttttgaatttaaaaattcccggaaaaccaaggtcccgtcccggcttctcaggtcccggtcccggttttgcccaacattcccggtccgctcaactctacg

SEQ ID NO: 25521 - DNA, 2068 bp, Heterodera glycines
ataagaaaatgattaaataaaaatttctcaacagaggactttacttcccattgcgctttcaagagtgataaatcaaaaaaatttatttttcattacttattatccatttaaataataaacatccaaaaagatactgtcaattatccacttcaaaaataagctacgatattttttattgaaaaagttgataaagtaaaaattaacaaataatgtaaattaattttttatcaaaaataaattctaaaaccatgaaaatgaaatcattaattaagtattaaaagtgaaggacaaagaacacaaaacaattgcctcattaaataacgctgtttttgaagagtaaataaattttttaattaaaaccaaaaatttctaataaaagctttttgaaaatttattaacagttttaaaagttcttaaatttttattcttttgatttaattaaaaattcaaaaataaataataaatagatgaaattgagctttgactaaataataattaaataataataataaatcacttttccatatttgcttttaattcacgccactttacaagagattcaaaatgatttacattatttaaatgtcaaatttttaagtttaattactctaaattaagctgtatgaacataattgtaaatttacaaataaccaatttataaattataattataaattttttttaataaaaatgtaaagaaatgaaaaattaaactatattttatgggtgctaaaaggaatgatttaatctttgttctttccaaaccaaaaaaatttaatttatttactgtaatattaaaaaatgcaattctcagttttatatttatctaaaaatattaaataacattttttatcatctgcttctttttatttagaagattgtaaaaaatcattattgatttttttctaatttattttttcattgtttatattcctgtccatttttctctttttttatgcttcaaaatgcttaaagaagcaacgtacgttaaggcactcatttttatagaatattaaaaatttatcaatagtaatcttggcataattcgattagatgaaaatttactatagaaaaaataaaataccaatataaaatgtgaaattttaaacattttaacctattaaacaaatatgtgatttggtttgataataaattaacgatacatttaaaaaacaattaaaaactcttaatcatcattggaatcacataattttacaaaaacaaaagtaaaagtggctaaaaacaataatttatataattttgaatttattcgttcaaaaaataaatataaatcaataaaatacttttttaatattttggtattacatataaacccctatacctctcctattttgggtgttcgaccttgaaaatccctattttttaattttcgtccctaaattaagtttgggccctattttgaaacaaatttattaaaaaaggtaactgaatttttaaaaaattttatataaaatatatgatacataaaaagaaataattttaaaatattttcaatcatataaattgttcaaaatttgattttttttttttctaaaatattcttcacaaaaaatatcagtgaataaaatgataaaatatacaatattagttatttttataaatggaaaaattagtttaataattcttatattatttattcatataactgtgcagaaaggcaacaagtgaattaaaataattttaagcttaaaaatattttactaatgataaaaaagaaaatataaattaatgatcagaaattattgtatactaatatgttcttggcaaagtgttttaaagggaattgttagattgatatattttaaataaatgaatatataaacgattagtcaatgcataatttgaataaattcgaatatttcatttaaatcatgacatgtcaatctttttcaccattcagcattgattcagtttatcttttttcttttcagtccaaacaatttaaagttaattttttttttattggattcagttgaaattagattcttgattataaaattttttaataatgtttttaaaaattttctaaattaatatatattaattt

SEQ ID NO: 25522 - DNA, 1133 bp, Heterodera glycines
atcagaaaagaggatagccgttttcccaaaattttcgacatcaaactcgcccagaaagaatttggaaaaaattagggtcggcgctatcattccgaaaatgtggttggaattcttcagactgatgatcagaaaaagagataggcgtttttccaaaattttcgacatcaaactcgcccagaaagaaattcggaaaaaattagggtcggcgctatcattccgaaaatgtggttggaattcttcagactgatgatcagaaaaagagataggcgtttttccaaaattttcgacatcaaactcgcccagaaagaaattcggaaaaaattagggtcggcgctatcattccgaaaatgtggttggaattcttcagactgatgatcagaaaaagagataggcgtttttccaaaattttcaacatcaaactcgcccagaaagaaattcggaaaaaattagggtcggcgctatcattcggaaaatgtggttggaattcttcagactgatgatcagaaaaagagataggcgtttttccaaaattttcgacatcaaactcgcccagaaagaaattcggaaaaaattagggtcggcgctatcattcggaaaatgtggttggaattcttcagactgatgatcagaaaaagagataggcgtttttccaaaattttcgacatcaaactcgcccagaaagaaattcggaaaaaattagggtcggcgctatcattccgaaaatgtggttggaattcttcagactgatgatcagaaaaagagataggcgtttttccaaaattttcgacatcaaactcgcccagaaagaaattcggaaaaaattagggtcggcgctatcattccgaaaatgtggttggaattcttcagactgatgatcagaaaaagagataggcgtttttccaaaattttcgacatcaaactcgcccagaaagaaattcggaaaaaattagggtcggcgctatcattccgaaaatgtggttggaattcttcagactgatgatcagaaaaagagataggcgtttttccaaaattttcgacatcaaactcgcccagaaagaaattcggaaaaaattagggtcggcgctatcattccgaaaatgtggttggaattcttcatactgatgatcagaaaa

SEQ ID NO: 25523 - DNA, 1570 bp, Heterodera glycines
  unsure (1)..(1570): unsure at all n locations
aaagggtaaccctggtgttaaagcgtgttgatggatcttctatagaaaatagtttcagatctgttcggccataaacacttttatgcgccatgaacagatcaaacagctttcgcctattctcaagtgttggcagttgcaggtattctaattgtctccgccaccgaaagaagaagaagcgggacaaagcatcacaaaagggcgaaatgagtgacggacaaaacaacaaaaaaacaatgatcagccgcagaagaagaagaaatgaattaattgagaagaatgactgactgatcataattaaatcagtgatcaaatgcaatttatgaagaaaaacctcttaattggtaaatcaatcggatgcataaaaatggcttgctatctatcgagtgtatgaatttctctctgcttgaaaattgtgacattaattttcgggattttgacgggggatttacgacgtccattagcaattagcacaggcaatattttaaaaagtgtcaatttgctgctgttcctctctcttttctgcttcattctttcctctttcttctcttccttccgccgaatttttccttttcctctctttctcttccgtctctcctccttccccaatgctatttccttccttttccacctcttcccttgtttctccatttttgctgttatccatcttcatctccattcacaccaaaatttgcttttgttgttgctgctgtactgcttgaacttcttgcttttgttgttgttgtttctgatggtgttcagctgcaattttctttttcctcttcttcagtttctgctccttttctcctctcttttccccccattttctcttccttctcctcccccttcgctgtttcctttttgctgttgttgttgatttggcgttttcttccgattgtttggcgccggcactgatagtccaccaccagcagtggagccagttgaatgttttgatttcgccttaaaatgccatttttaaatctgtatgccatggaggtgttcggcaagccataaatgccggaatgtgtaattccgtcgcaaaaactcccggaatgcggtcccaccattgacggtatccggattacggacaatccgtcagtggataatctttcggaagacaattctattagtgacggacaattcatcagtgaagaacaattcgtcagtagactgacgttccgtcaaaggacatttcgtcagagaattaaaaaaaaaatttgttgacggattgtccactgacagattgtccataaccgacggattgttttactgatggattcccactggcgcacatccagtagcaactttttccaaaaggcccaccgcttactgtatgccaactagctacagtatattattgttacaaaaacccatcccaagctacagtacccttcccctgctaccgccgccgtcctcctggtgggtgttgttgtgctgtcctttttgtgccgcatgaagtcgatcagtctgtcctgcacaatgtccggctcggaagcagcttcatcttcctcatttcgtgactctgtcgaaatgnagcgnacaccgccgcgccagcaagcgatcgaatcttttt

SEQ ID NO: 25524 - DNA, 1078 bp, Heterodera glycines
tttgttgcatagaaaatttctcaaaaaaagagatagccatttttctggaatatctattaaatataaaaattatttgaaaaataaaatggccatggcgcaccgcacttcgtttcatgttcgagagcgtttgttgcatagaaaatttctcaaaaaaagagatagccatttttctggaatatctattaaatataaaaattatttgaaaaataaaatggccatggcgcaccgcacttcgtttcatgttcgagagcgtttgttgcatagaaaatttctcaaaaaaagagatagccatttttctggaatatctattaaatataaaaattatttgaaaaataaaatggccatggcgcaccgcacttcgtttcatgttcgagagcgtttgttgcatagaaaatttctcaaaaaaagagatagccatttttctggaatatctattaaatataaaaattatttgaaaaataaaatggccatggcgcaccgcacttcgtttcatgttcgagagcgtttgttgcatagaaaatttctcaaaaaaagagatagccatttttctggaatatctattaaatataaaaattatttgaaaaataaaatggccatggcgcaccgcacttcgtttcatgttcgagagcgtttgttgcatagaaaatttctcaaaaaaagagatagccatttttctggaatatctattaaatataaaaattatttgaaaaataaaatggccatggcgcaccgcacttcgtttcatgttcgagagcgtttgttgcatagaaaatttctcaaaaaaagagatagccatttttctggaatatctattaaatataaaaattatttgaaaaataaaatggccatggcgcaccgcacttcgtttcatgttcgagagcgtttgttgcatagaaaatttctcaaaaaaagagatagccatttttctggaatatctattaaatataaaaattatttgaaaaataaaatggccatggcgcaccgcacttcgtttcatgttcgagagcgtttgttgcatagaaaattctcaaaaaagagatagccatttttctggaatatctattaaatataaaaatta

SEQ ID NO: 25525 - DNA, 2321 bp, Heterodera glycines
  unsure (1)..(2321): unsure at all n locations
gcccgatcatcttggtctttattatatagagtgcagcagaaaaagtcagatagtcctatacatatacnacataaaaacggattgactaaaacgattaattttagncgaaatgatgattaaaactcgcgatcaaaatggaaaacgancctccatcccatcattgagcgaccgttaaggtcatacaccgcgtcatcagcatcacgaggatcgtccaactcaacgaaagcatagccgcgctaagaacgaaaaattgaacttggagaagaatgcaattgatgcattaaaaactgtctcttcccgcccaatggatgtgctgctatcacacagaccttgatcagaatgtcgcgaatccgtccatatcctttaaagaagcgttcgacatccctttccctggcttcgtatggaatatgccccacgtaaattcggctcattgtggtgaaattggtaactcttttttaaaatgatgagtattcaaggaataacaaaaatgtctgttctataaaaaaagaaaatttgatttctatgagttagttatgtgactatgtgcctaagggactattaattggaaaagaggaaaatcaatgccagttctgtgagtttgtatggaagaatttaaatttgtcgtaatgtttttcatacggtatttctctattttaaaaatcagaccgaataactgttaataatgtagagtagaagccagtctggattcccgtggcgggaaagtggaaaccccagtaaattcccgtctttttttgccaaacgcttttatacaaaaaaattgtttcaaaaaattatttattttttctattttatgtatgcttaaatataaaatatttttatctcagctcgaatttttgtccttcctcaattgcgattctcggcattattctctcagtcttgattctcgataaagcaatttctcgcacttccctagtttcattttgcccacacaatttgcacacattggcactgccattcccttcccacgtcccatcgaatggcaccgccattccattcaatgtcccataggatttccgttaagtcattcgcaactctgtcaaattttctgccggtcaatttgcattaattggttaagtaattaccatttcttatccaaatttatccttatttgccattcataggacaaaaagggggcaattgcctggggcatttttgacgaggcgaaaaagtcagaaattccaaacttttttccctctcatttcaatcccccccccctccccctgctgattctctctctctctctctctctctctctgctcattgctcaaatcatttttttgttgtttttgatctgcagctttcggctgatcaaaatgaatgagtacttttgcacgatatttgaaaattatacaaccgaacgatgtcctccgggaggtgggaaagaaggaaactttaaaacgcatgttttacacaccaatcacattaacacttcaaatgtatggcagagaatgaactcgttatgtattttcaccgcgagaaaaatgaaaataattttatttttgtcttccaaatttggtttttacgtgataataaatttatacgaaattttttaaatttcatttttctgatcttctttgccgtttttgggcgaaattcgtttttctccaactgatgaagtgaaactgaataatttatcaaatttcgtagttttatttttttgccatcagatttatataaaattctttcgccaaaatctgcccaattttatccatgaaaaagtggtggattttcttttgttttgtgcttttttgttgcagcaaacgccacaaattttgcacaactccaaaaacatcgcttcgggcgacgacccctcgccctttcatttcatttattcatttgctgcccctttgacgagttttgggttccatccgtccgtcgatgggttgccgaaaaacaaaaatttcgtcgtcgtcttcgttttggtgtgtgtttccaaaaatagcccaccaatttgtcatagtcagccgccccctacggctgccataacgcggcactgaaaagtgtgcacagtgcacgacgacgacaacaaatataaactccaacccaaaccaaagcaccaaatcaacgccaatgcgtggacactcatttcattatcatcaattaattaactaattaattaattatcggctgtttattgtttgatcggtccgccaattggcggaagaaagccccgaggggcgccccgcggtgaattcgtcgtccatccgccggttcccccaattttcggcgtccattcgttcgtttgtccggctgttgtgttgcagcaacagtgcatttggagaaatggatgaatggaagga

SEQ ID NO: 25526 - DNA, 988 bp, Heterodera glycines
ttttcagaaaaaatgccttgtggtgaaaacaatatttcactttcactccataactttgtgagttcggcacggatcgagaccgggataagaccattggaaagagcagctcgagctctacaagaaggtatggaaagaaaaaatagttatttctgggactttttcagaaatcagaattaattctccaatgtggcccaaattttaggcccccagccacagccccttgcttctcccagttttaagtcttggatttgtcaaataaattcaagacttcaaattaataatcaaaaattctcttaaaatttttttgaacccaattcaaaaaaggaaaaaaatttgcagtcaaaaaattattcgaatttctccaattttgtttccataatttccgaaagttattcggtatcataatgccaaaacaaaacgaaatcgttttaaaatattcctttctggacttgacttggtttcttgatatcgaagctgttttctacgctatttctaaaacggttataccaaaccccagatttttgaatccggttttcagaaaaaatgccttgtggtgaaaacaatatttcacatttcactccataactttgtgagttcggcacggatcgagaccgggataagaccattggaaagagcagctcgagctctacaagaaggtatggaaagaaaaaatagttatttctgggactttttcagaaatcagaattaattctccaatgtggcccaaattttaggcccccagccacagccccttgcttctcccagttttaagtcttggatttgtcaaataaattcaagacttcaaattaataatcaaaaattctcttaaaatttttttgaaccccattcaaaaaaggaaaaaaatttgcagtcaaaaaattattcgaatttctccaattttgttttcataattttccgaaagttattcggtatcataatgccaaaacaaaacgaaatcggtttaaaatattcctttctggacttgact

SEQ ID NO: 25527 - DNA, 1429 bp, Heterodera glycines
acgttaactattcttaagagtggggccatctggttccctcctattgtgttttcgattaaatttggtgcataaatgtatctttgccttacacctcccgtcaaatccggcatataagtcgcctcttccgcgtgaaatagccttgtattcttaaatcccagaacatatgcgaggtgttttgacaaatctatatgggtgacggcagaggaaagatagacaataaatttttgatcaatactgtcgtagttaaattgaacatcctcattggctaatctctctcgtttttgcggccctttttcagcttctgaaacttctttattttcaatttccttacgtttaaaatgctcaccgagcgcctcgttaagcctaaccaccatcccgctaaaacccttttccgatttatcattatattcctcgagagttgatgtatatttggtctttgcctgtctggcgattccctttgcgacgtcggctgatttctttgcttctttcatgtcattcttttccacatgctccaatgttatgtttttggctttatctacttcttcttgaaaagatttaagttcatttcgggatgtttgaatttctgttcccatctcaaccattttgtcaaaccaaatttttatatcaggctcttctaaaatttgaggatttgtttctcgtagtgtgtttagttgggtttggatggaattcgatatattgttgatctgattaaaatgtctttctacgtctctcccggcgcgttctgcggccctctttgcgacatcaatttttgagtctttggtatcttcagccttggcttctctccttccacgttgttttttgattttgtaatgatgtgtgaatgcctcgttaattttatttcccaggcccccggcggttttaaaattcatgtccggtaaataaacttgagtcgggacactgctgtcgttttcccatactttaataaactcttgaccgtttgtaccgagtgccccgaaagcgcacggttccgagcgggtgtttaccgcacaaacccaaacctacgggaggggtgttttcttttgaaatgtgccgcccgctcacaaacccatgcctattggactacctctgaagctgccgccaagaaccaaaccctatgggaggggcgcaaccctttgaagttgccgccccatcaaaacccaggaggggaggggtgtgtgttccaaaccaaacctaatgtactccctatgaagttgacgcccgtggacatttaccgccaagaaccaaatcctatgggaggagggttgcatcttttcggctgtacatccgttttaaattttaacgcgatgtgccttgtgcagcggtcaagtccttcactaaagacttcggcgaaactttggagcacttccgccaatttactgacgaatttggtgtccccgaatttgttgcaccattccaattcctaacgctt

SEQ ID NO: 25528 - DNA, 1434 bp, Heterodera glycines
  unsure (1)..(1434): unsure at all n locations
aaaatgccataaaatgaccaanataggcttagaatcacattttagtactttattaattaatttttggtatctgttttatgaaaaaaaaattttgatttttagagatatatttttcaaaaatttttttctagatttcacaagaaatttctatatgaaaaaaaatgaaaatgcgtacgaaaaaattgcaaaattttggaggggcacctaaaaaattttcaaaaattgcaaaatatgtacaagaaacatgcgaaaaagtccaaaatatgtataaaaatatatgtacatatatgtaaatatgtagaaaaatcccaaaatatgtaaataaaagtcccgatttttgttcgcaaacacaaaaaagaaaatgtttttcctactaattaggctgtagaaaatcgaggaaaaaaacatgtatttacataaaaaaagaatccctgataataaaaggtgtccacttaaaccaacaaaaacaatgaaattatatagattcttgtagagtataataatattacagctttcgaataatatgtatatacaaaacctacgaatgttaaatttagctgacctttaagcgattttatgattttgttttatgtttttttaaatttcatttacgaattttacgaaacgagcaaaaaattttttttacttctttgtgatttattcaatattatattcatggaagaattaacgtttgaatgaaatattatttttaaactttgttttcttataaatcgaacaaaggttctgagacgatatggaacacaattttttcttaaaatttagctactttttttttttttttggaaatttgggtgaggaaggccttgaagaattgttttaagaattggcgaaatgttcgaaagaaaattaagtggcaggcagcgccgggaaaattcttttttgaaactttggccagatttgaaaagatttttatcatacataaatttaagaaattagaaaaaaaaatatgtcactaattcctaaaacagaaagctcaacagatgggacctctggattaagaatattaaaatatggaataaaaatttcaaaacatttccgtctctaccgaattctattttatttatataaaataatcgttcttttttgaaaggtttttttttcggataaatttgagtaaaaaataaaatttaggatattttgaaaaacaattattaatttttaacggctaactgaaaaaaaatttggcgattttacgctcaagccgactccaaccgaatgcaaccgctggcggggagcatggcgatcgcgttagcgattgcacatgagggcgaggccattgccaggccaatgcccatttatgggacagaccccattaagggcttttgtcccaaattgtgtccttatggccattagccacaaggacaaatatgccactagcgcttattagcgccagcgactatttcggctccacgt

SEQ ID NO: 25529 - DNA, 2169 bp, Heterodera glycines
  unsure (1)..(2169): unsure at all n locations
atcagtgcttttcatcattttgcatcncgacaaaagcattggcataattagcggtcttaaaaatgtttttggtcgattagtaaagcaataaattaatttgcctacccaaactctttctccaattcagcgctgcttccattaatatctaaaaaataaaagaaaataaagtaaaactttttcaaaaattaccgattaattttatgagcatattttcgaagtccgccttataaacttcgttttcgccacagatgctatcattcccaagaacatgtttaattgctgaagcatttattaaaaataaaaataaaaaattcatttttaatttttaaaaggtaaataataatttattcaattttttacaattaatttatgcattgagaaaatgatgtggaatttcattattatacgcacatacattttggcataataaagaaaaaataataataattgcgcaaacggaaatgaatataataaacaacaaccaattttaattgaataagaaaaaatgttgacggaaataataatttttaaaaatttgttggtttggggcttcttcgacttgttgcgacttttgcgcctcgacacttacgccgtcagtcaaaaaaagatcttaaaatttgttatcaattcaacaaatttaactcagactaatgtgcaacaacaaaaaagctaattaaaaaaattagtcacaaagacagacatataattttttgtcaatacgtatatcagcagcaggaaaacaaaaatacgaagatttaataacaataataataattaaaaataataataagccacattcatacacttcagcaagtcttggcatgaaatgcttcgaagaatggtttaattctcattataaatatatgtcgattttagcttataaaagttttttgattttttaaatatcttatttgtaatgaatagggctgctaattttatgtaaataaaatatgtataaaaaatgctaaaatatgtatgaaatatgtataggaaaatatgtaaataaattttttttaatggttattttttggaaaaaaattcttcgtaaaaagtgaaataggcacaaaatgccataaaaatgaccagaataggcttagaatcacatttgaatattttacaaattaatttttgatatatcattttttgaaaaaatcgattttttagggatacattttcaaaaaaatttttttttaattttttacaaaaaatttctataaattctcaaaaatcctcaaaatatgtaaaaaaaatgaaaaatatgtacgaaaaagtccaaaatatgtataaaaatatgtacatatttaatatgtagaaaaatcccaaaatatgtaaataaaagtcccaacctttgttcgcaaacacaaaaaagaaagtgtttttcctaccaattagagcatggagaaaccaggaaaaaatatgtatttacataaaattagcagccctagtaatgaaaggggcagggcaaatgggttttatggggtggcgagtgaatcgaggcgcaagtgaagcggctcaaatgtcggtacacctttttcgagaatgaattttataacgcctatttcggcattttgtgccttgtgtacagacagtttgcacataaaatattaaaaaacaaatacggaaatatgtacaaatatctttgaaatatatcaaaatatgcaaataaaaattttgattatgattttttaggctaacatttcttagaaaagaggtggataagaacaaaaggtcaaaaatacccaatggctttttcgaaattttcatgtgcaattcctgtaattctctaacttcaaaatttgtaaaaaaaaattttggatttttcttttgggtatttaagaaaattccttaaaaaacctcaaaaattacgaaatattgatgaaaaaataaaagtcccaacttttgttcgcaaacacaagaaagtaaatgttttccataaatatgtatttatctgtgtttattcccagtgaataataacaagaaatatcaatgaaaataataccgtatttgctctttttatgtgccagtctccattaaactgccggtctccaattatgtacccctttctgaggaggttgaaaaataatctaacagtctccatttatgtgccaggggggataaatagactcaggaagtaatttatttggcacattttccaaaaaaatcaattca

SEQ ID NO: 25530 - DNA, 917 bp, Heterodera glycines
tgagaaagaaaagaaagaattaaaattattaaaaaataattaactaaataaaataattattaaattaatactttttcaaaattatttcttaaaatattaattataattattgaaaggaatatagaaagttacccaaaaattgatttaggcaacttcagccccgcattttggacgccaaaaacccatcattcagtgcgcgatgccaactcctccaacaaatgttgctggacctgggcattccctgtctgggcgacgaagttgctcatcaacatttgtttctggaccgccttgacaaggtggcggccaccgttaaggaaagtggcaccgatgggaatatggtaggcacatttacagtacgcaaatgatttggaattttcaaaattaatataaaaaattaacattactattcatgaatgaatgcatgcttttaagaacaaagtgttgcacaaagagctgtcccatttgtctgacgcgttggacatgcgcaatgttcgaattccgatcgcccccgccttccaatgccgcacaattgcggtggcggactgtgccattttcaattcattgacaaagccaataaaactgatcatcaacggcaaacggggtcaattcggcatcatttataaggcaaagatcactgactagggcatttaattgggcgataatgtcagaaaatgacatcattggaactcgttcgagattttgatgacctttttttgcagcgcgcttttcaaaaaaaaatcggggaaatttttgtaatattttaataatgcaatttgctaacagattttatccaaaaaatgacaaatttgcgattttagccagacgacgacttttttaaaaaaaaagcgtttttttgcggcgcgctttttgaaaaaaaaaactttttttgagggcaggggggttcggcggcgtttgcg

SEQ ID NO: 25531 - DNA, 1580 bp, Heterodera glycines
  unsure (1)..(1580): unsure at all n locations
aattttagtgacagatttagttcaaaaaatgaaaagattttgcgaatttttattgngttaaatttatattaaatttccgtcgaaaaaagaataattttgaaaaattagaagaaaagaaagtacttggatgggaactgatccaaagaaacataatgaaaagagcaaagagcactaccactcgaccatgcgtgtgaacaaaaaaaataaaaacaaaaaattaacaaatatatattaatttaagtttatcaaaagcccattactaatggtgcattttcacattgaaaactcaatctttaggggtgtatttttcccgaaacttcgggtaaaatagccgaagcacgaagttcgaagctcaaaaaacccgaagttttcgaagccgaagtttcgcccacccctgattccgaccccaaagatgacagaaattgaaattaatcctcttccaccaaaaaaaaatgtaaggaaatcggagtcccttaaatcactggtttatataaaaaaaaattttacgaaataatccatttctcattgtgtgctgcagccaacagcgaagtgatcagcaacagaatttgccgccattctttgccgcacaattggacgaaaacaatgatcagccgaagcaaaaaagagcgaaaaagattggtgtcggaatggcaaaaagaacaaagaccggtgcaggaaacaaatggaagaggccgggaaaaggggcaacaacaaaatgatgacgaattattgctgcagttttatacaaaatcatttctctttttttgtcacaaattggaaattgttgttgattaacaaattttttgtgcgtattgaattagggagttcggaatggatttgttgcgaaaccgtagggattttgtctgcgatttctgacaaaaaaaaaaaatttgcaccccaaaaagtccatcttctctttgattttaaataaaatccaaagaaacttttttatttcattctttctattcttgtgtcttggtaaataacatagggcccaattttccatgtgattcacatttgcgccttgattgctttatcattcactgtgcatataagtgtctaaaaagtaaaactttggcaaaaagaaacaaaaaagaaaatgcttgatgatgatgatggttttgctttgctgattgtgaggagagagagggcagaggaggagggaggtgaatgaatggtgtgaaaaaagagtaggtatataataataacatttttttgatatttttacaacaaaacaaaacggattgaatgaatcatcgatgcaaattcctctcctttttcgacggcatttcatcagcaacaccacctccttcaccaccaccaccaccaccaataatgccatcattgccaccaccaccagcagcctcgagttggcggggtgggggcggcggtggcggcattttgtcaacaccaccagcgtcgccaccacttgcgccgccctcctccaactgctgttgctcctcaagctgtttgcgctcccgttcctggctttgcttcttgcgctcctcgcgcagcttgcgctccgccttcaggtccgcctcaatgctgcgcaacagttcaatttttgcctgcaaaatgga

SEQ ID NO: 25532 - DNA, 1780 bp, Heterodera glycines
attatatggaacaaattgaaaatcccaaaaactttttcctttcaaaaaattgcacaaaaaaaaagaacttattttgttataaattttgtcagtttttttaattgcattttcagcaacatttttaattggtgtttcgaaatatcttgaaatttaaattggtaaatttctaggctctttttcatatttgtgccatccgtcgccaaatatttcatcaaaatttgggcggattttgccgcattcaattttataaataaagaaatttattgaaaaaattatttgccagaaatgcatttttattattgggatataattttaaaatgaaaaatatgtttacattgataatttcttttcaataattgcacaataaaattgagttttgttatggtttaaataattaatctttttattatttatttattcataatatgtatcaaacatcgattctttagcttatttttatttgaaaggcaaataaattttggcataaatgaaatgctgattttatacattaacgccgataccgaaaataatttctttatacagacatatacgaaattttctcaaaaccccaaaattaaataattagcttaatatcagattacgatctggtccgtaatgattaatgaacttgtaaatttttgtaaaaaataacaaaaaaaaaattctaaaatctcaattcaaaaatggcggattaggaatctgtagaattggctccatttgccgaaaaataaatatgaaaaataatgatgagtcaaatatgaaaaattgggatttaaaagaatcttttttttcttcgttttttttattccaagctttacagtaagtatacatttaagcattttcaaattgaaaaaattatcggtcaaaaatagcaattacacaaatacagtacaattagatgtttttcgttgtgtgaattgattaagctaataaaatggtcacagtaatccttcagattattcagtgatactgtaggtcagcccaacggaataattgcccttctgtacagcactggcaatgatgatcacctcatggcctttcacttcggtgaacatcgactcggttggcagcccacaacaaaatcgtggccctaaacatttaaaattaaaaaaaaagaaaaggtaatttattaagaaaatgttaatcaaatagaaattttaaaaaaatttgtttttgatgttaatcaaaataattttttgattttttagtacttcttttttaaatctaacaaaattttatctaaacaaggagaaaaaaaattcagcaggctgagaatttttaatttggggtgcttacttatgaatttctgattttcaagtttattaaaaattaggatttttggtcaacgacaatttagtacagaaatcccatttgactgcgatgaaaatggttaaatttgttgggaatggatggaaatttttaacgtttaagcgttggaattttaaaaaacgcacaaaaataagcgagtttttctaacgcaacgaatttaaatttgtaaattttgttgtccaattttacccgaattggccaaattgccatgcttgatctcgacaaagttgtagcacgactgctcacatgtgaacccgtccagacggaacagtttgacctcaatgtaatgggaggccggtgcacgcaggcgccaatagcacgtgaaattggtggcattgtaccaccgaaattcagtaaatgtcggattttgtggggtcaacaaaatgttcgattcgccgggacatcttctaaaactttaatgaaatttcaatttaaataaaaacttaatgtt

SEQ ID NO: 25533 - DNA, 1075 bp, Heterodera glycines
aattttgaagggcgggggggggggcgaaggcccaccacgaggccgcgaagaggccgagtgagtaccttcggtgcaggaaaattattaaattttaaaaattttttaattgctttttaaatatgccaaaaaatgtaggcttaacttttttagtgaaaattcgatcactcatattttttgctaattgagcagaagcgtaccaaactttgcagggatactccccggtaaaggactaacttacactgaaatgagcgccgagctagctggctcaaaaaaattttcgaaaatctgagtctttcgtttttatttattttttgcaaaattaattcttaaatattttttcagaaagggttctgaaacgcaccaaattttatttacatgttagtttaggcactctgatgctttttctatcaaaaagggagatgaataaaatttttaaaaatttttaattcctttttaaacaggccaaaaagtttaggcttaacttttttttcagaaactgatcagaagcgcaccaaactttgcagggatactgaaaggaagagaaataacctattttaaatattatctagtcagttcatttaaataatttttatccaaaaaatttttttttgggttttcggggcagtccccctgaaccgatgcgcccagatttatggggagaccgaatccttccggaatagcttcactatagcctgtactttaattctgcgttggatttttgctccccataattgtttgagtaccccaaacggacacttgaaaaaatcgatttatttttgttttcggggcagtccccccgaaccgatgcgcccagatttatggggagaccgaatccttccggaatagcttcactatagcctgtactttaattctgcgttggatttttgctccccataattgtttgagtaccccaaacggacacttgaaaaaatcgatttatttttgttttcggggcagtccccccgaaccgatgcgcccagatttatggggagaccgaatccttcgggaatagcttccctatagcctgtactttaattctgcgttggatttttgctcccccataattgtttgagta

SEQ ID NO: 25534 - DNA, 1247 bp, Heterodera glycines
  unsure (1)..(1247): unsure at all n locations
cgaataaatttgcgccaccgaacatttcgtcaagattccttcaatgantactgaaaagataataaattgaataacaatctgcggagacactttcaaaaatcagagatttgaattccgtacctaaaggaattgggaaacagaatttcgactaatacgccacgcctctaatttttgtctacaaattgcgatctgtcgcccgaaataaggaccaatcttagaaaaaagggtattttaaccctttgagttagaacattattataaataggacagaccgaagcccttggtaatactgtcaaagaataacccaagatcaaagattttgaccacagtggtcttatccgtgttggactatttccgttattgcttcgtcagaatcggtctcacctttgtgccctgcaagcctattgtttaattaccttctcactgccaagcgacacttggctgggctggaacaaattttggcaattcgccacaaaagccgtcagcagcaaaagggtgccaatgagcaaccacagggagaggaatggtaatgagttcattttggcacacttcggcccacaaaaatagcaaattaattaatacactaatgaatgagtggttggttattacggtgtccatttcccatttttatagccaaactttccgcccaattggcgaggaaaactgtgtcagcagcggcatttgattgatgcgaaaaaagaaatgataaattaatgcgagaactgtccctttttggttttattttaagcgacgtaagcacagagcattttcagtccgagcaaatttaaacgaaattcaaatgagaaaaacagcagaaattaggtagaatattaaaattacagaagctttaagccaggctaaaaatgaactgagccccgacatttgcggcacgacttttggccccgacatttgcggcacgacttttggccccgacatttgcgcctaggtcaaatcggattcaaggtaaaaaataatgctggttaggcgatcagggattgaaaaaacaattttgaacccgatttggacaaaggcgcaaatgtcgggacacgaagtgaacgttgaattgatgcaatttgtccttccaacacaaaatttgattgccttattttgactttttgttatgtgttaaaaaataaagaaaattcattattatattcgagtaagaaatcaatataaaaaaatttagtgaaaaatataatttacctatgcggaagttttttttaaatactcanattactattttcaat

SEQ ID NO: 25535 - DNA, 1758 bp, Heterodera glycines
  unsure (1)..(1758): unsure at all n locations
atccgatcattaatattaatanntttccaaacgcctctccacccccggtgacggcaccatggcgctgtgctgcgacacgacctttctcgcccggctcgtccgccagccagcagcaatgcgtcaagcgcgaggacgaaacaacggcggtggaacagcagcgacaaaacaccggcacgagcatgaaagcatcgccgtcgctgtcgctgcggcaacagcagcagcgagcaacggcggtgcccaaggcggaagtgatggcggaagacacatgcgacgaacaagcgccagaccggcatcagcaacacccgggaggcaacggcaccggtggtggcggcgagctcagccccgaagacatgctggtggcggtgcagcggcactcgctgttgctccaactgttgccatgtctgcgctggttcaacgagtccgcgctggtcgagctgttcttcaggtgggagcaaatgcatttttaatagccctaaaatttattgaaaatctaaattactaataattcaaaaaatattatatttaattataaaatttatataatttacgaataattctcgaatattttagcacattgctcggctcaatccctatcgaaacagtgatcccattcatcctgaacaccaatttgccattgaataagctgtaagacatttttgaaaaattaatttttataaaatttttgcaattttttagtgatgaacaatgtgacgggaagaacagcgccaacaccgacgcaacaacaacaaccacgaccacaacaaccgctgaagcaacaatgtctgagcagaatggtggcgcgaatggcacgcccgaaaatggagacgaacaacatggagacagggcggatgttgcggtagaacaacaccgagcagtacaacctgctggagcaggacaaggactaccttctgccgcggttgcggttgcagctgccgcagttgcggaactgttgtccttaaacagccctgctgggcaccggaaggaaaagcatgtgaaagtggagcagtcagaagcagttgattctaatgatgatgataaacgtgacggatgcgcggtggaagatgattaccagcaaagggacaagcataattatgagcatgagaaggaggagaagcaaggacagcaggagagcaagcagtaccagcaacactagcagaagttgcgcaacgatgagagtgatcaaaaacgccgatgggccgacaacacggcagcttaatcctcttatcattgatggtggatttgactggcgagcagcgaaaaaacttttggcgttgagttcgcatgaaaaaaaaaatcggcagctgctgctgaaccgcccccagttttggcattttgtttcataggcattaattaatcttcccacccgctctccactttttgtgaaattaaccttttcctacatcaaaaaacaacatttttgtaaatattgtacccattttggtgaccgactgtaccgtaccattctccttgtcttacagtatgctccactcttttccgaccgtcgagaaatgtctttcatcattttgtccccatatttccgaacaattacctaaattatattcattcatccatttttgtttgtccccccgtgagcacanattttgctgttgcccgttggctttgatttgcttagaaaaacccgttagaaatgccaaaggcatataccgtacncaccacagtaattgattaattttattattttttcactaattattgttttatccacccgctaattgctttccctttacatttaatgga

SEQ ID NO: 25536 - DNA, 1119 bp, Heterodera glycines
tccaaaaaaatggcatctctttttttgccatctggtaatagaaatctcttggaaacaatgacagtggctgtcatcagttgttatgctctaaaaatgattttcggggcgtttgagtatatgtgaggtatggacggtccaaaaaaatggctatctctttttttggcaatctggtaatagaaatctctttggaaacaatgacagtggctgtcatcagttgttatgctctaaaaatgattttcgggccgtttgagtatatgtgaggtatggacggtccaaaaaaatggctatctctttttttggcaatctggtaatagaaatctctttggaaacaatgacagtggctgtcatcagttgttatgctctaaaaatgattttcgggccgtttgagtatatgtgaggtatggacggtccaaaaaaatggctatctctttttttggcaatctggtaatagaaatctctttggaaacaatgacagtggctgtcatcagttgttatgctctaaaaatgattttcgggccgtttgagtatatgtgaggtatggacggtccaaaaaaatggctatctctttttttggcaatctggtaatagaaatctctttggaaacaatgacagtggctgtcatcagttgttatgctctaaaaatgattttcgggccgtttgagtatatgtgaggtatggacggtccaaaaaaatggctatctctttttttggcaatctggtaatagaaatctctttggaaacaatgacagtggctgtcatcagttgttatgctctaaaaatgattttcgggccgtttgagtatatgtgaggtatggacggtccaaaaaaatggctatctctttttttggcaatctggtaatagaaatctctttggaaacaatgacagtggctgtcatcagttgttatgctctaaaaatgattttcgggccgtttgagtatatgtgaggtatggacggtccaaaaaaatggctatctctttttttggcaatctggtaatagaaatctctttggaaacaatgacagtgcctgtcatcagttgttatgctctaaaaatgattttcgggccgtttgagtatatgtggggtatggacggtccaaaaaaatggctatctctttttt

SEQ ID NO: 25537 - DNA, 1732 bp, Heterodera glycines
  unsure (1)..(1732): unsure at all n locations
ttttaactgctggttttgtttctccgcattggaacacccccccaggtgagaacatgaagcaggcgatgaagatattcaccctcagaattaaattagccattttacagaaaaagaaaataaacaatcgtttagaattttgtttttgaattttcgaccttttgttcaaattcttgtcggggattcgaaataggccaaaaaatggggagggggggggggcaccggaggcagtattaccgggacctttatcaacaaattaaaaaattatgggctcgaaaaattggaattttggctgaatattccgaaaagctcaaaatggcactaatctgcctcgtgcggatataatattagggctctagttatgcagatatttgattattattcatatttgctttgccttttatgctatcttatgataaaataatgacaatcaatgttcaacttcatgtcaatgttttaccatggataaagcctgatgtttattgtttaaatttataaaaatcaatgtttaactttttttaaatacttcatcgcaacctcatggcattggcatagccctgccctgtttgaacatggccccatagcatggcattggcatgtcctgccctgtttgggcctggccccgtagcattggcaattatttttttcatacattgaattgttttttaaacgaatttcaaaaaaattctacgctcaggcttggagtccagcaggcctcggcaagcctggactttttctggaatttccggaaaatttttggcacaagactcggaatttgcccggttggaatccatatggggattgaaatcccggttgaaaaaaattaaaaaactgaaagattttagtttccgaaacttcttagaatttcattctaataaaaagaccaaaaaatcttttgatttttttttgaaaacttagatttaaaaaaattttctttaaacgctataaaataaaaaatattatttaaaaatgcttttaaaattaaatatactttctggaaaacatttaaatttagaaaaaggtagagagagagaggttgagataggcagagagaaagcgagatagaaacagcaggtagagggggagagacagagagaggggtagagagagagaaagagaatggtagagataggcagagagaaagcgagatagagaggtagagagagagacagagggagaaaaaaggtaaagaaagagagaaagaggtagagagagagagagagagaaaggtagagagagagacacagggagaaaaaatataaagagagagggagaaaaaggtagagagagaggtagcgagagaacaacaggtagagggggagagaaagagagagcggcagagagagagagcggtagggagagagagagagagaggtagggagagagagaaaggttgatagagagataggagacagagggagaaaaaaggtaaagaaagagagaaaaaggtagagtgagagagagagagagaaaggtagagagagagagagagagaaaggtagagaaagagcgagaaatgattataaggaaggaagataaatgagattagcgaagaaatataaatagatggatgcgattagcgaagaagaataaatagaaaatgtttattgaaatttaaattctgaaactttaacagagcgggatgtgcgccgcgaagcggcgcccaactgctcgtttttactattttagtgacgaaacgacanaatagtgatttctagtgaccgataatgacatc

SEQ ID NO: 25538 - DNA, 1712 bp, Heterodera glycines
  unsure (1)..(1712): unsure at all n locations
aattaatacgtaatttttgagttttacagagggaatcatttcatattaatntggtagtggttttccctttttggagaatttaatnatttagagaattatttgatttaagttttgaggaaggattaaaaaatggtggtattttatttgtatttgagttgtattttattagtggatgatgtgggagataatgaagtaaattatttgatttaaattgagnaatttaatttatgttagtatatatttgttattgtaatattttgtnataatttgtgaattggttgtttttaattagttgtttaacaacatttcttagtcttcccatgcataatccaaaatttgttggtaaattcgggttctctcttttataaggccatcgaacatggtatctgttatttttaaatgtaacatttttatcaaagtgtatcattgctgcatcttcatccgtcatatgtggtgagtcgataattccaatgttttctaattcccaaaatttctgaagtatttggttcgtttcgtctttttttcttttttcggtcactgagttacaatttgtgtcctcaatagttccttttcctgataatatttttcctaattttgtatttatcgagtaaaatcctgatggaagtaattgaatttgtgaatttggtaacatgaaatgccaataatggtcgattccaattagaatttgaggagatgcgtgactgattgggatttttactccgagtacatcaacattttctttattaaccatttttgtaacatcagtaattttttccactgtttgtagtgttatgtactccacttcaccttttaatgttttaatgccaactttgactagtctcgatttaatgatttttggcttattttgattgaaagtggaaattgctaataatttttcctcaatcgtagttaattgaagagattgggcacattcttcggttatatagctcttttgtgacccattatcaaataaaattatttccttttttactttatgtttgtcgggatttatgcagtttacttcagcagtcataagtaattcttcttcctcataattagataaatttttatcataatccattgtcatgaatgtttgtgtctcttcatgattttcgtaatttttagccatattcactctggttttttgctctttcggtttgtactgagtttgtttgcgggtacaaaggagagtattatgtttgtatttgcaattaaaacataaataggtggatttgcattcattggccatatgtcccttatttagacaatttagacaaagtttgagttcacgtacacgttcatttcgtttctcgggggttgaataaattttgcactctttacttgcatgattttctctctcgcaaaagcggcaaaatgttttattttgggttctattttgtgttggatttggcttaaactgtgcaaggcgtactggttttgatttggtcgtgaatgcggaggtgtatggaaaaggtgtggaagtctgttgattccgtgggtttggtttcatttgattgtgcgggaaatttggatagtattgtctttgtactctgttttggggtggtctattagaggggaaattccggttttggcggttcgattcttccattctttctatgtcttcacgtgcttgggtatgatcatttagaaattccattatttcttttgttgaataaattttaaatttttccctccanatttaagtctaatgt

SEQ ID NO: 25539 - DNA, 1472 bp, Heterodera glycines
tttcaggcacagttggcataaggacatcagatgtggtagctgcagagctctggtccattgacgatctctcgctcatggaatcattagcttgctcctacctaagccgcgtcttttcttgtctgatcgccctccacggcttctttctgtggaaataggcgttgaaccaattttttcaatagcagagctgggtaggtcatcatcgtcggccttccattgtttgctgcgcgtcgtttcaatattttgagtgacctatgttaattggatgtcgggagaagacacatgtattgtcggaagcgccgttgcattccgttaaggttttcaggggtaataactgtctgtcaatggcacttgaagtagagatcgcggacatcgaggtgtccaatgtgttgggcatctccgcctactgggaccagttcccgtcgctggcacggcaaatacaaatttggcatcatgtccgagtcggttatcaaaacaaaatgacacaatgacattccaaaatgtgccttcctctctctgtcaggagcgtatgattgatgcgcaaccgttgccaatcatttttggccattcaattggtggcccatcatcatccacctcgggcggcacaaattgtggctccgttggacgacgcgtgtccaatgccgggggcaaaagacggagcgccggcaccaacaacaacggcaccggcacaaatcaccaacatttacggcattcattgagcgccatgctgaacatctcgtcctcctcggtttcctccgttgattcgtcgtcgtccctgttgttgttccccccgctttccgcgtcatcacattcagtatccggttcatctccagccaaacagcaacgacggcaccaccaacaacaagcagcatcatccagcaccgcaaattgttgtgccaatgcggacgacggcatgggcgatgacaaaatggaagaccatcaaaatggcaacaaattgttggccaagatggtggtagacgggcaacagcagcaaacgaaccatgccaatggaaaagggacggccaaacgggaggcggacgagcaaatggaggaggaggaaggcagcagcaatgggggcgaaggcccacacgaggccgcgaagaggccgagtgagtaccttcggtgcaggaaaattattaaattttaaaaattttttaattgctttttaaatatgccaaaaaatgtaggcttaacttttttagtgaaaattcgatcactcatattttttgctaattgagcagaagcgtaccaaactttgcagggatcctccccggtaaaggactaacttacactgaaatgagcgccgagctagctggctcaaaaaaattttcgaaaatctgagtctttcgtttttatttattttttgcaaaattaattcttaaatattttttcagaaagggttctgaaacgcaccaaattttatttacatgttagtttaggcactctgacgctttttctatcaaaaagggagatga

SEQ ID NO: 25540 - DNA, 1120 bp, Heterodera glycines
  unsure (1)..(1120): unsure at all n locations
aggaaaaggcgggttggcgaccattcgtggttgctggctaccaaagggcttgaattggncgtggacggaagtaaggagccgtacgttctcgacggcacaggtcagtctgtactggccgcgcaactcgtccatcccaatttcgaattgctttcccgtatttgccacattggatcgaagaacaggaaagggcacaagaagcactgacatttggattgccaatgttgtttgccgaagtggacggtcgttgatcaagaggcacatttggggacacttgttgggccttcaacattatattagggggtggtaaaaaacgatgaatctgagcccaattcaacaaatccaaattcgtcggaattgacaattgccccgtcgtaccccttttttctacaatgaatgaaatggccgaactcaaagctattattaatcgcctatctgcaattgagaaactaatttcaacaaacaacaacaacacattggcgaccgaaatgactgcgcagttcagcgccatcgcggaccgcctcggcgaaattgagcgcaaattaaacaacaacaacaatggaattggcagtgcggaggataaggagcgaaaaaggagcctcgtgctcattggtcttccggaatcagaggaggaagtgccatcgcttcgagcgaaggatgacgcgaaaaccgtggaggaagtgttggaccgtttggacgtggaagtgtgcccgcaaatggtctacaggatgggcaggaggagtgacgaaaagaggaaggggccgcgcttggtgaaggtggtcctgccggcgtccaccttccaacgcttcgcgctgatgcagtgggggcgtcgtcggacggagctgaagaagagggctggttgggagcgtcttctggtcaggccatccctgacgaaggaggagctggaaattgaacgagaacagcgccaaaagaagtggatggaatttggacagaagaaaacggatgaaaacatcacgacgcgacgcggaggcaatgaaaaaaacttttgaggtcacctccttttttaaattgtttatattttaatgcaagaagtttggttaacaaattggacaagttaagggttttgttattagaataagtttaaaatcatagctgtatctga

SEQ ID NO: 25541 - DNA, 1956 bp, Heterodera glycines
ttcccctcaatcgtcgccagacgaagtgcaaacattctgctacacccgtcgccctcaaactccgagccgtgctccattcattcgtcagccttatccaaaatacgatcgtcagcttcgttattcgccgtttttcggtcgtcaaactccgattttcttttctcgtttcctagcgcgtatcgattttctgatttcgatcgcttaaaacatcgccaaaagcccaccgattccctcacaaaggatcgggtgtccaagcaagtgactgtgggaattccgggcaaatcttccagggtaattaggccacccattagcatttgttattacatttctgtcattttttcaaaatgaatctcctggccgagatatgaagttttcctttttagcgtaaataataaaatatgatatttattagctaattattttgtttaaaatacatttgatgagaaaaggcaaaataaaacaattttatggcagagaattgaacaagaagaaagaaaaaaagtggtgtgaggggaatttctgatcaaaattagctgaaatatctccgagatatcattttttcttccgttctagcacagaaaagatttttgaaattaatttgtgtaaaagatggcaatcatttggggtgcccagctgatcaattgatcagtccatttgcgagtaattcgcctgcgaatgtttcccttccattctgctgctgttgtccatcactaattgattgtccttcaaccgaccagtgatcacttcctcttgcgatggtccgttctttgttcgacatttgtctggcctccgtttgccagcgcagtttggtgttcgatgccgacctttctcttctcccctgcgactgtaaacaacgtttgatggagtttttcgcatcccatgaccaagtgattgtgccattttttctttgattagccaaaatccgcttcagttaaactccgaactgtgctttgggcttatgtcacggccaatgtttggtcggaatttggtaattaatattttaattgaaaaatatttatgtcaaaatgcttcagactcgcctctgcttttacctcagcgaccaattgaatgattcgattttggaagctttggccaggcatttcttaatcacgaacttttcagttaaatcgctcttttcagttttaaccaaaaccttcgcattatttcgatcgtcgaatgcccccgggtcactgatacggtaatgcatttgccaatatcatttgtaaatatagatagcatcagttttcattactctttttaaagattgtccgtcaatttaaaaattgtattaagcaaaataatgtattaatttttaatcataaattattttttaattaattcttttatgattttttcaattcattccagggaattgtcagcgtcactctccgccagaataaactcgtctgcctcgagttagtcggaattccgctgctcacttccaatgcgctcaaggctgtgaattcgaaccgtctgagaagcgtcgatttgagtggatgccgaaaggtgattaattaagcaggcaaaacccctaaaacacggacacgaacccccccccccccctccccaaaaaccaggcaaatgcccgatttctttgataaaattgaaaacatttataaaaaaattttaaaaaatgatcacattttatattccattgacttatctcagatcgcttcagaaggcattttctacttggtgtttaataatccgtcaattgttagcctttgtttgaatggctgcaggggattggacgaggtgtttcttctttgttttcagcaaccattcgttaattaggccaattattcagcaagcactttacgacatcgcgcgatgcatcggcgaaacgttgttccgtttggagttggaccaattgcacaattcgaacatggccgagcacaccgaggccatcagcagtctctcgcgccactgtcctaacatttcccgactttcactttgcca

SEQ ID NO: 25542 - DNA, 1238 bp, Heterodera glycines
  unsure (1)..(1238): unsure at all n locations
aatgagtctgatcactgatcagtttgagtgtggcctccctgaatgggcttcccgacatattgggtggccgccattgtaatggcgccaaaagagagaagcatggcggtgtattggtagttaagtcggtcaatgatatcattggactgatagctaaacaatagcaaatgaaagaatccatcgattaaagcgaaaggacccaacactacgaatgtctttttggaggatcctaacaataagcaaaccttcgtcggattttggtcaaatatggcgctattgctccaatcatcgtcgttttttgttccgtcctcactgttttggtcggattagtgcattcactgtttttgacaaacaacacaacgcacagccagcaacagtcagtcggagcaacgcgcaacgatcgattggggaagaaaagggaggaaaaggagggaatgaaattgcagggatatttaaaaggggagaactttacgggaggagaattggagaccaaaggaggaaacggacgatgggaggcggaaaagacggacaaagggagaagggccattagagagagagagagagagagaaatggagggagagagagagagaaaagggaagcttccaatcagataaaagcgagaaaaccggataaactctggaccgaaatgaaaaatttcataaacctcatttggctcacaaaaaacctcattatgggtcaaagagcctcacttgcgcctttattttgaatacggtataagattttgaattggcaaaatgttcatgaatagtttttttgttttgtttgcgtgttttcaatcttacgcttaacaaattgtaaaagagcctcacttgcgcctttattttgaatacggtataagattttgaattggcaaaatgttcatgaatagtttttttttgtttgcgtgttttcaatctttcgcttaacaaattgtaatttgagttacagaatttttcatacttacatattattagtgataaaaataatcagttttctgtgtttctctgtgtcaggttttataattttcgaattaacaaaaatgggcgctatatggaaagtgggcctttttgaaacaaaagngggggacccttttgttttgtaaaatttttttaagataaaaaaccatgataattttttatccggggttttaaaggtcgctaataaaggatctgacatgtattttgaataatttctaaggcctgggggggctcgaataaaaatcggaatttaaattttcaaa

SEQ ID NO: 25543 - DNA, 1282 bp, Heterodera glycines
catggtatgaccacttgaattatcgattgattttctccgctgagcgcagagaggatgagcgggcgggtccgtgcctattaggtggttgtgtctacgtctctgacgggaatggggtggggggatgcgtcgggagatgtgggttcgggatggtggtaggtgcgcgggatggtgtggggtcgggatttgggggtgtgggaagggggttgcgcgagattttgggccgtgggggttaaatgcgcgggagtttcgccgcgcgggattgaacccgagatggtggttggtaggcgcgttaaccagtcggccaccgatggaatgggcggggtcgtgttattttgcgttaaaaggcgcgaccccctccccgctggtcgtcaccgccatttcgcggggcagcgcggaccccctctcgccatcgccgcggaccctccccaccattccgccgtcagtcggcgcggaccccctctcttccacggaccccctccctccactgccgcggactccttctcttccacggaccccctctctctactgccgcggaccctccccaccattccgccgtccgtcggcgcggacccctctctctactgcctcggacccctccccaccattccgtcgtcagtcggcgcggaccccctctcttccacggaccccctccctccactgccgcggacccctccccaccattcctccgtccgtcggcgcggtccccctctcaccatagccgcggaccccctctctccgacggcgcggaccccctcaccccgccgttcggcttaaggagtggtggaatgattgcctgttaaatttgaagtcaatcgtacaaggggtgagcgagttttggtgcgcgagtctcggtgtgcgcgagggggcggggcgtcgggacagtactgcttgaaatggtgcctgaggcgaaattctttcgccgttcagcttagggatgggtggattgacagactgtgaaatttgaagtcaatcggacaaggggtgagcgagttttggtgcgcgagtctcggggtgcgcgagggggcggggcgtcgggaaagtactgcttgaaatggtgccagaggcgaaattctttcgccgttcagcttagggatgggtggattgacagactgtgaaatttgaagtcaatcggacaaggggtgagcgagttttggtgcgcgagtctcggggtgcgcgagggggcggggcgtcgggaaagtactgcttgaaatggtgccagaggcgaaattctttcgccgttaggcttaaggagtggtggaatgattgcctgttaaatttgaag

SEQ ID NO: 25544 - DNA, 2157 bp, Heterodera glycines
  unsure (1)..(2157): unsure at all n locations
aaataaaataaattttaaaaattaattcaattttataattaaagaaatttcaaatatgggattacaaggtgattnatttgcattatttattatggtttcgcaattattctttcggtcatttattttactgtgttaatatcttgttttatgtattaacttaagctttgatattaacttatattattggaaattttatttccgtacagtaaactttgtaaaatataagtaagtttttttaaaatttttacttaatttatttttttataagaaaatattttgtaaaagtgtcaaatgtccttgttctttaaattttaaactttattcagatataatttagtttaatatcatgtaaacagacagcaattgaatttatggcacccgctgacatcaaaagtcaaaccaacaatgagcaagaagatgatgattttggttatgccaaataataaaagaattccaattttatttatttttatatataagtcttttacatatagaattatgttataatagcataattgcttttattaatttttttaaaattaattatttattaaattagatgggatccaattaaggttggttgtgtcacgaaatttaatattatttaatgaataaatatgaataaaattattcgaaccggttgatttttatttttattttcgtctgaaatgcagaataatatatattcatttttgtaatttatagaataataatatttttatataaataaaacttaaattaaattattttttcatttaagttgagttatagctctcataattatctcatgaacatttatataactccgtagtttcgtaaatggagaaaaaattattagaataataaatgcgtatacagtatatggtcttctgatacataaataataagttcgttaattgttattctgtagcatgttcaatgcatgttgttttatttaattatacctgagtgtaagattaattacttttttaaataaggtgtagctgaaacccccccccccccccctcaaaaggagggctttattcgagaagggggctttattgttcaacctctctcagaaggggggctttattcgagaggggggttctaatcgagtaaatacggtaatttaaaaaaatcaaagttttaaagttaagatcggcgaagaattgtcagaaagtttcaaaatattttcgggagtgccccagggaagtgtcttagggccattactctttttaattatattaatgacctgccgtcctttattgcaaatgaagtggcatctgttgttataaaaatgcatgcagatgaagttaaattatattatgcccaagaatatgatgaccattcaaatcagttgattaaagcaattgaggctttagaaaaatggtcaaaaataaatgggctagaaatatcaactgaaaaaacaatgaaagtcctttaaacccataatgaagtgttgaaaatgaatgatgaaagagaaaatgaaattgcgcaacccaaaaaagcgatgttaaaaagagatgaaaaaaggcattccaaaaaaaattaaattaaaaaataatgatgcactaacttaaacataaaattctcattttccacaataatcgttcggtttgtgaatgaaatttgaattttcattttgccatttgttccacattcatcaccaccagctgtggtcgacgcattgaacattttgttgaatttgaatcttttcgacaatttccatggaaaatttttaccataaaatgcgctatagtagcacaacaaaaggcttaattagtcaattcattagcaataaataattaatgtgccttttaattaacaacaattaaagaccttgaacattctccatgaagttcaaatttcacttttaaaggaccaaattttgctaaatccaacgaaacatttcttaaaatttaagtaaattattttcttattttaatgaaaatactttgtgccatttgaaacaataaaatgatgaacaaaaatcagaaaaataaaataattgaccaagaaaatattcattagattttattaatggataaattttattgtttaatatgttaacaaaatgtgtaaagtgaaaagatttcatttttagccagtggatttttgtgataaaaaatgaatcatcgacggattgacaggaaataataattttagtttacaattgac

SEQ ID NO: 25545 - DNA, 1600 bp, Heterodera glycines
  unsure (1)..(1600): unsure at all n locations
ctttcagatttgttgtagatcaaaaaattntttagtggcccaccaccgtgagtcactaatatccaatttcatttaaccttcacaattcccaactttttttttttcccaaaatccaaaaactccaaattttccgctgaagcttacccagaactgcaggagcgccaagtgataaaaacttcaattccaccgcttcacacaaattgatactcgaagaccaacgattaagcgaggccaaaacaaacaaatttataaaatcgaagcaaataataaaaagaaaagtcggaggcgatgatgagaaacaaaattatcaaaaccaaaattcacaaaaaaaacaaccagtcccacggacagacaaaatttagaaaagatcaaaaataattaaacagaacgtcaaaattataattatttaaattaataatgaggtcacttatcacaccattttaaacagattttcactgaaaattggccatttttaagtcaattttgcgctttgaaaatcatcatttcaaaaagaacaacaatcatcattgaccctgtgaaaccaccaaaatgatgataaatcattacatctggcagcactgatttaaagcctgatggataaagatttttcactataacactgccaaattaaagtgatcactctcaattgccaattcaataattaactatattcggccccataaaaggctctcttgacagtgtgaagcaataattcccgcatttattcactcttaattaccccctccaattccttcaaatttccttcaaactgttggtataattcgaaagcttaatgtgtttagaagctttttctaagctattgcttcgcgattagacaattaccaaaactgtctgcggcgcaaatgacgcggcgcaagtgtcgactttgcggatcggcgcaaatgtacgttttattcaggttcagttccttgtcatagcagtctttttagaataatttttaagatttttgttgaaaaatgccattttatcataatcaaagctcaaatttttttaaatgaaccaaatggccgccctcactttatttattttgtatgtttccctcgtctcccttattattgcattttttgttaaggaatttcagaaatcctgaacatatacgccgccataaatggcgaaatgggcaaacataggcattataaaagtcatcgtagacacctaaaaccaagctgaagtatttgtgtttgcgtaaaaataggggaaaatttatgaatattaaaaatatgataaatacaggtgatggtggtgctttgactgttcttaaggacgaaaaagcaatgacatattatggcattggagaaggcgcaaccgttttattgtttactcaatttgaaattgccgtaaaatacaaaaaagataatgcagagaaaatgtgcaccgttcgaatgaaaggcacggatcttgtggcagaattgagagacaaaattgtggaggaaatgaaaaatgtttttccactgattgtttataattctatagtaataaaggacgaccacccaagatcggattatgaccaaaatctttacggttatacaattgaattttttatttttttttgtgtttttgctagcaaaaaagcgttaat

SEQ ID NO: 25546 - DNA, 1751 bp, Heterodera glycines
atcatattttaaagctgagcaaattcttcgtttgatttgatccacccaaaaaaaaaattggtcggatgaaaaaattcttaaaaactgtacctttatcaatggtgggaaagtgtcaaagcgcctgttgatcagcctcagagtcgcctttttccgtttgtaagccatctgtgtcccaagctgggcaagcagcaggagcccatcctcagcttccatccactccttccgctcctggcccttctttggcgtgtagtgcgcgaatttgtgccggatatcccgatggatccgatccagcgatgcgcggctcgcggaaaataaattttatctagggtcgtcgtcctccaactcaaaacagtaaagcaaatgaaaatttggttaaaacgaatgctttaaagcaaaagcgagggtagaggattaaaaaacttattaaataacacttttgactgtaacataaaattttgtacgattttttgatcaatttttatcatactcttttaaacttaatcatattttttctatttaacgttttgttgttcgatacaattgtgtacacagacacctttgttcgtgattgctttagaatcgttattatttagtttatgtgtatagattttgaattattaatttataatattttggtttaaattatttatacgatattcttcagaatgcatttattcaagtgaaacaaattttattaagtggaatgtaattaatttaacaaatgactttattgggtaatttagattgactttcattttttgtataaatttaatatttgggtataaaaaagattggcttgtaccatagactaaaataattgatatatttctaatattctcttcacttttttatcatggaatactaaaatagtcttcgttatttataatgtaaatttatttaaccgctctcgcaccaaaaaagaaaaattttggcatatcatgttgacatgacttattaaattgcgttagcttcttctgaagtatggattattttatattatctatttgtaaaatttgtaattccatgcaatattttaaccccttataatcattgattttaaattcctgattgtaaaaattttaactttttatttaattcgaatattccagtaaataaaaacattaagatacgcaaattaagctttaatgggtaattacatcatttttaacttgtactatttcagtttttatatatctaatttactagtatatctattattttgatttataaagtgattaatgtaatttttttaagattgatatattctttatcatgtgttttattttttattattcaatttaatgtattcataattatgagcatggttaaatgatatgttagtaatttgttgtttcataaactttcattgatatgttattgattctaatttattatactccgattaaagattgttatcattgcttattgagttaaaaatattgcaaatgatctttttgggtgaattgttcaattatttaaataaatattttttcttttgtataaaaaatatatatttgtatcttttaactgatttgatatttgtggtttaaaccgatattgttcggtcaaacgcgataatgtattgtactatttatatttattccattttttctgaaaataaaattaaatatattttttatttactatatttactagatgtttttatcatttagctcaatattaagaataattatttcacaatgtatttttggtataatctttaaattgaaagctaagcaatcattgggttt

SEQ ID NO: 25547 - DNA, 1570 bp, Heterodera glycines
ttcgggggggaaacggcgggggggaaacggctgctttgggaaacggcaggggggaatcggcgggggggaaacggcggggggaaacgaggtgccctccaaagggagttgcttttacggatgagtttcggccagcgggcacttttcctatggcttttggttttgttttcgctggtctttttggcccttcacttggtctgttttgcgttttatttattaaattccatatgattgttattttattcaaggatttcggcattgacccattcatcggctttttgttcctttggcttacggatttatccattcttttctttgcgtcactccgttgcgcgagggtaacgagatttggagaaggcgtaaagattttccttacttctgtcggtcggttttatgcatcaagcgatttgctgttatagctagggtcaaaaaattttaggcttgcttggacctaggctttatgtttttaaatttgttgtacgagtttccattaacccagtcagactaatgggggccagtatatggatggaattactatgatacgggaaacacgcttgataatttttcaagttttcatgtatttaagtgccaattgtctcaaaattcgttttcgaagtgctcttctttgtccgtttgaagtacaacggttctcaagatcttcttctcacaatgcttccttcttggttttgtttcgcatttgtcatttttattctgtcatcgcgcatttataaaagtgtaaaaagctgttaaatggaaatcaaccccgtcaattaaaaattgtaactacctaataccccaaaaaatgttttcgttaacccacccccccccccccccccaaaatagaaaatccataatcaactgaagaaaaacaaatttttttctgttaaaaccataattagaagagcgaaaaataacaccacaaaatgttgtttttaaatcactttcgtcctcagtctctctccgcaattgccgtcagatgctcctcaatgcttttgtcgctcactttgactcctttcgggtccgtttttgtagcaacaatcacttcaacctcgtcagcctttaagtcaattcccagcccggtttgcagtgcctcaagcgccagttgaatcacttccgtgtcaccgaattttcggtcttttgatttgagttttttctccagaaaaccgttgatctgctgctgcttgactccaatgccgtaaccacgaacagaactgtattttggtagaaagctttttaaaatgaaagttatttcgaactttgatccctgggaccgttaatttttcatctattttaacagaatctattaggatgttgaaaaattatatcatagcagataaacttaatattttgagattcagtcaaaattacattacatgtaatgtcctgctggatcgatggaaaaaacagaagcgcctttttcgtcgtcgttcgagatcataagcatcactttgaaaaataagtttcatttgcgcttttttacatggaactctcgtgtgcccaatgaacgaagttcagcaccctgaaaaaaatttggtttaatgttagtaaacacctgaaatttaatttgcaatta

SEQ ID NO: 25548 - DNA, 911 bp, Heterodera glycines
  unsure (1)..(911): unsure at all n locations
ttatgaaaggacaataggcagttgtgcatttcgattattatttcggaggttattcatcagaatttgctgttgtgcaacggcattttgtcttctgcatatcgtatgccggatgaaattggccaccgcgttacggtagtcaccgacacagagaattgagaccagcggattcagtacgggcaaccaatgaaagggaagagtgatgcacatttgaataaacataaaactcggggacaattggaattcaaaaatcaccatttcaaccgaaattataaggtttattaaattcatagccaacggtataaatgcctaaatataattaaattaatctgagttataaacccgggatgagtgtttatttaaacaacaatcatcatcttttgctagcatcaatactttttttagcatgatgtattaattaagttatacataatatactaattaactaaaccgacaataatctaaaaagataaccaacttcacctcaaattattcatcaattttacctggagaatcaaattgattgtgatttgtcggttaatttgttgtcttcttgctgaacttttgtccaagtttttgtaaacaaatctggccattttatatccacaaatgacaattaccgcataacaaattatgttttcgacaaaataaagacccattgtaatttgcccgagaaaataatccttcaaaattaaaaaaaaaaacattataaaatataagaagaactcactcacattttgtccacaatataatacaaaatcgctgagatttccatccaaaaattgttgaatttgaaatatttcttcagcattaatcaaggaaagatttaaatggtcatttcccancatataatcatatgtccaagtcaaaataccgattgaaaacacaaatgaaagcattgccatatatttttg

SEQ ID NO: 25549 - DNA, 1260 bp, Heterodera glycines
  unsure (1)..(1260): unsure at all n locations
aaatgagttttttgagttataatccatagagcncagttcgggacgggattccgtgcgggattttgcagggtcccagtccgcggtcctgcatttttggaaaaggtcggattttcaggatgagtccctgcggaatcccgtcccgcaaattctgagttccaatcccgcagcggaatccgcaaatttgaaatttccacctttaacacataatttttcatttaattatttttttgaacgttttgagtgactttacttattttaattaaacgaaagcaaaatacatttttgcgatgagaataagggcaaagcatctctgtatttaaatctgttaaattctcaattttttgcgaaattttaaattttttttcattttacaaaattttgggtcaaaatctgttaaaatttcattaaaattttcagttttcccccgacggcgccttccaggcaacgccggacttcaaaaataaattcaaaaaaaattcataaatttggagttctagaaaaaaatccaacaagtttcagcaaaaatctcgaattttccagggcggtgcctattggcaccgacgcttttcataaagttaattaaggtgaaaaaacgttcaccaaacacaagaaaaagctcgaaaaattcattaatatttgaacaaatgaatatgagactttatgaaatgttgaagtttactttgaatgcacaataattattccgcttatgtactttgaaattggcttacccatactttaacagtaagcttattttcagctgtcggcactgtttaaacgtgttaattaatgtctcgcgtatcaccttgtaaaatgtactttcattgaatatataacaaatattagggcgcctaaggcaataaaataattattgataattatttcgctccttttatttccgcttatttgctcatttgcagatttttattttattatcggatcttctcaagaatttgctttatgagaatctggagataacctaaaattctgtgtctgaccgaaacagaagaatgattttgaggaaggagccgggtgatagtcgaactcggtctcggtctttgagactttcgagactcgagaccgagacttttttatacccataatgatcggctttttgtaagttagaaataaatatacttttggtatatttttgcttcattaccttaatggtgtgcgtggctcagtgggttatgttcttggtcatgtcttcattttagcgttggatcagtacccctccaangtaattattttttcttctaattt

SEQ ID NO: 25550 - DNA, 1125 bp, Heterodera glycines
tttctttatttatttgtgaaatttgatatatcaacgcaatactaaaatatgtttgattatctcaaatgttaaaaaacatccgatctatgagataatcatcggcacagagcaacggaataatatgggaaaacaggtgctcagtagcttatcacatcttcttttgtgatctgcattgaacttccactactcgattgcgatagttattgtatgtttgaacagcggctggatccttgaaattctccgagtgaatcaatgcgtaatgtgtgtatagctcagttgacagaaaatgcggttccgaactccattagtacctcattgtatttacctattaaaagaaaagcaccaaaaaagaaagaaaattaaaagcaacaaaaataagaaaattatacaacactagttatattttggcgaaatgtttttggttcaaattttgaaatagaacttaatagatttaaagatcctattaatcaaaaataaatccaaagagaaatcgtcaattggtatttacctactttatttattaaaaatttggcaagaagggttaaaaaattcacattttgtattaattttttgccttttctcccatgaaaatgccattcttaggggtgtttatttaacccaaacccgagtcggggttaaccccggcggtaaatgtcgggggtcggggcccaaccctagactccatttttaagtcctatggcgcccaattggccgcgcgcacaagcaagaattgaatcagaaaaagtgaaaagaaggctgaggtggctggacatttcgacgggcgccggacttttcgacggtggacatttcgacagcaaaggacatttcgacagaaatattataaatttaaggaggggacttttcgacattagacatttcgacagtaaaaagtaaataaatttcaaatttgagggtgtaaaatcgtaaaattttctacaaaacaaacaaaatgaagccaaatcagtatttttttctaggtaaaaaaacgcaaaaacatatccgtagtaataatgatttagcaatacgtattagtatgttaatttaaaagaatttagtaaaactgacaagcaataatatttattttaataggaattatttgtttttatgtttattgtcgaaaagtcc

SEQ ID NO: 25551 - DNA, 1514 bp, Heterodera glycines
aagtcgttatgccgtctctttctttctttaaattttcttcattgtaattaaacaaatgtttgatcttttgattagttttaaattgatttatttgaaatattttccaaaatttaatagaattaatcacaaaacgaaaaatttgataatttacaaataaaaaatatatttagtaatatgtattttaattttataatttttaattttaattataatataaattataattatgctctcataaatttgatatttgagtttttattttatagaaatattatattgatcgattagtaatatataatattctcttatgcgatatttattcaaaaatctggttaataaaacattttatctatatatatttttcataaaattttttttactaataaaagacttttaatcagaattaaatatatatggcccgatattatagtatttttatttttgataaatcttcgtcccataacataaaaaccatattaaattccaatcccaaagtggataaaaatacataaataccataatgttaaatattttggttttctttaaatctttaatcaataaattttgtatcgaatgtatatttttataaattgtttagcctttattaataaaaatcaataaattaacttatatctaaaaattaattattccgaatattatttatttttattaaaatttttttatttatatttatttaatctttaatttcctatcagaaaataataagaacttctcggacatgatttatttactcgcaaaatatatttataaaatcaaaaaggaaaataaaaaataatgatatatttacttgatcttcaaataaattaatagtccttattctattaaattcatgaattaagaactttgtgcaaaaattttgaagcagccaaagcccaaaataaacgcaattcaacatggcaaatcatcgccaaatcacaaaatcgcggaaatggtcgccaaatcaaaagttttcgggcaaatcaaaggcaatagccccgccgagcaattgcaatcgttgcggagaattgcactggacacaggactgccagagaaggaaaatatttgccgcaaatgtaatcgcagaggtcccatcgaaagtcaatgcgacaaaatacgagcatatcaccaaaacaaaggccaaaatttcaacaccaatacggttatgctcccagcggcctacatcaattccgtccattcatcaaatctgcttaaagcaccgattaatgtgcacggcataacaattggcttcatcctggacagcggtgcggtgataatcatcatcaatgaagatgattacaacgcaatgggctgaccgccaattcaaaagagttcagaagaggcacgctttttcgacggaaagtggtgcaaattgacatatttggacgacgtcatgatcgtcaacgcgacatttgatcaacatcgccaacatttggaccaagcgaattgcgttcatttttgggcatggtcaattactaccaggaatttgtccgaaatttccggtttattcgacagcc

SEQ ID NO: 25552 - DNA, 1286 bp, Heterodera glycines
aaattgagaattttgaccatatttttagcagattttcatttaaaaaattcataattttgtcgattttcgaaaaaaattgtaattttctggctaaatttgggtgagatttccgtttgatactctattaaaaaccaaaattcaaattaaataattaccaaacattatgccaatttatcaaaatttaaaagattctgaggattttccccaaaagcctcaaaaatcctcaaaatttctcaaaaagccacaaaaatcctcattttccaaaaaaatcctcattgacctatcaaaaagccacaaaatgaagataaatcctcagatctgcgaaccctgggttaattagctaattaatgattattttgtgttggcattttgcccattcacttgtcacaattgcacatgtcctttttgcagccgacgttaaccgaagtgcatttgattgtcggacgacttttgggcaaagtgacataagcttttccgcgtttaattttttcataagctaaattaggcaaaaaaatttctttttcgaaataatttcgttaattacctttataattgcttccgtcacatgtccaattgtatgggtaaaagaggaatttttgcaacacattcttacaggaagaattcacataacatttctcatggagcgcacaacacctaacaaattgtcatttattatttaattaaattttaaccaatttcagtgcttttccttatttccccccccccccccctctctttttcaataagattttgccttattttgtctttctgtgatattcagaaatttattgcgaaaaaagaaagaaaattaacatttcaccgaatatttccttactcatcaatggcatcaactgatttcttcttaattccgtcgttcacagcgcacctcaattattataaatatattttttaaattttggttttagacatattccatttaaattttaattatttcattttaccagcatccatggccattataaacagaaatatcgtagcccaaatggcattttgccatttcatgcaaattggacaaattttttgcgctcatttggcacgcaaatgaaaggagaaaaatttgagaaagcaaaagaaacatctcaaaaattaaataaaattataaaattataaaaaataaaataataaaaataatataaatgaaaatagcctataatatttaaagattagcaaaatgcgaagaaaaacgtcaattgaatgaatcaattggcagcattaaaatgacgtaaaatcaaatgaattgattgtccaatgacataatacgatga

SEQ ID NO: 25553 - DNA, 2125 bp, Heterodera glycines
  unsure (1)..(2125): unsure at all n locations
aatctcgaaatctcattttcgagttcaaatttttgtccaatcccataccatccaatttttcgaaattttattttcgagttcaaatttttgtccaatccccatntagtctaaaatttcggaatctcatttccgagggtctaaaaattttttttttgtttgtgttttgttttgtttttttttttgttttgtttttgacccaaattgtccaaactatccgctcttgataaaatcagagtcttagctctgacagtgcgtggtaaaaaagtctcacaaatcgtgaatcgtgtacccttccccctttctggtttttgtttccccctttctggtttttgaattactgattctcaactcagaacgcagttcggttattgattaaattggagtctcagttccaaagttttaaattgttcggtcacagttcggttattgattattgaattggagtctcatctccgaattttcgaatttggtcattgatttgagcaatgacagcccccatacaggcattaattagggggtgtgccagcaaattgggagcattattgggtaccgaaattccacccgacttgggaataaatgccctaccgaatcaatgccaaagaaggctgtacaaattcagaaaccttcttaatgacttagaaagggtggtacaaaagattgaagataatttgggtttggctaatgagtatattggtaaactgagtcgagacaatgcaatccgtaaggaaacggaaatgcaggaattaatgcaggagttacaaattaatgagaaacaaaaggcagctgacgttctcattccaattttgagggacaaaattgaggcattagaagagaagttagacataactcacaacacggatggtgacactacctccggcattggacccctctcaaggagcgtgccaatgcgtaaaaatttgccaaaaactgagcttaagagatttgatggtagtccatctcagtggataccattttgggattactttcgtacaataattcatgaggactctcatgtcccaaaaatcgataagttcagttatttagactcatgcattgaaggcaaagccagtgccatcattcagggtattccaattagtgagagtgggtatgatgatgccatagatttacttttaaagacatacggggaaaccaaacgtctgattcgaacgttgaaccgggaacttatgtcgcttccaattagtgagtcatttgaagacgacgagtccttgtacttgaagtctgaaaagatttttcgacaactgatttcaatgaatcagaatgtcgaagatggtatgtattacagtaacctggagggcaaaatgtctccagaggtgttagataagtactgtgttatcaaggatgccgaagataatgatgattgggatacgtcaaagtttcggaatgcattctcacgtgcattggaccaaataaagcataggcaggaattaaggaaaaatgtgattgagcccaaaagggacaaacatgaactgaccatgtctttcacggcattttccaaaaatgataagtaccaagggaggaataaatttcctcaaaggaattcggatcaatcgcaccctcgtgggcggaaatttgaaccaaggaaatttcgtgatcagaggcacgataatagtgactcatcagtcagccattcaccaatgagggataggaggaattctccttatcccaaaagggattggtcaagctcaccagagcgtgaaaaatggaagaaggatgagcagagaaaatgccaattgtgccaaggtgagcacagtgcgagtaaatgccataaatatatggatgccatctcacggcgcaataaagtattgaaaatggaattatgtttcatttgtctaagggctggtcattgggcaagtcaatgtactttaaagggatataagtgcaacatttgcaatcgggcgggtcatcacatctcattgtgtagatccaaagacaaacccaaagatagaaggaatagtagttcagaaagttcaccagttcggtcaaggataaatacgactcaagacttctcagagtctgaagaagttgaaaaggaaataacgtcggtcacttcgtgtgtacaagcaggggggagaaattgtctttgctgaaatgtaaatatgttacc

SEQ ID NO: 25554 - DNA, 1697 bp, Heterodera glycines
  unsure (1)..(1697): unsure at all n locations
gatttcctttcatttccattttcagccatttcgacgcccctttcgccctgtccaatccgtccaacggacgaaccttggcagaacgaagagcaatggcgaaggtaattgaaaaaacacaccaaaatgaatccattggctattttctgctttagcattgcgtgggaaatctgtgccagcaatgaccgactgccaattcaggcattttacgaccgtttcccgaaggttttgcagcagacaaacggaggaaaaagggaaagaaacggtgccaaaaatgaccattgaccgactaactgaatgatattcacatttatttattttcattccaattcttggcaaagtgttaatgtctcccaaattttttctgtttacacttcgacacattccgtcggcccactttttgtgcgaattcattcgcccgtctttcccccccccccccattttctttggttttgtgatcattcaatccgcacaacaaaatgtgatgagtcctttctttgcctttgcttttctttcattcgcttttccttttgcttttttatgatttccgtgacttttttatttatttattttttgccaaaataataaaattaaaattggtccaatttcacggtgctaggtcgaacctaaaaaagtatcggttataataaaaataattaaatttaaatgttataaagtgagtaaatctaataaaattatattatctaataagcagtttcaattacatactcattttatgtcacataaataaataatgattttgcaatttaagaaccgaataaatgtaattttttgaaggaaaattcgttgatgataatatttaaaataataaacacttattctagctaatactttctcataaaaattgatatcgatgtttgaattaaaatacgaaaagaagtaaaggaattgtttattacttgattgaatttatatgtaagaaaaattgcaaaatatgtaaataaatatgtattaaaaatgcaaaaatatttatgaaacatgcataaaaaattggaattttataggatttactcactataacatttaaatttaattatctttattataactgatacttagcaccttcggcaacgaatggggaaaatgtaatgagaaaggataaatgaaaaatattaagaattaaagaagaaaatccacaaattggcaacaaaataattgctagcaaaataaaattggatattccaatttaaaaatgaaaaggaatttgctgaaatttcgaatttgtgctttctttagagttgtaatattataagaaataaaattaatattcacattttttaggtttaaaaaccttccttattcgaaaaaataaaatattttaaaaattttaagtaaaaatggacaaattttttgaaaatttggtacttttcttctcatattccattaaaatttccaaaacatttttccggcggcgcgcctatcggcaccgccgggtcccattgaaccattatttttttgaaaatttgaccccaaaatggcaaaaaattctgattttttggcgcaaatcactataaattttctgctttctcgccctagcgctaaaattttgaaaattatactatagaaaaaattttggccgaagagcaaaaaattaggcccttaatttctgtgtttttgtcaacaccaagccacaacggcagtatttccaatcccanaagaatacctcaccataaatctcg

SEQ ID NO: 25555 - DNA, 1962 bp, Heterodera glycines
  unsure (1)..(1962): unsure at all n locations
gtagatataaaatcaacgaaatattaagttttaatcattttatttaccattngataagaaaatacaaatattttttgttgtaaatntagaatattttcaaattcaattntgcgataaaagtaattatttctcaatttctcatcgtttacatttgaaattttataaacatattggtcaatttttcttttttcaatctcaattttttataataacaataaattcaacgtattaaataacttattaataccattaaatattaatattattaaattatgtattgcaatttatttaaattatttgagaaatttcagtcgcttattttttttaatactttttagtgggatctaccttttatttacacgaatacatgaactggcaacggtgaaaatcgttcagatttacagaaattgtttatagtgacttggctctgcgatagttatttagaaaaaatttttgttttattatttcattgaaaaaagtgaggattttgaaattaatttaaaacttaaaattgatggcataaaataaaaagattaatttaatatattttctttggttttcttttatttattgatgaaattatatttttatttaagttattgactaaaaattttaatattcttactgtccatttttatgggagggggaagtttgggcaccgggaagtttgggcaccaggaagtttgggcaccagaagtttgggcaccgggaagtttgggcaccaggaagcaattttttaaaaaatcgaaaatatttttcttaatttaaatattatcattgttaattattgtaattatgcttcttatataaaataaaaaataaattaaactaaatgaaaaaattaattaattaaaaagtaaatggctaaattattagcatgtattttcttttcattattacataaataatgtgagataaatattaattaaaataaattgaattggccaacattttgtcaactttttgagatcgttatctttcgtctgcacatctgctgtttacataaacataaacacaaaggatgaatgtgaataaaaatattttcataaattacttaagatgggaaattgtccattataatttttttctgtttttgtgtttaattaccaaaaattttcggtttttacaatttaaatttccttccatcgtcgagcggaagcagcttaacgtgcctaatacaatggcacacctcgaggatggagaatttgtgtcaagcgattcatctgagggggcagcagaaggggcccctcagcacataaattttttggaaattgtttcaaaacgccatggccaggaaggaaaagcgcttttaacacacaatggctttgaatatgcgttcgataaaacctcgaaagtactaaaatattgaaatttaccgggaaaattaatatttttagtcaaatgatatgcacgaattttggcgctgcaaaataaagtgtccatattgcccggccagaatcactgtttcacgcatttggcaacaaaatgaacaggggaaacgcttcaaaatggggcattataataatgaaaatcataatcacccgccaagaacagggaatattatggtactgtaactttaaattacagtatactataatttttagtaaatacggtagaacttaattaattttgctaatattttaatgcaggtacgaaatgctgaagacagattgaggcaggaagcaaggcaggccaatccgatgagaacgagggatattgttgctgaagtgagatcttcaatccctgttggtgtacgggtggccgtcgaatctggcactccatcatcttctgcaatggttcgtgcctttaactggcacaaaagcaatgcccgacggcttcaaggagatgaaggactcgatttggatggtagttaattgattatacaatcgtatctatttttcttatccaattaccgtatcaaatccgcgtgctgtacaaataccagcttatcttcaagaattg

SEQ ID NO: 25556 - DNA, 1909 bp, Heterodera glycines
agtaggcggtgccaacacacaatgctgccaacgcgtttcccttgcgcctgccatcccgaggcctcaacgcggtggccgtcacccgtgcgaagcacacagttggtcacggcaagtgggccagctggcgtcggctgcgctggacggtggtcaatcgacacgacgatcaggcacagcggactaaaaaatactcgcgcacaatttaattctagatttgaaacttaaacttacggcaatggctgacccaatgcagaaacgcagccattcaaaaattgaaggttgttcgtgccgtccgcacagaaaggctcctgaaaaggcaaaattaaaaaaaaaagacaaaaaaaaacaagtaagcaccgccatttgctggtgggacgcgttgacgaggatgggttgcaccaactgcgcaacctttaaaataataaattattagtttttttttatatttttaaattatgacttggccaaagggcggcatttggccgaaaacggttggtagctgctgagccataaaataaaggacaattgaatttttcgctgtaaaaaaaatagaaaatttgtttttttttaatattgcgtagctttcttttcttaactttagaaaaatttctgtttatttttcttggcttttcgtttgcatttctttttaatttcgcgctgcttttcttttcttaactttaaaaaaatttctatttatttttttcttggctttccgctttttttaaatattgcgcagcttttcttttctgactttaaaatttctatttattttttcttggctttttgtttgcttttctttttaatattgcgctgcttttcttttcttagcttttaaaatttccttaaatttttcattgcttttcgtattgttttttaaaatattgcgcagcttttcttttctgaatttaaaaatttcaatttatttttttcttggcttttcgtttctttctttttaatattgcgcagctttttcttttcttagctttaaaattttccttaaatttttcattgttgcttttcgacttgttttttttttaaatattgcgcagcttttcttttcttagctttaaaattttccttaaaattttcattgttgcttttcgacttgtttttttttttaaatattgcgcagcttttctttttttaaaaatttctatttatttttttcatggcttttcgttttttaaatattacgcagcttttctcttcttcattttaattttccttggcttttcgtttgctttcttttaaatattgcgcagctttttcttttcttaactttaaaatttctatttatttttcattgcttttcgtcttttttttaaatattgcgcagcttttcttttcttaattttaaatttcttttctatttttcttggcttttcgtttgattgcttggctttttgttttgtttgcttttcttttctttgttagattaattaattaaataattttgttagtgagttataataaacaaaattaatgaacaaatataaaaatattgaacgggacaaataaataaaacggataagaaatcaatacaaaatggagaaatggaaatgaaaatgatgggttggtggagaacggacagttgcagatgaacaaaagataagaatctaaaggatgggaggggtccgcgtcgctgtgcacagtgaagtgagaacagcggggggggggcatatttgaattgttggagaagttcagacggcacattaggtcgtcaatacaacaccccctaagctgaacggcgaaagaatttcgcctcaggcaccatttttagcggagttttcccgacgccccgccccttcgcgcacccctcccccattcgtagcaaaactcgcgcaccccttgtccgattgacttcaaatttcataggccgtcattccaccaccacctaagctgaacggcgaaa

SEQ ID NO: 25557 - DNA, 1367 bp, Heterodera glycines
acacgcgcacttcgcatttcgccattggccatttgccggtgggcaaatgtttctgattaattggcgcgatttgatagagagcagcgaaaggccgagcaccaaatcgaccagcagcagagaatggccgggaagaagcacacaatcgcagggcgagtgaagcaaatgaccgttcagagacaccgattcgacgtcgaaatggcagctgaaaaagggaatgccgaagaaaggaaaaagcggaaaattggcagaggagggcattttggcattttgttgctctttcttttgccttacccttcgccaatttctgtcctttcgccgttcgctttttccgcccaattcgccgcttcttcccccatttggcgcactccgttggccaacgcttttctcacttcgccaattgtgtccgcctctttgttactttttgatggtggcatccgaaggcgctaaacggatagaatcaaagtttggcatgagtctagcatcacaattagtattaatatctccattagcattgatcattgtccaattagcattgctaattgccattattttcccactgattgcctcagatggtgccgtttgccctcgttgcaattcgcacagtctgtccaccaattccagggcctctttggtgttcctccgcagtttgcgttcgtattcttccaatcgttccatctcttgcgtcccttctgtttctgttctctccataaatcgcactccttttgaagggccttcttcccttttcatctcttccaacttttcattgtgttcttttcccttttcatcctcttcttgttcaatttctttctccatctgttcctctttttcttctttctttcccttttcctcctcctctttttctctttctttctctcttttttcctcccttttctttttctcctcttcctctttttccttttcctcctcctctttttctctttctttctcccctttttcttccttttccttcgcttttttgtttccttcttcttttttgaatattcccatttcactgtttaccgcttcctcttcagcttcttctcctttcttcagtgtattttgattttccatttgacttagaaatattccatttattttagaatttcttattttattttaatttgtaaggaagaaacatacataaaacgaatcaacagagagaaagaaaaaatgagttggaattgatctgtcttccttccgcggatgatccaagccaacccgcgggggtgtgatcagttcatcgcattgatcgctgcccattgttttaagcggtgaatgggcaaaaacatgggaagtgcgtgaaaatctgcatgatcagtgaaaaactctaaagaggacatctgtcccttccctttctttacctagcg

SEQ ID NO: 25558 - DNA, 1160 bp, Heterodera glycines
atttgtatggtacaaaatttctcgcaaaaaaagagatagccattttcgtgacatagagaataaatttaaaaattccctgtagaatagaatgcacattgctctccgcgcccctctgaaaaagagatacccattttctggcatagagaataaattaaaaaattccctgtagaatagaatggccattgctctccgcgcccctctgcccatgctgggaacatttgtatggtacaaaatttctcgcaaaaaagagataaccatttttctggcatagagaataaatttaaaaattccctgtagaatagaatggccattgctctccgcgcccctctgcccatgctgggaacatttgtatggtacaaaatttctcgcaaaaaagagatagccatttttctggcatagagaataaatttaaaaattccctgtagaatagaatggccattgctctccgcgcccctctgcccatgctgggaacatttgtatggtacaaaatttctcgcaaaaaagagataaccatttttctggcatagagaataaatttaaaaattccctgtagaatagaatggccattgctctccgcgcccctctgcccatgctgggaacatttgtatggtacaaaatttctcgcaaaaaagagatagccatttttctggcatagagaataaatttaaaaattccctgtagaatagaatggccattgctctccgcgcccctctgcccatgctgggaacatttgtatggtacaaaatttctcgcaaaaaagagatagccatttttctggcatagagaataaatttaaaaattccctgtagaatagaatggccattgctctccgcgcccctctgcccatgctgggaacatttgtatggtacaaaatttctcgcaaaaaagagataaccatttttctggcatagagaataaatttaaaaattccctgtagaatagaatggccattgctctccgcgcccctctgcccatgctgggaacatttgtatggtacaaaatttctcgcaaaaaagagataaccatttttctggcatagagaataaatttaaaaattccctgtagaatagaatggccattgctctccgcgcccctctgcccacgctgggaacatttgtatggtacaaaatttctcgcaaaaagagatagccatttttctg

SEQ ID NO: 25559 - DNA, 2376 bp, Heterodera glycines
  unsure (1)..(2376): unsure at all n locations
atttgcaaaattcaaaatccccgcgattttcaattcccccctgtttggaattcgaaaacttaaaaatgaagagcataataatatttgtcgaagttttatgagaatggcataatgttttgctttattttttttgtttttttgttggcagctgaaaatattgggggaacgaacccccaggggatttttgggagggtcggaggtccaataaatcatccctcccccaccctccgaaattcggcatgcccttcggcgttttgggtggcatcgaaatgccatcccccgaggcaagttggcgggctgtacgattttggcacgattaaataaaaatgagataggcctgaggattttgagaatttttgataacataaaacaggggatttttatcatttacccgacaaatttaaacttatatttttaaattaaataaatttaatagaaaaataaatggtttgaaaatgaaatatttaaaataaacaaataaaattcttattaaataaaaaataattatgcaaaaaataatattaaaacaaataagcaattaatattaaataataaatttatgttttattgaaaatgttaataattataaaaatattatctgcgtaaaaatatttggtgatctttttattttgatagtttaaaaaatatattttagtttattaaattttttttttattaatattttctaagttaacaaaaaaattttaaactaatttattttattaaatctcaaattattttattgttgtagtttaataataaattatttaaatttattaaatatttttaaattaattttaatttaataaaaaaatttccttatttaagtttaatttaatttactaacatttaaatttttgttttgtcactttaactaattttgatcctttattattccattctgttgtccccataaaccccctccaaaaatcattatttttggcattctaattgctttattggcattcgatacacttattaatttaaatttttgtttggcattttgtcccccccccgtccaaccgttcggcatcgcactccgcgcccacagctggcggagcacgcgccccactcgccggcccaccattccgggcgcgcctcactgctgcacttgcgcacgtccaccttcaaaatgttaaatgccgctctaacattggagagctgatacatataattacaaaattccatttataaagccattccccatttgaggggggggaagaaaatgaatacggtagactaattaaggaaagtacgatagtgtagctaaggaaagggtggtagtgtaattaaggaaaggacggtactgtgattaatgttaagttacggtaatgtaattaaggaacgacggcaatttctagcattactactgctgatggccaattagcaccaccagagtttgttcaaggattgatcaaaatcgtgaagctgatcacaactgatcagtaagtgggggttacaaatggtgccaaaattggtttggatttttcgaaaattaaaaaaaaatccaaaaaaaaaatttcaccggtttttggctcggcaagcagtgttgcacgttcacacgccggtcaacattggcatcaacccgttcaacacagaacacctcacgtcgctgttgcccggtgccgcaggtggccgaacagtcggcccattcgccggcaaaccatcttttagggaggggggggcaatggcacaaaaattgtttagaaaaatggcaataagaaaacaggggcaaaacataggctagcggaataagcataacatttagcgatttaaaaatggcatttcttggtaaacaaaaagaaatttttggacaaaataatggcaatggttaagggaaaaaaccgaaggtggcattttgccttggcaaaagttcgccaattttaaatattgacattttttagaaaaaaatatatatattgaggaatggcggcattttcgctttgttgaaaaattcaataatgattgatttttcccaattttacatatgtaggatatgccattttcatgacaaaatccgaggatggcattttcttagaaaaaagttggatgaattattttcttagcaaaaaaaaactacggatggcattttcgaaaaaagcaaaaataattgaaaattaaattggcacgcaaaagcaacagtttgaactgcttaaacagcttggcatgagcgagaagcatttgaattgcaaaaaatgacgtgacgacaaccattcactgaacacacatgcgaacaacaacgaacctggtactgaaaagcgaaatttaaacggcacaaatgcgcacagntcggcaaaaatttcagggtaaaaacaaacttactgatgcctaattttgggcttcatcgaatgactagaaaataaattttaacccccc

SEQ ID NO: 25560 - DNA, 1882 bp, Heterodera glycines
aatctttcactttttttttgtcattcgtaccatctcccaaaaaagaaaaatctgtaacaaatatccccgagggtgtcagctcatcgccacccacttgaagtaaatgcgcccatcatttttcgtcggccctttgcgatttagacaatgttcgcccgcaatttggtccaactgtttgacatcggcggccgcttcgacgagcaaacgccactctttgccgaatcggtccaaatagcaattggcactgttttcgttgtcaattgcatcggcttttggtgtcgtcgtcgtggaaaagatcgtagaacaattgctactgtcttcagctgcagttgtgttcattgtcagcacagacgacgaggacgacaacggcggagtggcgggcggtggcacccgaaaatgttcaaaagtggcatcgaatggaatgtctttgctctgtgccgatggtgccaatggcggaggagtggcgggggatggcacccgcgcaaatgattcattttggttgggcaaatcgccgatttgaatgtcttcgacccactcaaagttcgaaatggacacggatggtgacgacggcacaattgtcgaaaatggtgtttccgtgccatatccgcgagagtggcacaaactggcgccttcttcagtgccggacaatgcttctttctctgtgccattgtcgttgctgctagtattggcaatgccagtggcagccagcgaagaagccgaatttggcacagggaactgctgaaaaatattaaaaattattcttttttgaataatttttgttagttattaaattgcttaaattaaaaattaaatttaaaaagtcatcaaacacatattaccggagattttcaggtccttttcaacggccctgagatcctttttgacaaattttgaatcataattcgatgaaaagttgaaaattcaaaatttttgaaatgtgcattctgttttgttcgaaatttgaaattaataacaaaaaaatattggtgttaaaaatatttttaggaaaatactcagaaattcaaaaatgcaagttagtattttggcgtttgtttccctcggccccgggaccaaaaatacatttatttgatataaaaacagcaaaatctaatatattagaatcagtgaactgtttgcgtcaaatccttcaatttttcgcatccggtgacaatgctctcatttttaaaacccgtcaaaatttatttctaccttttggtgccccccccccatttgaccacttcccctctatttggtgtaaatggcccttttaccccctcctccacttttggcattgtgttgcccggttgttcgctgtggtggtcaccaaattcgagctgttttgccagcaatttggccgcatattgcggatgtttttgcacaatgtgcgcggtcattgcgcccaattccgacgtattaaaactgacaaattgagaatttattgccaaattacaatcgaaggattttattaggttctattgcactttacgagtcaaatcaactgtcatcctgagtttcttgaatcagaactttttgtttcatattgaacaaatcataggatttttggtatcagtttaacgcacaaagtctaaaaaaaagctaattatacaaatctaagtgtttaggcaattgtcaaaaacgatatatgattaattagcaattcttgattatttttgtttgtacctttttaaaggttagcatgcttatgttttatggtattattaccttattcagacttattattagtgcttttggctgataacaaaaaatatagggtttgtttgacatgaacaaaattattgtaaaggtatggttaattgattagactcataaaatgggttggaatcattatggttaattgattagactcataaaatgggtggactca

SEQ ID NO: 25561 - DNA, 1805 bp, Heterodera glycines
  unsure (1)..(1805): unsure at all n locations
tatttaagttttaaaaattttaattcagaaataaaattatntggtaataaacagtcaatttcttctaaatgactttgttaanaattaaactttctgaagatntatntattcaaaatctttaaaacccaaagccccaagctaggcaagtttcatataacatttagtacatatttgcggtgcccctcaaaacgttgccgaatgatgttttggactataattttcttgttgctaaccaaaataagcattcttagtgatgattgatatcccagaatatttaaaatttttgctaatctccaaaaatttcatttagtttcagaaaaaatggtccaaaaaactcaaaaatttttttaaaaaaatatttttggcactacaaaaatttttaaactttgcaacttaatgagtctgcgaagtgctttcaaactgtttcaagaatgtttaattcgtttaagaaattaaaaaagagttcgttctgattcaaaaattcgtccgtcgatgtttcgtcccaacgacgttttgtcccatattccgtcggatattaagacagctatgggaagtttgtgctgcttgtgagtcggaattccatagcaaatccatgagaattgtggcgtaaaaatgcgtaatatacctatacaatccatcatcatcctcttcttaggtgatgaatgttcgactgagttgggtttgggtgcatttttgggtactttgtgttgtccccgcgcgtctctccgtcctaattcaattacatataaattaactctccttttttcttttattttttatgtgtgagtgtttggtgtggcagctaggccgaagaatttagtggacaaaacaaagcaaaaaaaaaagaagtggtaatagtggtaataaagaagaaaaaagcgcgccaaatcattcattcctttattttgccctatttgtatggctgactgatcagagtcggctgggattgactgatcggtgggttggtcggttggtggtaaattattgtgaaaatatgggtgtggtcgctttggacggttgcggtatgtgtgactctattctcaccaacgcaaccccacaaagttctttggcggggaagaacatcaacaaaacgcaaaataagcaaaaaaaaaaaaaaaatgggaaagcaaagaatcatccgccacgccaaaaattttcaaaacgcgaacctaccatatttagcaatctattttttttatagcagcacattttaagagctttgaaaaaggattcaaattttaattcggcggtgccgtaatcattgatcatttttgacacaaaaagctttaagaaattcagctaaatttttcattttttcgctgccaatagctccatgttcaaaaatatttgataaatttcgcagcaaaaaaaaaagtttgcgcttttttaactggtttcccctaatctacattaaaaaaataaaaaaggcctaaaaattttatagaaaatttttaaggtgaaaatttatttggttttttgaattccatttaaaaattttaaaaataaagaaacaattaattgaaacaattaatgaacttgcacgcccgccaattacagcaagtactttcttgtacatgattgctgtttgcttataaatggtggtccccccgtcgccaactgtcgctgaaaaaaatcgcacaaaatctctcgcccgcgttcgccctcgagggcacacaatgcattgtgacgtcatcaaaaaacgaacgggcgaccgaacgggacaattcgtcatttttttgtgctactaattaccattgagtgctgatggtgacagcataattcatacgcaatttgttgttgtatag

SEQ ID NO: 25562 - DNA, 1664 bp, Heterodera glycines
  unsure (1)..(1664): unsure at all n locations
caacagactggctgctgcacagcagcacgcgtctgttcactgtatgcccctctcacccgccgctgcccgcgtagacagacaatcagacagtgcactattttcccacctttccctcgctctacttttttcaaattcatttttaacgcaaaactcaaacaaaacgccacacaaattcaaacactggacacatgatacagacactcaactttattatataagatttttctaatgaacattccaagggcactctgttcgaattgcgcgctcttttgaacaccctttgctggctgataggctttttcaaaattatagtctttcaatttaaaaattataaaatatttaataatcataaaaagtagggttcgagccccgtgggcgggggtggcttttcgcgggggcgggggttggcgggggtcagagtcgcgggggcgggggcgggggtgagaaatttctcgccaccggggacgggggcgagggtttgtttttaattagctccaaaaaatctcacaaaaaattaatttttatgaatgatgtgttgtttggctccatattcctttattcgatgtatcgcctcgattcaattctttttaggtataattgcacagatattgtctaaaaatgaccaaatttaaggattataaatatgccagaatagtcaatttttatgggtgtttttgtctaaatccagggtttctatttcaaaattttcaaaataagaataaaggccaaaaaataagattttagggtcaaaaataagaacattttgcaaaattgcttcaaatatttttacattttattcgatccaaaatgtattctattattatatttttcataaatttcagtgcattcgggatcactaaatcagatttttaacattttttgcggcatatttccaaaaaacttggtgaatgtgcgaggggagaggtccggtggtgccgattggcgccgcaagcggaaaatttttaaaactatatgaattttgttagaaattagccaaattttttagaaatttccctttttagatgaaaataaggtactaccccaaaaccagaacatttcttagaaataacaacatagaaaaaccatttattatttggaaaaaaaaataaattcaaatgaaaacgtcaaccggtgtcgaactcataataaaaattattgttaatgttgaagcactaaccataaaccacaaatattttaaaaaatataagcaaatttactttatttcataaaaatttataaaagatggttaaaaaattcaaaattgtataaatttttgcctttaattccacgaatctgccattcttaggggtgtgtttttcacccccgtgcccccgcgggggcgatcgcgggggatgcgggggtcagagtcacgggggcggggacgggggtgagccccaaaaacctgtcccgcccccggagacgggggcggggtccgaaccctagtgtattttattaaaattcatttaattattctaataatttttccgcactgaaatggcccttccctccgaaacacgcacattcatactttcatttacaaatttatttacatgttaataaggcattctgatgcttatattctctaaaagtgtgatgaataaaaaatttcaaaatttttaatagttttttanatatgcctataattttaggcttatattttaaaa

SEQ ID NO: 25563 - DNA, 481 bp, Heterodera glycines
  unsure (1)..(481): unsure at all n locations
aaaacatttgggacaattacgacaaagtcgctccattgaccgcacaaaatcgaggaaagggggggaaggcccaccacgaggccgcgaagcggccgagtgagtaccttcggtgcaggaaaattattaaggaagagagttcattatttatttgttttttgcataattaattcataaatatttttttcagaaagggttctgaaacgcaccaaattttatttacatgttagtttaggcactctgatgctttttctatcaaaaagggagatgaataaaatttttaaaaatttttaattgaagttcaatcactcatttttcgagtagtgatcagaagcgcaccagattttgcagggatactgaaaggaaaagaattaacctgttttatcacattagcttgtcatcagtttttataaaaaattttcaaaattctgagtctcctattattttatttttttttcaaaattttgaagggcgnggggggggg

SEQ ID NO: 25564 - DNA, 826 bp, Heterodera glycines
gccccgctcatcccgatcgcgacgagaacggctcgttgacagttcaacacgcgctttaacaccgcaaattcgtcttaaaccatttgaatattcccagaaaagaacaactattttacgttccgtccaatgatcgcactgcgtcttgcgcgtcgcgcgtgtcctcaaattcgacaaaggcaaaacctggaggacgacgagcgacccaaattttacgaattctgccgaacttgtggaagacgtcgtcgagctgaaattgtgacatatgaactgtgtaaattctaatttaactaaaaaattatttgaaacctcttcggaagttgcgtcctctggcagaccgtcaacgtaaacctttccctcaacattattaccaccgccgcgtcgagatgacattttgaaaagtcaaaaagtaaatattttagctacaaattatatcaatataatgcctcaaatgctttaaatttacagagaaagaaaaaacttaaaaaattacgaaattcaaggaacatttttgaggttttttgccaaccaaactggactattttgatatcattcgaaagctcacgttgagaagcttttcctaagcaaatgctaagcaattaaatacattaaaaaaagatatgagcgtttgaaaatttgttttttgaataactttttagctgaccctttttttgctcttaaaaacctttagattttgttcgtaatttttttctctatcgatttgcaaagttcaagcggatttaacataggacaaaaaaactaaacatagaatccgtttttctctaataacagagataaataaataatacgccaaaatgagagaaatcgg

SEQ ID NO: 25565 - DNA, 1180 bp, Heterodera glycines
  unsure (1)..(1180): unsure at all n locations
agaaatggacaaaaataattcaaaaaaaaaaaatgcaaaatgaatttgcccaaaataataatntaatacaaagattagtgctcataattagtccatttnaaagaatgaacatcattagcagaattggccttggagacaaagcggaaaaaccgaaacagcagcagcaaaagaaaacatttggcattgttccacgccaaaatggcggtaactcaaaattaattttctaaacttaagaatttataaattatgaattcattcaattgaaaactaagcaaaaataaataaaataaacgcataaaaaagaaaatggtgagaatggaatcctttgggatgatttatctctcccgatcactagtgatctgagcatggaaaaataatacattgcttgtaaatttgcatttaattttaagcttaccccaaatttgcggcccatttcttaagagccattttcggatatttgcagcttcgtgaaaatattcattatccaaatttcaaaatgataattcaaaataaatatcattaaacaacccacacatataaatatttttaatttacttaaaatacaactaattgctgtaatcttagtgcctttctcttccctttgcatccacgagagagagagcgagagcaaaagaaaccggcattgccaaataaacaaactttgaccagtgaagagattaatgacacctgtgaattctcgtctctccccctttctcgtctcttcccttttctcgtctcttccctttttttcgtctctccccctttctcgtctcttcccttttctcgtctctccccctttctcgtctcttgccttttctcgtctcttgccttttctcgtctctccctctttctcgtttctttccctttctcgtctcttcccttttctcgcctctccacctttctcacaccccctttatcgtctctccccctttctcgtctctccccctttctcgtctcttgccttttctcgcctctccacctttctcacaccccctttctcgtctctccccctttctcgtctcttgccttttctcgcctctccccctttctcacaccccctttctcgtctctccctctttctcgtctctccccctttctcgtctcttgccttttctcgtctctccccctttctcgtctcttgccttttctcgtctgcccccctttttcgaatcccttgttt

SEQ ID NO: 25566 - DNA, 1790 bp, Heterodera glycines
  unsure (1)..(1790): unsure at all n locations
aggaatgcattctcatcacctgtaaaatagaggttaattagttttgttggtgtggataatagctttnnaattattgccgtctctgcccgatcattaaggttagaacaaatttgacacaacttttgcaaagaatttaaatataattaaacaaaaaaatttaaaaaaatatatcaattttccttgtcctaactaatttgaaaattgggcgatttttaaatttttggactaattctgaactcgaatgagaaaatctttttagtttaattatgttaattctaaagaaagtttcgactaattatttttctttttacaattttttcactttataaaattcgagtcactaaaaatttgccttttaaatacaatatgcttcttttaattatttattaatttaaatatataattaccgctgatgcaaaagcaaatgaactgggcaaaattgacgaacaaataaaaattagagcaaaaatattggaaataaaaaaatttctttccatttctaggggaataaaataataaatgaattttttttttctatatcttacccatttaatagaactatttcttatgtaataaagcataaaaatattttatgtaatgatttgctaaaatcaataaaagaaattaaaaggaattttcttttttcattttacatcgcttcttctttataattgacgtgtattttataattattccaataaatcaattcatacataaatcataatttaaatgaaaaaataatttctttttttttgtcttttttcaatcaattaattttcgtaattctaacagataattattactttttaaaaatttgcaaaaaagaaaaaaagcacatgggtttttttttgctataatttaggaattttttaaaattttgcattcagccaaaaaatgaaccgagaatgtcaatgaccataacatcaatcgcccaagacaactttatatgaatagtatatttaaatctttgcaaattcccaagtcgcaacggtgtatgacgtcactcaaaaactaatgaataattttctgtcaaaattttttattttgatgattctttgagcaacgatccggcacatcatttaaaaaaggaaaaaaaataatttaaaaaaaaataattaaattttaaaaaactcaactgcgcaagttttccttgcttctgcctaggctctccttttcgttttgctttgtggtgtaaataatttagatggtagaatatgaaggtctgagtggagacaaaaagaatttatttttaattaatttttgtgggaaataattcaattgaaattttcggttttttttttcttgggaaaatactcggttggtcccatttgaaaacccagcagctctctgtactgaatgttttagtcccgttttgcccaaaattatcggtcccgttctatactaaatttagccaaaaagttttattatttttcgcttgccaaattttatacaattttatttatttacaaaaaaaattaatttattcttcatttatgaattttcttttctctcgttattggaaagtcaataaatgcatttgatggacagcacaaatcacttacatatttagtcattccaagataataataaatgtgatgattcagaaatggatagcaaaatgtgtggggaaatcattcaatgaattaatttaatttcgttatttcgcattcacaatttgcaaaaaactgataattactataaaatttgcttcttcaaatttagtcacaaatttcaaaataataccaaataaaagctaaaatgaaatcaatgtcagcatactgtatcatatt

SEQ ID NO: 25567 - DNA, 2391 bp, Heterodera glycines
  unsure (1)..(2391): unsure at all n locations
ggctaatttgttggtttaaccatatttgtaatcagagaaaacttatcagaatttgttaaaaataattacgaaaattttgtggtgccgcggtgtcagggagaaaatttttgaaaagtttaatgatacttttttataaaaacggatttaattaattgaatagtaaaaaaaatttaaattcaatcctttaggaaattgaatatattttctcattaattttccaagctattagaaaatggcgattttaattctttacaaaatggtaaattgataaatttgctaacttatttttttatgttgatcagtagggggtcggaaaaaacatggagataaaatccagaactattccaccaaataagaaccaataaaattccaaatttaaggctaaattattcaaaagctcttcaacaccattatgctttccggttattctcagaaaagacattatttccgatttttttttattttaaaatgaatagtttttggttatatgaaataaaatacattttttcggttcttttattcttgttttccggaaaagtaaaaacaaaaacagaaagtgttttccggaaaagtaaaatttaaattcagaaattgttttgtgcatgtccagttgtgttttataattgaaatttttttacgtaaagcccgaatttaccggttgtgttttacaattatatttaataaccggaatttctacattttctggtaaggtatttacaattgtatttttattactataaaacacgcattttcattcggtgttttacaattgtattttttttactattaaacacgcattttcagtcggtgttttacaattgtattttntagcaccataaaaatgcattttcaggatatttntaagaattgtaatttataaacggaaaataagcattttcgagtcgtgtttttgaattgtatttcaatttagtggaaacacgaattttccggccttatttagtaattaagctttttttattttttaattttaaaaaattattaaaaatttttttaaatttttttttggtaccacagatggaggatttccaacctttggctccaattcgggatcaccacttttgggtagcatcagaacccgaaaattgtcccaaaatcaatttaaaaatttctaatttactttagaaaaaaattccctcaaaacaaataatttatttttggtgtatttggggtggggaatccatttctgcattttgttttgcaagtcaaacgcctggggcggcggctgagggtccaaaaatgggtgcccaactgggagattctggacccaaaaagagcccccgagaatcccgaattttttgttccatttttgtagagctcgaaatgctctattcaatgggcccactctggtcccaaaccattcaaacctcataaagttattacgcaaaaagtgaaaattagtttttgaatttaggggtgttttcaaaaaaccgcgattttctgaaaattttctgcttgtcgccaattagttcacacggaccattttgtagagaatcaatagggctttcgaatggtaccggtgtcaaacggatcggttagatattcgcttgctgccaaattgtgcaagcttttgcccatgcttttttatgggggtaacagttattttttaattattttttaattgctttagaaatattttagaatttataatttatttttatttatttcccacttatttgggtctgtttttatttatttaaatttattttaattaatttaactgtttttaaattattttaatttttttttatttttttttaccaattttccattgattttccatttttattttattctgcttttctaacacatttcaaattaattctgatcattctggatcacaacagaatatattatcagaataattctggtgtgtaccagaattatcagaagtatttggcgcgtaccattagtatcagaagtatttggtgcgtaccattagtatcagaagtatttggtgcgtaccattagtatcagaagtatttggtgcgtaccattagtatcagaagtatttggtgcgtaccattagtatcagaagtatttggcgcgtaccattagtatcagaagtatttggcgcgtatcattagtatcagaagtatttggcgcgtatcattagtatcagaagtatttggcgcgtaccattagtatcagaagtatttggcgcgtaccattagtatcagaagtatttggcgcgtaccattagtatcagaagtatttggcgcgtatcattagtatcagaagtatttggcgcgtatcattagtatcagaagtatttggcgcgtaccattagtatcagaagtatttggcgcgtaccattagtatcagaagtatttggcgcgtaccattagtatcagaagtatttggcgcgtatca

SEQ ID NO: 25568 - DNA, 1822 bp, Heterodera glycines
ccatttgctctgctaattgccccgtttggcctccccgccctcccttccgcttcttctgccccaatgccgcgtccgcttttccctcttcctttcccttcttccgcttctccgcctctctctgccattcctcgcgttcgtttcctcactctttccctttccttcgtctccgtcgtgtttttcctgctcactttggcattttctgtgctcattctcaccaacatcaatgccctgcacacggaagtgatggtggacatcgagcagttcaaagtaaatttgggaaaggttcggatagtgagtgaattgtgtcccatggctaagggcgtcgtaagcaaagcgtgggacggaatggtcgaacttcaagcggcggacggaggccaaaacaacgggaaaagtgccggcaaagaaaacgcacaaacgacgattgaccgacagaaaagacagtacggcacaatgccatcgtacagctcagcctatgttaacaaacagcagacatccagtgagttggcaagcacaagcaaaaagataacaacttcctaaagattgcgctgcccgagcaaacaaatgccccgccggacctccggggcccccaggcgccccgggattgcccgggggtatgtcattagggggaatttcctaatgaaatttggttggtcagagccaggaacacgtggacaagacgggattccaggaatgcctgggatgagtcagagtttcgacagtggctatcaagatgttgtccattttcgccatgcaaaatgccctttcgccccttaagggctgtgtccaatgccccccgggcccaccgggcgttcaaggcattcaaggcgtgccggggactcctgggcctgacggacaagtgaaaagttggacttgacaaatacacagaattctttagccaggaacacccggcacaaatggaggagggggctacgcaggcgcaccaggaggttatttggctaattactgatcaatcgaatggaaatcttttagaacccggagaacccggccaaccaggtgaaggtggtgcggaacaactccattcgaaaatgatttaggcactcccggcaccaacggatctccgggccaaccaggccaagcgggacaaacaggaaaaggtgggattaagcgggaggagggcccgggagcagagcgattttcaggtccgcctgggcctaaagggccaatcggaccggcggggccaattggacagcccggacagcccggtaagtgaagcgatggggaggcggcatttagaaaaagcaactgtcaggcgcacccgctgcaacgggcgcacagggccaaatgggacgagtgggctcgtcgggactgaatgggaacagcggtgggatggactcaattgaaaatttgcaacaaatactttttaggatcaccaggccaaataggaccggttggacaatttaatgatccctaattgaggagaatgacttgtaaattacagcctgggcctccaggagcaccggggcaagatgccggatagtgaggagcaatggccaacggcaccaaaaataagcaaacattccgttcagttgcccgtgcccaccccgagtccaagcggcgccgtacagacagaagcaatgaacaaagaatcgaaagagaaagagaggaagagaagcaatgatatgaaaatgatgtgtttttctaaatttagaaataaacgatttgccattttgggtgccattgccaaaagtatttaatttttaatttcaatgaaagtgcccttctcctcctccgtccctctctctttttgccacttcttttgacacttctcttctcccaacggtcatcatttccatggaaacag

SEQ ID NO: 25569 - DNA, 1427 bp, Heterodera glycines
  unsure (1)..(1427): unsure at all n locations
cgattcggaatttaaaaatgagaatgaatggtnntattaagagactagattggtgatntcggggacntctcnggataaaccctcccccccaaaaaaactgactgctctccgatggcagtcccttcagcactgtgaccaccatcagtcgcccgttcgtcttcagctgcgtcttcaccgtttgtccaattgtcctttcgccctctccgtccgcgtgtcgaaattccacaaaacgttggtcgccgtcaatgagtcgaattgcaagcggaaatttttgtgcttgtttcagatggacgacgaaacggtcgctgaattgtaacggcagaggcggacaaccgaccctttctttgcatcgtttgctgaaattgagggaggggtaaaaaccatatttaaaaatgggtaaaagaaatgaatttacattacttactgaagtgcagccaacagttccgtcttcagcggtgtctccaccagggaacagtacgaatcggcgacagaaaggagcaccaagtcgtcttgcaaagtgctgacagtgaccgcttgaagttgggtcaacggaatttgccttagggtggggggaatgattatttttgaatttatttccccattttatgcgctttacctcttcacaacttccaccaatttgcctttgtttacgccgcttttcaacggcttgcgaccgaccaaaaataaatatttggccgtgagcagaaggtcaattcgggaagcctttgaatgagaaagtgcaccaaaatgccataattagttgtttacccgaaatcgtctgtcgaatttgacaacagcggcagcaaagtaaagacgttcacgccgtccgatgatggcctgcagcccgggccgttggtccatgccaatgtaatctgtggggaaagaacagcgaaattcggatgggaagtgcaacggtccgtaaggagttagtgaatcactctaattgctcactcacccgcgacaaatcggcgttccattgaaaatcggcacctttccttacggccttgcaacaacgaaacggcttcatcctttaacaatgccaaattagtaatcaattaaattttaaattgatttggccaaatgtatcgttatttcgaaaacattgctgctgttgtgatactttttgcttggtcaaatgctttttggcggtgaagcgtcggaaggcgcgttgaatcactcgagcaaatgcgtcaaatttacgctcccggccctcctccaacagaaacaacgactcgggattcttcacaaaaattttggtgtgtccgagtcggaattcagtgtccgccaattcggcagagcgacagatcaattcgcaaccctttctgaattaattgngccaaatcaacggaccgacagcattcacttaatgatactttggctccccgtgccattgtggccacgtttgngcacacaaaatcgcataacgc

SEQ ID NO: 25570 - DNA, 922 bp, Heterodera glycines
  unsure (1)..(922): unsure at all n locations
gcagaaaaagagatagccaatttccnaattttcccaaacaaacgcgcgagaaacnaaattccagaacaattagtatcggcgtaattattctgagaatgcggttggaattcctattactgtgnagcagaaaaagagatagccaattttccaaatttttcccaaacaaacgcgcagagaaacaaattccagaacaattagtatcggcgtaattattctgagaatgcagttggaattcctattactgttgagcagaaaaagagatagccaattttccaaatttttcccaaacaaacgcgccgagaaacaaattccagaacaattagtatcggcgtaattattctgagaatgcggttggaattcctattactgttgagcagaaaaagagatagccaattttccaaatttttcccaaacaaacgcgccgagaaacaaattccagaacaattagtatcggcgtaattattctgagaatgcagttggaattcctattactgttgagcagaaaaagagatagccaattttccaaatttttcccaaacaaacgcgcagagaaacaaattccagaacaattagtatcggcgtaattattctgagaatgcggttggaattcctattactgttgagcagaaaaagagatagccaattttccaaatttttcccaaacaaacgcgccgagaaacaaattccagaacaattagtatcggcgtaattattctgagaatgcggttggaattcctattactgttgagcagaaaaagagatagccaattttccaaatttttcccaaacaaacgcgccgagaaacaaattccagaacaattagtatcggcgtaattattctgagaatgcggttggaattcctattactgttgagcagaaaaagagatagccaattttccaaatttttcccaaacaaacgcgc

SEQ ID NO: 25571 - DNA, 1582 bp, Heterodera glycines
  unsure (1)..(1582): unsure at all n locations
agtcagcaatcgttgcatacttgccagatcggacgggtgcgcatgattccactgttccaagcaccccaccaaaagcaaaacgatataaccaaaatataaggaaaaatttntaaaaaaatttttctccatcttcctttttgatactaaagcatcagagtgctaaaattaacttgtaaataaaatttggtgcgctttagagcactttctgaaaaaatatttatgaaataaaaaaatcgatttattcaagtgtccgtttggggtactcacgcaattatggggagcaaaaatccaacgcagaattaaagtacagactatagggaagctaatcccgaaggattcggtctccccataaatctgggcgcatcggttcggggggactgccccgaaaacaaaaaaatcgatttttcaagtgtccgtttggggtactcaaacaattatggggagcaaaaatccaacgcagaattaaagtacaggctatagggaagctattcccgaaggattcggtctccccataaatctgagcgcatcggtaggggggacggcccgagaagccaaaaaaaaattttttttggataaaaattatttaaatgaactgactagataatatttaaaataggttatttctcttcctttcagtatccctgcaaagtttggtgcgcttctgatcagtttctgaaaaaaaagttaagcctaaactttttggcctgtttaaaaaggaattaaaaatttttaaaaattttattcatctccctttttgatataaaaagcatcagagtgcctaaactaacatgtaaataaaatttggtgcgtttcagagcattttctgaaaaaaatatttatgaattaataccacacaagtattatttttcgaaaattatttttttcatttgatcacccaacattctagactgatcggaagctcaccaaattttgcagggaaactgctgagaaccctacaaatgcttataaattttcttagaattttttgcctggaagaacacagttcttcacacttagcacaccagcattattttttttaattatttttttcattttatcacccaacgttctagactgatcagaagctcaccaaattttgcagggaaactgctgagaaccctacaaatgcttataaattttcttagaattttttgcctggaggaacacagttcttcacacttaccacacaagcctaaactttttggcctgtttaaaaaggaattaaaaattttttaaaatttattcatctccctttttgatagaaaaagcatcagagtgcctaaactaacatgtaaataaaatttggtgcgtttcagagcattttctgaaaaaaatatttatgaattaataccacaccagtattatttttcgaaaattatttttttcatttgatcacccaacattctagactgatcggaagctcaccaaattttgcagggaaactgctgagaaccctacaaatgcttataaattttcttagaattttttgcctggaagaacacagttcttcacacttagcacaccagcaattattttttttaattattttttgcatttgatcacccaacggtctagactgatc

SEQ ID NO: 25572 - DNA, 1184 bp, Heterodera glycines
aaaaaaaaaaaaaaacctttttttttttttaaataaaaaaaaaactcatgtcagagcaggccctccaaaaaaaagacaaaaattttttcgaaaaaaagtaaaaaaatggaaaattaaataaatttacaagtgaaaaaggaaaaaagcttacaacaccttcgattctcaggacgtctccgttccaagtactaagaaggcccaacgttgcttaacttgccagacggacgggatggcgtgctttcaacgtggtatggtcgtaagcaaaggaaagcaatgaaagtaatttaaataggcatatttaaaagagcctatttttttgccttttcacaagagaatttattaaaaaaggcaaaattcgccttaaattaataaggtgaaagtttgaaaatgtttattaaaaaatttaagaatgaaatataattaaaataaatcaaaaagaaaaaaaatcaatttatttttctaaataaataaaaaacattgtcagaggcagtgcctgccgaaaaaaagacaaaaaaattttcgaaaaaaagctaaaaaaattgaaaatttaaataaatttacaagtgaaaaaaggaaaaaaagcttacaacaccttcgattcccaggacgtctccgttccaagtactaagaaggcccaacgttgcttaacttgccagacggacgggatggcgtgctttcaacgtggtatggtcgtaagcaaaggaaagcaatgaaagtaatttaaataggcatatttaaaagagcctatttttttgccttttcacaagagaatttattaaaaaaggcaaaattcgccttaaattaataaggtgaaagtttgaaaatgtttattaaaaaatttaaggatgaaatataattaaaataaatcaaaaagaaaaaaaaatttatttttctaaataaataaaaaacattgtcagaggcagtgcctgccgaaaaaaagacaaaaaaattttcgaaaaaaagctaaaaaaattgaaaatttaaataaatttacaagtgaaaaaggaaaaaagcttacaacaccttcgattcccaggacgtctccgttccaagtactaagaaggcccaacgttgcttaacttgccagacggacgggatggcgtgctttcaacgtggtatggtcgtaagcgaaaggaaagccatgaaagtaatttaataggcatatttaaaagagcctatttttt

SEQ ID NO: 25573 - DNA, 1251 bp, Heterodera glycines
aaaaaagacaaaaagggaggaaaaaggaaacaaatttccgggctttgccctcgcgttggagaaaacaatgcgcagaataacttgggaggctttagggttagcgcatcaatatttttttcagaatgtgatcggggtacaaaaaatacgggtcaaaaaatgggtgtaaatccgcttggagatgcgttagaaaagaaagaaaaatatgttcggacagcttttgaagagctgcattgaatgctgcagttgccgctgctgtacgcccacccgttgctgagttagggtcgagatcggcatgaaaaaagacaaaaaggaggaaaatgaaacaaattcgcggctttgccctcgcgttggagaaagcaatgcgcagaataactggggagacttagggttagcgcatcaattatttttttcagaatgtgatcggggtacaaaaaatacgggtccaaaaatgggtgtaaatccgcttggagatgcgttagaaaagaaagaaaaatatgttcggacagcttttgaagagctgcattgaatgctgcagttgccgctgctgtacgcccacccgttgctgagttagggtcgagatcggcatgaaaaaagacaaaaaggaggaaaatgaaacaaattcgcggctttgccctcgcgttggagaaagcaatgcgcagaataactggggagacttagggttagcgcatcaattatttttttcagaatgtgatcggggtacaaaaaatacgggtccaaaaatgggtgtaaatccgcttggagatgcgttagaaaagaaagaaaaatatgttcggacagcttttgaagagctgcattgaatgctgcagttgccgctgctgtacgcccacccgttgctgagttagggtcgagagcggcatgaaaaaagacaaaaaggaggaaaatgaaacaaattcgcggctttgccctcgcgttggagaaagcaatgcgcagaataactggggagacttagggttagcgcatcaattatttttttcagaatgtgatcggggtacaaaaaatacgggtccaaaaatgggtgtaaatccgcttggagatgcgttagaaaagaaagaaaaatatgttcggacagcttttgaagagctgcattgaatgctgcagttgccgctgctgtacgcccacccgttgctgagttagggtcgagatcggcatgaaaaaagacaaaaaggaggaaaatgaaacaaattcgctgatttgccctcgcgtggagaaagcaatgcgcagaataactgg

SEQ ID NO: 25574 - DNA, 987 bp, Heterodera glycines
  unsure (1)..(987): unsure at all n locations
cgccatggccatttatttttcaaatattttatattaaatagatatccagaaaaatggctatctcttttttgagaaattttctatgcaacaaacgctctcgaacatgaaacgaagtgcggtgcgccatggccattttatttttcaaataatttttatatntaatagatattccagaaaaatggctatctctttttttgagaaattttctatgcaacaaacgctctcgaacatgaaacgaagtgcggtgcgccatggccattttatttttcaaataatttttatatttaatagatattccagaaaaatggctatctctttttttgagaaattttctatgcaacaaacgctctcgaacatgaaacgaagtgcggtgcgccatggccattttatttttcaaataatttttatatttaatagatattccagaaaaatggctatctctttttttgagaaattttctatgcaacaaacgctctcgaacatgaaacgaagtgcggtgcgccatggccattttatttttcaaataatttttatatttaatagatattccagaaaaatggctatctctttttttgagaaattttctatgcaacaaacgctctcgaacatgaaacgaagtgcggtgcgccatggccattttatttttcaaataatttttatatttaatagatattccagaaaaatggctatctctttttttgagaaattttctatgcaacaaacgctctcgaacatgaaacgaagtgcggtgcgccatggccattttatttttcaaataatttttatatttaatagatattccagaaaaatggctatctctttttttgagaaattttctatgcaacaaacgctctcgaacatgaaacgaagtgcggtgcgccatggccattttatttttcaaataatttttatatttaatagatattccagaaaaatggctatctctttttttgagaaattttctatgcaacaaacgctctcgaacat

SEQ ID NO: 25575 - DNA, 1246 bp, Heterodera glycines
  unsure (1)..(1246): unsure at all n locations
ttttttctgggattatgactataaaggtcgccccgatggcgaatattccccgtagctgggaaaacagacgggggttggggatttgcccagggtcccgaggcgggtatgtacagcaggtcttcatcggacgagaaacaggcgacgccttcctgncnanagtgcggaaggcgcttaaaaaatttatttaaattttattttaaacatttttcggcacctcaatgaccgaaattgtccactgacgaattcgtttgatagtaaaaagttactttcatatntaagcaccatatatattgactgaaagaattatccgctatttgagtttaaaatacattaaagaaaataagtatgtatatatgtagaacatttaacgtgaaaataaagtcactgacgaaaatcactgacaattcattcaatgacgaaatcgtttactgacgaaatcatacagcgcccaacgcagcctcaggacgggcgcttcgcgcccgttttttaatttttgggagacattcgttcgcttcgcggcccaggaatttcaagaaaaaaaaattaattctatacaaaatttctgataaaaagaaataaaaaaatataaaaacaatacaaatattattataagtacaaatatgctggatttttcgtcttagtggtctgtgagttagtcaccaaaaggggggtctcaagttcaattcctccttgtgtttgtgtataaatttcaattttttaaagcaaataataaaataataataaatacagaacgccaaaagaacaaatacaaacagtaaaaggtacacactatattttacccttgattttatgaaatttttttagcttataacttggtgaatactagagcaaataaaaccattttatgctcattttgaagggaaaattctggagaatatttctaagttagtcaaaagtttaaaaaaattgtttattggcagataaatgattcatgtgttattttatatgttagagagaaggaaatagtacgcccaaatgagagaaaaagaaaaacctttgtccttgaaaaaaattttttcctattgaccaattttcttaaaattttgcataggcccatattttgaccccctctatcgaattctcttttgttttttgaaagtttcttttctaactcgagatcggctcttccatttttgcaagggaaaatctccggaaaattttaagttttgcaaagttttggcgttctgattactaaataaaaaataagcataattgtactgggagc

SEQ ID NO: 25576 - DNA, 2427 bp, Heterodera glycines
  unsure (1)..(2427): unsure at all n locations
ttaacttttttaatagcactacttccattcatcaatgatagatttgaaaaactagcaaaaatattagttttttaaaataactaaattaatttattaaaatatttttattgtattttttattgtacttttccataaatttaatttcctcttattaacttgtttgttcgtttagtcaattgtgtaatcggaataaaaaatatttatattattttatctttatattttaatatttatcacatattgtaattccttcataaattcttgccgttttatatgttatgtacaagtaaataatcataaatacaatattattgcaaatgtttaatttttgcatttatttaaaatgtaattttttattctttgttttaattaattttttatttaatatcttgattggaaatgaaagaaaggcatttttcttgttgcaaataatataagaattgaaagctccagataataccttttatttacattaacattatttgctttttattcatacattgaattattttataacggtttaattgtctttaaagaattaattttatttttgttaatataaatttttaaaattagattaagtgggttaaatataatttgtttctttttttctttttatctttattttgattacttttattaaaaatgaatttttaaatattttatgcataaataaaaatttttttattctttagttgtttatcaattgaatcatacatttcttcgaagaaaaattctatgatttttaatgtattaatataatgtgccttgtctatctatatatgaaatctaaaaatgtaatattcatagaaaataataggaaataattatatttataaattttttatttgggtaaaaataggataaacccgcagacaactgaaagaatatgcataaaataattcatgtgcgtagataaaaaccataaaattgagatttttgggagagtgacgcagatgggggagtgtctgcgccgtttgttccgatttagccgtcgccaattgcccaatttgccgcccaagaaatcgcaccaaaaatactccgcaagtttatctcaaacttgggtaattaaaccctacacttacaataaatgtgcgagaaatacaaaagggggtggggaattgtgtcaatggggacaaaatgggaggggtaaatgcaaaggaaaaatggcacaaatggggggcacatcaccggagaaaaaggggggaagggtccgggcgaatttgatctcccgcaaattcgcctctttccatcaaatgatcgccgggacattcgcggctgacgttcagtcgcgacattccgacggctttgaaaacgtcgtttggagcggaacgcgatcatttgtcgtttcagctccatcacgagcggtgacagctcgggttcctcttgttgcgaacttgccgtttcattcgctctcatttcctggggcattggaggcggtaccagctcaattgcttcaatccttgaaattgccggtgctcgccgtgtgcctcgtgtagctctgttccgctgcgtccattgatttcccgtcaccaaattgcggatggtaacgatgacgggccccattaagtagacccataccaagggtatcaggacatcgcgccctaaaatgaatgtgacgtaaatgaagcatgccgttgtccagtaggagacgagcagccgaagtttgtccctgaaccattcttcggtgaggccaatcacacgctcgggagagctcctagtgtgagcgcacgcgccgttttgtgctccttctccttcgacttccattgatccaaacgcagccattcgtccaagtgcgcgaatagcccttcgcctggttcgttgtcgatcgtccatcgatgaaaaactagcggcgtgatttccaacaaagatttgtctcccgaggcttcgtggatctccgatgctgctggagtcgattttctggatcgtagcggtgcgtgtgtcgattttgatccaattgccctggctcagctgcagataatggtagcagaaatttccacaatctgcgaatggtgatgacgctgtgagaatgtgaagctccggatccaggaatggtagtagttgttgactgcttgatattccacattttgcattgcaaacagcgcatgaaaaaatttgcatcgtgtcttcgtttagccacctggccataacatccttgcgtcgtaaaagtcgtctggcctgaatggtcggatttcctcctctggaacttctacggcattccttggaaaaaagctacgcgattgatcggcttgtggcgagttgtcctgcggttaattgtgctgcgagttgctcctcctggatggctctttttcccaatccacgatcgttgacgatcttcaggtactcatcctccaggattccanacgattggtccacaagcgaatcggntttccgttgcatgctgtttccattttcgcatctttgcta

SEQ ID NO: 25577 - DNA, 1321 bp, Heterodera glycines
tcgaattaattataaaaaataatttatttaacaatttgaaaaattttcagatttttgactcaaaaataagattttttatttcaaatttctcctttataaatttttctatatatttttaaaattcgaacaaaaaatctaaagtttaatttttcgaatttcgtctaaaaatggtttaatgatcttttattgcatgagtggatagctttcagtttgtttccatgtgtttaagtcgttttttgatgaaaaagagaaattggataattaaattttttattttttgttcgagtttgggtccggatttcggaattgttcgaaatgaacgtcatattcgtgatcagcgaccccgaaaactccagaaaaaaaaattaaaaattattttatgtggcgtaaagtgaaaaagtaccaaaaattgaaaaaacctattttcacctattctggcgttttgcacaaaatttaacaaaaatgtaaaaggaaaaataactattaagaatcggccccaaaatttaaaaaaagggcctaatttgtaagaatcgaccctaaaattttctcaaaaattcatcttcaaattttatttttttgaaaggaaccatttttagggctatttttgggggtttcttaggacctaaaacccaactattttggtacatagtttttagaacctataaatataagccttgatagtcatcaatagggatgcgacttttagtgacgaaaaatcccaaaatagttaactaaaatagtgagtaaaaatgccaaaatagtgagaaaatagtgccaaaaagtccgaaatagtgacgaataatgacaaattttcagccaaaaattgagcaaaaataatttttattcactatttgcagttgcaaatgagtaggactgggatttttgagggcaaaaaatacaaaataggttcctaaaaaataatttttagaattaaaaatttttgcaaagaaagtgaattttgtgaaaaatttttcatttcttaggagtgatttttgaaaatttttatgtcgattcttaggggtgtattttttgaaaaaaaaattttaggtcgattcttaggggtgtattttttggttttattgcgtttttgttaaggaattttccaaaaaatgttgaaatagtgaaaaaatagtgacaaaacgccaaaatagtgatttttaactattttagtgacgaagtcgccaaaatagtgatttctagtgacgaaaagtgacgtccaaatgaaaaaattttaacgcagaaatgcgttttttgagctcctttcttcaaatcaattgagcaaaaaatttagttaaaacctaaaaatcgcatccctagtcat

SEQ ID NO: 25578 - DNA, 1420 bp, Heterodera glycines
  unsure (1)..(1420): unsure at all n locations
ccctagcagggtggggtgctncactcggaaaaagtcccctcatagacggattcaaattgccgcatttttgaatgtttattgcaaaaatatgcccttgcttgcattttaggtgctcatccacatcattttggcaaaccgtgacaccgattatggcgtgtacgcctcgggcacaattgcactcgactgcaactcgcagagcaagtggcttgtgccgttgaatgcaatgcaacaccagggccttgaagtggacagatggtcatgtattcagtcggatttggcggcggccgctgcccgtgccgcggcggccggctgattgtgagcaatgtgttgtgattagtgcaagcttttgccgaaacggtgctgttcgagcgtcgaaaatttcccgggaacagacatgaagacgcgtcgcgaaaaccagagctgagacttgagctcgagatccagtctagactccgagtcttgaaattcgagacggagacgacctgagtcttgatacccaaacttggcctgagtcttagtcttgggacccagacctgaccttaagtcgcaaaaatcgatatggaagtttgacctaacttctggaccttgtcttattatgtccagttctcgaaaacagagatttgacctcgagacccagtctgattatcaaaaccgagacatagaccaaaacgtgagaccgagactgcagaaaaaaccgatacttttctcgaattaagactctagagtctcgaacagcacttgtaagccgttccccctcacatggggtggcgctaaagaagaaaaaaaaacaaaattttaatttattttttaagtgtgtcttaatttttatgcatagtgccctcctattttcaagtacgtacttgccattcaagtacaagtgtttcttattttaaaaactgcccaataaaatttttttttgaaactcacccaccgtacacccagtgccgttacagtaacactcgaaactgttcacacggcagggctgggacgcgaccgcgatccgcgatgcgcgatccgcgattcgcggcgttttttttgcgcgatccgcgaccgcggcaatttgaatccgcgatgcgcgatccgcgaccgcgggatttttctgtgcgcggcgcgccgcgcattttttagggcaaaatttttataaagaaaatttattgaagcgattttcttttttgaatatttagatttgaaggtataaaattttgaaaacgaccaaaattcgaattttctcgcgcatttaaatggaatatgcaatcagaaaatatttatacattcatcgttcattttatagacaattttactctttgtaatttagaccaaatgaccaacgaaagactctatttggttttattttgacaaaattcacaattcttcttatgccaaatgtaagacatgcaactataaagttgacacagggccg

SEQ ID NO: 25579 - DNA, 1016 bp, Heterodera glycines
agtttggcaatacgaaatcccgtatccaatgtttgcctaattttgtgtgctatccgctaattgttatgtatgatccattttaaattaggggtgcttggtaaaaactctcgaaatatttttggtaatccagtttggcaataacgaatcccgtatccaatgtttgcctgattttgtgtgctatccgctaattgttatgtatgatccattttaaaattaggggtgcttggtaaaaactctcgaaatattttttggtaatccagtttggcaataacgaatcccgtatccaatgtttgcctaattttgtgtgctatccgctaattgttatgtatgatccattttaaaattaggggtgcttggtaaaaactctcgaaatattttttggtaatccagtttggcaataacgaatcccgtatccaatgtttgcctaattttgtgtgctatccgctaattgttatgtatgatccattttaaaattaggggtgcttggtaaaaactctcgaaatattttttggtaatccagtttggcaataacgaatcccgtatccaatgtttgcctaattttgtgtgctatccgctaattgttatgtatgatccattttaaaattaggggtgcttggtaaaaactctcgaaatattttttggtaatccagtttggcaataacgaatcccgtatccaatgtttgcctaattttgtgtgctatccgctaattgttatgtatgatccattttaaaattaggggtgcttggtaaaaactctcgaaatattttttggtaatccagtttggcaataacgaatcccgtatccaatgtttgcctaattttgtgtgctatccaccaattgttatgtatgatccattttaaaattaggggtgcttggtaaaaactctcgaaatattttttgttaatccagtttggcaataacgaatcccgtatccaatgtttgcctaattttgtgtgctatccgctaattggtatgtatgatccctttttaaaataggggggcttggtaaaactct

SEQ ID NO: 25580 - DNA, 1492 bp, Heterodera glycines
caagttgtattggataacaataaaaaagttatagtgaaaaatgtgcgctcgtactaaaacgggcccgtactaaactgactcggtccgcattttagcaaatctaaaatagattacaataataacatagttagattaatcaaattgatcgaaaatgtaagtgagaaattttgcgacttagcggaatcttacgggcgcttcgcgcccgtttctaaatttgttgggctattaaggccgcttcgcggcctcagacgggcgcttcgcgcccgtagattatatgaacaattcatcagaatttattatatcattagaaatcaaagtgctccaaatattaatggtattaaattctaaaaatagaaaataagtagaaaaataaaatataagaattgtcgaatatacaatagaaaaaataacaataaatgcagaaaagaagttgaaactatcgattagaatataaaacgagaaaattattatttagatggatgaagacactttggcatgatattaattgcataattatcttttgctttcaattttttaatatttcataaaagtgtacgtactaattgtaataaataatcatttatttacttcatttatttaattaagtacaatgtattgttacgattatatgaaaataatcatttatctttttatagcaataatatttaatattatttgaataggtttaaaataacttcatagcaacttttttttttgaattgttcattaatatatcttctttatatactttgatttaaaaaataagcaattaaattaaaatatttatgaataaataattatttttgatagaaattattcaaaatattaataattaaaatgtttttaatgaattaatttgattattaggataattattatttatttaaaaagtctttctttatttatttattttaatttcattctttgccctgactttactttgtgatacttctcctcatttacatagatacattataattatggattaaaaggtatttatttattttttaaatttattaattttatttcaatttatttacaaaacatatttttttggtatgaaaatttattttttcaatattaaaccttggatattaatttaattttttttttgccaacatacttggttatattaaaaaaaaatattatttgaaaatttaagaaacttcaaaacacacataataaaattgcacttaaaatacttgttgggaaagattattggctttgctatttagaacaataaaaaaattttgatttataaattcaaaatctattaaaataagctaattttcatttccaaaaaaagatttaggtatttaaaagcaaaaaaaattgtttcaagaattagatttatttaagaatgaataaattttaatatttgttaattcttacttatttatcacctatatgtaaaatagtcatttgattttttagcaattttaatttataagaagtaaatgtatttaaaatacatttgtatattgtgttgaat

SEQ ID NO: 25581 - DNA, 1196 bp, Heterodera glycines
  unsure (1)..(1196): unsure at all n locations
ttacgtgttggagattcgtggcatggcatcggtcctttgatgaccagcaaacggcganccganctgcgcatgctgccttgaaggggaggaagcgccanagacaangctgacccttcccgaangcctcactttgtccgtgttcgctttgccctctgtccaagtgcgacttttcgtcaccaaaaggcacttgtccgattggcatctgcggcaaagtgccgtcctttgtgccggaaaatgtcggcgcgatttgtgcctttgcggggccttggctggcaacggcaaattccgccgggttcagtcggtgcgttgccatcgcatcgcagccgtacattcgattgatcttcgccagatcgctaaatccgaatttttggttcactcctcaaaagttccgctacaaagtctcacatctcactgaagtccttggcgtttccgattgtggccgcaaaacattggggggaggggtcggaatgaatggggaggggtgcctttgtcttacctcctttttttggcaacatcgtcgggaatccgttcttgctgaatgccaaactgtcctaattttcatttatttgccaaattcaagacacaaatcaaaggtcaaacgaacgtaatggaggatggatttgtagtcgtacggctgaccgtaataactcgttttggtcaagtcaattttgccgaattggtcaagggcacctcaacaaaatgaccagagtaaataaaagtgattttccccatttaatttttaataatttaataaaattattgcttctaaaaattcgcataaattttaatgttgacacttcgaaactccgacattttggaaacgcaacattaagtataaattacttttgtcgatgttttgccatattatgtcaatgtaaaagtcgcggtcccatcgctctgaataattaataattatgataattaaacactatcatttcatattagctgattaattaatgaaaattaacaaaaatggaccgtgttcgtggtaaaagccaacgacatgcattatctattggaaagggataacaaactcaaaagtcattttcccattgaatggttttattacctcgtgaattattgtagagtaatccatgcaactgaaatggttggaattaattactctttttggtttaattgcccatttaattgccgattaattacccattgtccagcgaaaggacttgactccgctg

SEQ ID NO: 25582 - DNA, 1177 bp, Heterodera glycines
gcgggggggggggggcgacttgaagaaatcaaacaaatgggggaagggagggataatcaatgggaaaaatgatacaatttttaaattttattaaaaataaaaaggaatgagtgcggttgcactttgttaattggaaaagggggaagtgatggacaaatcgaatcgaaaatgttgtgaatgacggcgaaggtggagtcatcaagaagagagagacgatgataaattgaatgggacggagggggggggggactttcgactttcccctcgcattttgcgaccatccaaatgatttattgcccgtttgctaacaaggctcctctataaaagtacgtgattttgcaaaatgaaatggcaaaaaattgaaagcgcgagaacgaactttgacccgcagtcattttaaaataatcaggggaattttccgagcgaaatgataagctgataagaataaaaaaaataggactgataaaagcaactgcacataacgatatgtataagggggagtgcgctgaattatgggttccgacttttttgggttcggaattcctcttggaagtcgttttcggattctatttttcaaaataaaacatacatttcgccaaaccgaatgataaaatttgcgatttttaattaaaatctggctgaaatttccataattttccgttttcccggcgacgccgatttatttcacctacatagtaattagtggagaataccgtcactttcattgtctgtgtcggcattctcttcttttatgtatctactcactgttaacgaatttgtgtcttttaattcattttaaggctttctcaattctgaatgcttcctttgctgataatcgatcaaagggaatcaatcatcaggcaattgataagagaaagaaaggcgagacaaaaaatggaactcggaaataattggccaaggaaagagccaacggccaaagacagcgaatgattgggcggcaaaagggtcgttttgtgctctttttctcgtccgccccattctttgcggcttttctttgtcttccttcgtccactatttcttccttcaacacactttctgattctcattttgcattggaatatttgtggccaaagcaaagtcggcgaatggcaattgcaaagggccgaaagaatggcacggacgagggaagagaaagagagggcgggggggagatagg

SEQ ID NO: 25583 - DNA, 1470 bp, Heterodera glycines
  unsure (1)..(1470): unsure at all n locations
gtcccgtttgntgtcaataacttgggttaacacagcccgttgctgtagcccgtcacaaatgcaacaaacaaacaatggcacaagcagcaggaatagcatcgacgagagcactccaccgtcaagaaaacagtaaaaaatggccatggaaaacagacaaacggttttggccaagttcgacagaaaagcgggtggacactgctttaatctaaaatatttggagaatttaatgaaataaattttaaaaaattagttgtgtatataagagcattttattcgtttataaatttgaaattattcttatttaaaaaatatttatttaaacacatgaaatttgatcggactattttttaatacaaaattaattgaataagttaatatcatctaaatggataaggaagaacttttgaagcaccctaataaaatttgaattaatttaaaattattaaacaatcgaaattcattgatttaaatttcttatattatgtacaaaaaaagaaaatatttttaatcgaaaaaatgcaataataataaaatttataaattaaaatttactttaatgaagcagggtatattacggcaccaacaattgccgaaacgtggtggacaaggtgaaaaattagcggaaaccaatgcaaatgctcaacgccagaagattttcggagaaaaagcaatggaaacaatgcccttgacaggccaaaagcaatggccataatggccaaggtcataggatcgagatgggattgggacaacattcctttactaaaatttaaaattcaattttctcaaaataaacaaaatttgataggagtgatgaatttttcaattatgatttttttcggtatttgaactctttttggctaatttgagttttaattttttttttctgaaagaatttttgagacattaaaaattttaattgattaaaattaaataaaaaattcaaatatttaaacaataacactaaaaatggcattcaatttcaccataaaacaaattacaaaatcacatcaaccatttcgagtgccatttttcttcgaatttaaaagataaatgccggatcatcactattaattttgatgtcatcatatcagaaagcacacaaaataattgctttacgccccaaatgacgtaaaaaaataaggcaaaagccgcggtgtgaaaaattcgccgccgcacagataagccaaacagtgaagatgacggcacggcactgtgaccgagtgttccgtgccgacaaatttgcctttctctcgcccccccccaagggatgatgttggggaggggccgcgaagtgtttgtgccgagaccaaagttattgaaacgaaaaaatggggattttttgacactgatgaaatgccattattgcagatgaaaaattggagggagagagcgagaaacggattaacagcggattggcactgctaatgatgaaaaatggtcgaaagcatataaagaaaaaaaatggtgaaa

SEQ ID NO: 25584 - DNA, 2277 bp, Heterodera glycines
  unsure (1)..(2277): unsure at all n locations
agcaaaattaaacatcacaaagtaaatgttgttttcctaattatgaaaacaatagatagtacgttaaaagagagaaaaattagagaaaaaaagattttgttttnttctctgcactctctcttttttgtacacatctctccctttttcgggtgtgtgactcagaaatggttgccaaaagattcttttccgcgacaaataaaagtcctttttctccgttcttcgttcactctcattcatattttttgctgctcatttcgtgagttgtcatcattttttatctgatttccatattaaaattatccctccaacatttcttaaatgtccgaattcggctcattcattaagctttttctataaattggtggcatttaatttatattatttttgacagttaacaaaatacgccccctaaaaataaaaaaagaaatctttccaaaaaatttctatctctttttgtaaaatgccatttaagcaaaattattttttgatggcatcgtccgacagaaaaaaagaaaagttttcctccgacaatcgccgactcatttcttctgccgcaattggtgaacatgaacagcagcaaccgatgggttcacatggaaaacggcgaaatgttcgcgtggccaagaaaatgaacaaatcgttagggacgacgaagccaaaacggtggaaaaattggcaaatttttcttttagggtccatttttttggattttgggagaaaaactcaacttttgccagttaaagcaatttatttccccgtatttcagttgctgttggatttgcgctgatgtgtggatggacattttccccttttttaaccgtcctcaactcggtctcaaattggcaatgctttcgccgcgtttcaatgttttggtggacaaacatttcgatggcaaaagcgaattgacacttttgagattggtggaaattcagaagccgggaacggcaccgaaactttctgtgcttttcaacaatcgcaaattggtgccatttccgttgcctttgcatccgttgcccagcaaaattcactttacgaaccttcgaattgtgtaaatcagagcattattattaactggtaaaagcccatttgtttgcttttcagttactttgatcactccgtcgtcgcttttctccgctcaaatcaacagattttcgccagaggaggcctcaatttgtatttggtggttcgagcagcacataagcgtcttctgcagccgactttggatgttttcgtccgtgaaattttgcccgtttttgcgccgaacattcgccattggcaatttgccgaagatgattatttggacgttttgcttcgactcacttcgccctcaatgctcaccgatctcaatcagctggcttcaatcaattccaattgtttgctgccaaatacaacttctgctgctgctggcaaagcgttgtttgaatggttgcactctccgacgaaagatggccaaccgaagcgattgctttgcactgtttattgttcatcatcaccaattcaggactgtgtcaaccatttgaaagaagtgtggccacattcattttcgtcgttaaattgccattgattttgttttttctcatttttaggcatttctccgtgccatcactatttcttccgtctgctacagaattcaatttaatttgttcaccgacgaaacaattgagccatttgaattggtcaacgacagaagcaatgaaacgctgactctgagcaaacaaaatgccaattgggtgatgaagcgatgccaaattggacaaatggttcagtgggaggacgaaatgccgaacaatttgaacaattccggcattttttatttgagcggcaacagaaagcatcctggctggaacaactttaataatttgtgcatttgtttgtgtggcgacaacacatcctttgggtgagtatgggcagaagcaacgatggcattccgaggcccaaaaatgtttaagaaaccgcaattccgtgccatccctatggtgttaacataaaaaagagaaaagaatttcaaagatgtacgttcgaattgcaatttaccaaaaaaagattttggcattttcaggatttggataatccttcgaaaaaaacggactctgacacatttcattttggcccattaaaactcgaataaaaattcctttaatttagaccattttctccaccagcggcgggtcaaagcggcggaaaagatgagaaatgatcagagacattttggagaatattgaatggacaaattgatctgctgatcacgtttgatgctcatttttgctcgttaatttt

SEQ ID NO: 25585 - DNA, 1775 bp, Heterodera glycines
  unsure (1)..(1775): unsure at all n locations
ccaaatttttgcgttttgaaaaatgctttttgcaacttctagatttgatttttgaatgtctattattattttttgcataaaatgaataaagatactaatgtcatggagcggaccgaacaccgtgttttgtaaatggtccattattactacatttttcatcagcgtaaatttcatcatccatactcaattttctgcacgggagaattagcgttttaaaaaatacctaccgcgaaatgaccatttttacattattaattcaaactccttaaaaaatacgtttccattgggattgatctcttgcttgaaaaatggcaacatatttcgaaaataataggggctatttcgaatcatgattttggttagttgaatttatattcaaaaaaaacttctaaaaaaagttgtgcggaaacttatgtttagggccgcaacttttagtgacgaaaaatcccaaaatagttaactaaaatagtgagtaaaaatgccaaaatagtgaaaaaatgtccgaaatagtgacgaatagtgacataatttttagccaaaaattgagcaaaaataatttttattcactgattgcagttgcaaatgaggttaatttttttgaagtgtgtaacgatggggcatttcacgtttacaatatttttccaaaaaaattttgaatttttcattctccaatttttgaaaggaatctttgctgagacaaaggcttcacacaaatcgaggttaaattggtttggaacattgtttggtgttgtcaaaaattgctgctgttgtcctccattgttccgttccaattttgccttgtgttttaccgtttcgttgtgttgtttgagatgcgcgaattgcgtgcaaggaatctgtgaattttttatttgaagttgtcgttgttacctgttgttcacataactgacaataaattattttgccagttattgaataaaaggcggttcctccgatccgtcgaatccattcccgaaagttggccgattttgatttaatttttggcatatagtaaataaaataaaattaaataatatttagacggataaacatgtgattttcgcaatatattattgcattttggcaaataataataataataagcataaaaacatattgattgttatttccgtaaaattgcattttcattatttatatagacgaaagaaagaacaaatttatttattttattcacaaaaatgatttctacaattttattttttggatttatttggttttttacccatatttttctttgttcggccccaaattccgtgaataatttgacgttaagcaaaggtttttatgcactttatagcaacaaaaaaaaacaacctatttttaaggctttacgctgtttgacaaatcgccaaagttttcgattcaaatgaaatcggatgaacaaaaaagccaatccgatatggtcaaaaatgttttgaaccggcgccatttttcagcacaaacgccaatagaaatttgtgaattattttttattgatatttttaattccataaaatttttcagcacataaaagggcggtagaagcagcagctaaaaagaaagacaattcgtcaattccgccaaatttcaaatgctctctcaatgagtatttggccgctgttgtggcttataacggtttttatttcaatgttccagtgaaaacaatcgcaaaaattgtattgagtttgatttttgctgttctgtcctcccaaaatttgtccacaaaacagcagcagaattctaatgagancatttttgatggcattttgacatttgac

SEQ ID NO: 25586 - DNA, 1300 bp, Heterodera glycines
taaccatcggaggcgcgctcgcttcgctcgcgcacctcgcgctagtcgagctttgaaaaaatttattatcttctcttctctcccacctctctttctttctctctctcctctttttctctctctctctcttcctcctctcttctatctctctcctcttcctctctctcctcttttctctctctctctctcctctttctatctctctcctcttcactccctcctcttttctctctctctcctcctctctttctttctcactctcctctttctatctctctctcttcctctctctcctcttttctatctctctctctctctccttttttctatctctctctctcctcttctctccctcctcttttctctctctctccttttttctttctctctcactctcctctttctatctctctctcttctctcccttctctcctctctttctttctccctcttctctctttctctctctctcttcctctctctcctttggtctttctctctctcctcttctccctttctttctctttctccctcttctgtttctctctcctcgatttttccaataatgaagaaatatgtgctcgctcataacacaaaaaagacgtaaacaacaaacagaaaagaaaagaaaaaaagactgaactattttccaaaaggaattcgtttcgataaattgtttacttttaaatgtattagttacagcgcaaaattaatatatagattttatgaattttgcaggcttatagcccttatgcctatgccaaaatttaatgaaggcttaaaaatttctcgcccaactttttatgatcactcttgaacaacgtatatttctctctaacaaataagctgatcaatgatcaccagcaataactaattttaaactgtcaaagattcggcactgatcagacagtgatcaaacagtaaaatgatatacggatttaaatgacattgataaaaaaattgttgataattttcgtacaccaaagctgatctgttgctgaagctgttgtggttgttgttgttgctgtgccgtcggtgccgtcccggcggcgatcagtcgcattgtccactcggcattggcacgcgcattttcatcgcacaagcggtgcaatgtcacaaccaaatcctgtgaattttatttaaaatggatatttaaaatttgagaaaatccgttttctgttcgaccaaaattttggtgtgacccgaaaccaaaactctaaaagcacataaacattaactgttcagatggcacgcagcaaaagcatctcgtatattccaaaattttcgggaccgaaatctc

SEQ ID NO: 25587 - DNA, 1299 bp, Heterodera glycines
tatgacataaatattaatattttattgttttagttccgattgtaaattcaaaaaatggcgaaaacgaatcggcgaattgggggaacggcagaagcaaaatcattgtgattaaatatatttaattaaatgagttaattaagcaatggctgttcaaatcgcacaattggcggatgaacggaaaaagtacaagaaaaaatgcgatgaattggaaaagcaactaaaacaacaacaaaaacaacatcagcaggagaaagaaaagggcaacaacggtaagggaaggatattataaaaaaaattcataaaataggcaaaatgattttgaaattctttaaaaaatatgcttatagaattgttatgcgattgcagataaaaaagctttaaaaatatttaaagaagggaatggcattggcaaaactgagaaaagctgtggaacttcttccgctgatcaccagcaacagcagaaggtgaactaattacgctatatttagtttcggcgggggggggggggatacggtggctgagtcggggatacggtggctgagtcggggatacggtggctgagaatttttcttttcaaaaaataagatgattttttagctttaaaaatgcaaaaaaaaggatggtgtgatctatacatatttattatgattgccattagatcattaaagaattaattattcttaattattctgtacgatggctgaaatttaaaagtctgttaaaactattttttagcaatttgttcaaatgtttattgcgaaaaaggaaatggaattgataaactcagaacagaggcgacaaatttcgaagttggaaattgaaaatgtgagaattttaacacaacaattgatattttagttaaattttaatcacattcattagagagcatttggagaagaattgaaacgccagaaaatgatttcatttgcattggaattggaaaacaacaaaatgatgatggaaaaaaagcagaagcaaaaagaggaaatggcaaaggcgaaatacggtaagggacccatactgtagagggatttccgtatacagtatacacatcactttgttaaaacggcccttttgacctctaataaccgaaaaattttccaaacaatcaattacaaaagctctcgagaatattaaaaatataatataactttctaaacattggtaaaaaatttatgtcaaaaagttttgaaatttctatgcatattttatttaatacctagtgcttattatctaaattcaatttaaagggaaaagagcagttactgctggtcaaattgaacatttgcaaaatgatcg

SEQ ID NO: 25588 - DNA, 1635 bp, Heterodera glycines
catgtgtaagtttaacctgccagacagggaaactgcgttcggctcattacaccagctataatttacttgaccttgacttcttacttggataactgtggtaattctagagctaatacatgcaccaaagctccaatctccccagagcggagcgcatttgttcgccacaaaaccaagcgccctccgggcgtccagtgttgactcagaacaactaagctgatcgcacggtcttgtaccggcgacgtgtctttcaagtgtctgccttatcaactttcgatggtagtgtatctgactaccatggtgatgacgggtaacggaggataagggttcgactccggagaaggggcctgagaaatggccactacgtctaaggatggcagcaggcgcgcaaattacccactctcaacgcgaggaggtagtgacgagaaataacgagaccgatctcttatgaggccggtcatcggaatgggtacaatttaaaccctttaacgagtatctatgagagggcaagtctggtgccagcagccgcggtaattccagctctcaaaatgcatagaattattgctgcggttaaaaagctcgtagttggatctgtgctagccgtccggtgcacactttgtgtgttactggtttggttggcttttctgccggtctttccccggcgttggcctttaccggtcggcgtcggtgggctggcgagtttactttgaacaaatcagagtgcttcaaacaggcgtttcgcttgaatgttcgtgcatggaataatagaagaaggatttcggtccgattttatttggttttgctgaccgagataatggttaacagagacaaacggggccattcgtattgctacgtgagaggtgaaattcttggaccgtagcaagacggactacagcgaaagcatttggcaagaatgtcttcattaatcaagaacgaaagtcagaggttcgaaggcgatcagataccgccctagttctgaccgtaaacgatgccaactagcgatccgccgacggatttattcgccctggtggggagcttcccggaaacgaaagtcttccgcttccgggggaagtatggttgcaaagctgaaacttaaaggaattgacggaagggcaccaccaggagtggagcctgcggcttaatttgactcaacacggggaaactcacccggcccggacaccgtaaggattgacagattgatagctttttcatgattcggtggatggtggtgcatggccgttcttagttcgtggagcgatttgtctggtttattccgataacgagcgagactctagcctactaaatagttggctcattgcttctgtgggcacaacttcttagagggattttcggtgttcagccgcacgaaattgagcaataacaggtctgtgatgcccttagatgtccggggctgcacgcgcgctacactggcaaaatcagcgtgcttgtccttccccgaaaggggttggtaaaccggtgaaaatttgccgtgattgggatcggacattgcaattattgtccgtgaacgaggaattccttgtaggggcgagtcatcaactcgctctgaatacgtccctgccctttgtacacaccgcccgtcgctgcccgggactgagccatttcgagaaattcggggac

SEQ ID NO: 25589 - DNA, 2034 bp, Heterodera glycines
acccaaccattattttgggaaatatatgatagtatacaaatgaaaagcccgcctgtacggatattttgtctactggcattcgcctattcacctcaaatcggacgtttcgtcaacaggacatcttgcttatacttattattatttttataaaaatgataaaatctaaaaaccaacttttggtcaagaaaaaataaatctttttgggaattttgttaatttacaccggtatttatgaatttttttcgttttattgcgtttttgttatataattttgaaaatgtcggaataaaaataggtattttaaaatgggcctagaagctccaaaatatatgaaaaatgtgtgtgtttttcgtgttatgttggcgaagcgtccgattttggattaataggcgaaacctaagttttttttgttagtagttgaaatgccgagtaagcgagatgtcaagtaggtgaaatgttcgattttgcctttgtgggccaaatgtcatgtaaccaaagcccacaatgctataaaaatcttttttgttttgttgtaaaaattgcatattttttttcaattcctttgtatgttgttttttttttttgtattttttcttgacagaattagttactttgaaactacaaaatcggcccgcacgcaagctctttgtaattattttttttcgcagggaactcaacaaaacgccatacaaatgtgtatgcgctgagaaggataaggacagcgacgaagcagagaaagaaaacacgggctggcattgaaaaatttaccgtttgaatacctcagggcttcgattgaaaaattgttaaaatcagaatccaagactaaaaaaatcagatttaagatcgaaaacagaaaatgatgactttttttttacttttcattttatctttttgttttctgtccgctatatataaaagatttttgagaataggtggagtcggaggctgcgccaacaattttttttgaaattttagtcattttttaatttgcatcacaaattgccaatttgggcaaattttaaaattaaggattagtttgtgaactataccaataaaaaatcaaatttaatgattgatttatgaaatcagaaaaaaaaattgtcactgccccaaatacagaacatttctgaccagaacagagatcgaagccctgcaataaaaaagaatcgcttttgatttgattatttattcatacacccgacattcacttaatgaagatgaattggaaatgaaataaattcttttttttaatttttaaagctttggcatgagaaacagagaatattttgcattttatgactagagctcggaattttcaaatttgcggatccgcatgtgggattagaattcaaaattttgcgggacgggatccggcagggactaatacctcaagtcccgcatatttcgaaaaaatgcgactttgatgacttggatcccgcaaaatcccgcgcgggatccagtcccgcaccgggcgggctctagtgtacaatgtttttccaaatatttcttttctgtttttgaaaaaaagaacttagaaatacaaatttgaataattaaattgaagagttgacaataattcattaataaattttaaataccaaaattcaaacaaacaaaaaataccttttaaattatactgtcactaaaaattctgaacccttttttcaaaaaccccgtggggctcgctccaaaaaatttaatcaataaatttatgaaattccttttttgtattattaatagggttagacgggtccgggtatttgggcaaaaaccgggtccgggtattgcctggtccagaaaaaccgggtccaagtttttaaaccgggtccggggtcgggtacccggtaaaaccgggtattaaaaaaaatccaaaataattttttttttcaaattttttcaagaaaataaaagcttatacttttaaaaaagcatgaaaaatataatgttttacaaataaacgctttattaattgcccaattatttaattgttatttaaccactttttttggggtgcgctttttcgaagaacttttc

SEQ ID NO: 25590 - DNA, 1412 bp, Heterodera glycines
tctagagtcaaatggtgaaataaaatttataaaatagagctaaaaacccgcggatttttgtagcattttacttttcctgaatatcttttcagaagcgagttataaatttttttctgaaaattcgaatttttccagaaattctggaataacttttttccttttttagatagaaattccaaataaagtccataaaattctcctgatttttctctatttttaaggctttaatcctgtaaaattgatcaacccttcgatttgttatgaatttttaaatattaggccaaaatcccgagggccaaaaaattgccaaaaaataaaaaatttttaaaaaattccaaaaattctgaaacgtaaaacaaacatcagattcgtgctcagcacatcaaaataccccagaaaaatatttttgacccccattttcaacccaaaaaaaatttccgaaaatttctagggggcctagctcgaaaaattttgaaaatttttgaacatgtagtacaccattcgatagcatttaaaatgctctacaaaaatgttctaagacaatttttcgctaaaaccaacccctaacgagttatggacccgggactcaaatgtcccgctcaggccaaaaattttttctatttccgggaaaaaatcgaaatttttccgaaaaaaataccagtcgatagagctcgaaaaactatgttttggaagtggtctccgtttctctgggaaaaatcgttaaaaaatcctaaaattcaaaaacccgaaaaccgttttttaggcctaactcgaaaaattttgaaaattttcgaaattttaaaaattgcaaaaatcgagctcattgagctctacaataagtctgctggccaccctgcgctcaggtcaaagcctaatgagttattcaacggggactgaactggaaaaagttggtactgaatttttagccaaggctacagcctcgggagcccaacgtagggcttagggttcgctggcaaagttgtcgaggacactccaacttgggtccctcccagcgggaattttttgatccgagttttagaaaaaaagttatgggctaacaaacgcaagaaaaagtgagaaatcggtccccgggactcagtcgtccgcgctgaatttttctctatagttttcccggatgcgcctcaaaaagttgtaagacccttccactactttcagggcgctcccggccttcggccgggagaaaatggttttagcaacgaaactccttgtcaatataacgtatatattaaactagcgtgtcgcgcagtaattgctcggtgtagacagtatacttctggtatatatgggcgggcgctgacatgagcgcttcgcgcaaaggacttcgttgctagtgcatgcgcggctgccttaatcgatgcgtgtatgggaacatgcatggggcacccccaccc

SEQ ID NO: 25591 - DNA, 843 bp, Heterodera glycines
tttcactgaaaattagccaatttataggtaaaattttgaaaaattttatagggaatttaatccaattcttaggggtgtaaaagtcgcttttcgcgccaaaaagcgaaatgcgaaaagcgaaatgcgaaacgccaaaaaatgcgaataatgcgaaaggcgaaatgcgaaaagcgaaacatcggcccatccctgcccggcactgttcaaaattcgctttccgcttttgtcaaatgaggaatttacgaggaaaattggtaaaaaaataagtcaaaatttcaaactcgttttctgatgagatgccgtaaaatattcatagtttttgtggcgatttttaaaaatgtttttaaaaatttatttttcaataagttaatacatatttacagttcccttcggtgttttgtcaaaagatgaagtgatcgccgtttatcagttcaaatcccttccaaattgtcatgggatttccgacggaattttcccaatgccattttcgactaatggacggatttctgatcgaaaaaagggcacacttttgatggacattgaaaaagtgtcagaatttgcacgagaggaggttgagagcagtcggtacagcgaaaaagtgtacataaatggattaccatggaaaatattggcacaaataaaaatgaaaaatggaggcactgacaatgagaaatggttgggcttttatctttggtgctatgctccaaaagaaggtgcaaaattactaataattaatatatatattaacaacaattaattaattgatattgagcagaaaattggagctgcaaatgttcggcaactcttcgaattgtctctctaaagagcggagtgtcggatttc

SEQ ID NO: 25592 - DNA, 1584 bp, Heterodera glycines
  unsure (1)..(1584): unsure at all n locations
tgcgctctgatcgaagacttctttccaccttcctgatcagcccccgccagcaattctaaccaatttggtggtgccatcgcaagcggtttgtagccagttgcgcttaaagcggcacgtgcaacgaagcacatttcgacgcatttttcgagcgctttgacttggtcattttcctgtgggaatttcccggtgccaacataatcccctcgcttctctgaataagtggccatttccatttgtggtccacttttaatgatcatttcgacgaatgttcgggctgcggtgtttgaagtgactgtgccggagcgaagcagaaaaacggccaaaagagcttgaagcggcgactgtacgatcatggcgcctgggccagactgtccaagaacagggtccaattcgcccaatttcagagtcgtgcagagttcgtgctcggcatctttttgactgcaaaccgaagtccaacaaatcccggcgtccgtttgcgtttgtcctgaaaaattcgcctttctttccctttttaccttcaatttcaggtttaggcaattaactctgagaatttttgcactacttttttcctttccatatttatccgcccccacacattctttagcaattgtccccaattgccaattttcggtcgcacgttttggcatattttcaaaattcagttgggccgaaatcatgaaaatcattgcatttagcacatttttatacgggttttttccccgtggtaatgttgcgatgtcggggactgcctttggcacttttatgagtctttccaaaggaacagtaatagggtcagcagctgttttatcaactgggactaattcggcggacgattcggagatttttgtaatggtgtaagggccaaaatgattccacaataattttttatgtcgtgaattgcgatgcattccgggaaaagccaccataactcgttccgaaatttcaaatttattggctttcacttgaggttttgcatcataccaatctttacttcttttccggtactcatccaaattttgtttggcctcattttgaatattaaggaggttttccaaaaacaattgaaaataattttcataatcaattgtgtataaggggttaaaattcatttcggtgatcttatccatcggaaattttcgctgatctgccaaacattaaaagaaatggtgaaaaacccgttgactcggatggcgttatattgtaaccaaaaactgaatataaaaatcgttcgtcccacgtccaattacttgctggaaacttttttaatatttaaatcaaaactccatttactctttcccccaaaccggttggcctgggggtcatacccagccggaaaaggccctctcaaacccaaaaatttggtttattcttttaaaaagggggtcataaattcctttcctttgtcggantnaatttttttcnntcnttccaaaaaataacaaaaatttttcnacaaatacttttnctacanaatctnctnatttattcnntattgnttcanccaccaagtacttntnaaatnatcnataataacacaannatatanctagtggaatgacgtgacttggcccannacgtccaaaa

SEQ ID NO: 25593 - DNA, 1115 bp, Heterodera glycines
ttgattttttttggacatttctttattaccaatgaaatgattgtctagagaatttagaaatacagtagttaaggtgtttccctccagcccgcttagaaaaaaaaaaattaaaaattactagggtaatacataagtagggttgcgattttaatgaagaaaactcgaaatagtttttcatgaaaataagcaaattttaaattttctcgcatgagagtcgatttcaagtacgcacttgccattcaagtacgaatccatgctatgcgctcaacattcaaatcaaaaacaagatttcgtgcatttgaacgtgcatcgatcggtgagaattacaaaattcggaaaaaaccctaccagcagagctcgtttttccacgatagcttttttctttggcatccaaatccaacaaatgctctattaaccttaccaaaatcgaaaggattatcaagcctggaaaaattttattaagaaaaaacttcaaaaatctcgacttttttaggttttaactaaattttttgctcaattgttttgaagaaaggagctcaaaaaacgcatttctgcattaaaaattttcgaatctgatgtcattatcgttcactagaaatagaaatcactattttggcattttgtcactatttcgaaattttttggaaaattccttaacaaaaatgcaataaaaacaaaaaaatacacccctaagaatcgacctaaaaattttacaaaaaataccagttagaattggaaaattttcataaaaatttttccccaaaatttttcttcttgacaaaatttttggtttaaaatttcaatatttgctaaaaaaattaagaaaggaatgtacctcatttgtaactgcaactagtgaataaagattttttttgcttaatttttggttgaaaattatgtcactattcatcactatgtattttggactttttgtcactattttggcatttttgctcactattttagttaactaattcgagatttttggtcactaaaagtcacagccctattcattacccacgcattacccacactatattttaccaaaatttgtttgactcttatttcttacagagggtaattcattttataactaagtgaatttgataaattta

SEQ ID NO: 25594 - DNA, 1184 bp, Heterodera glycines
  unsure (1)..(1184): unsure at all n locations
atcagcccacaaaagaggtcactaaatttgtcttccaaatattattatcaccctctctcatagccaccgcggctcatcgttaagctttagcgtgcttcntaatttctctggagctgcgatcagcccacaaaagaggtcactaaatttgtattccaaatatcattatcaccctctctcatagccaccgcggcacatcgttaagctttagcgtgcttcttaaattctctggagctgcgatcagcccacaaaagaggtcactaaatttgtcttccaaatataattatcaccctctctcatagccaccgcggctcatcgttaaactttagcgtgcttcttaaattctctggagctgcgatcagcccacaaaagaggtcactaaatttgtattccaaatatcattatcaccctctctcatagccaccgcggcacatcgttaagctttagcgtgcttcttaaattctctggagctgcgatcagcccacaaaagaggtcactaaatttgtattccaaatatcattatcaccctctctcatagccaccacggcacatcgttaagctttagcgtgcttcttaaattctctggagctgcgatcagcccgcaaaagaggtcactaaatttgtcttccaaatataattatcaccctctctcatagccaccgcggctcatcgttaaactttagcgtgcttcttaaattctctggagctgcgatcagcccacaaaagaggtcactaaatttgtattccaaatataattatcaccctctctcatagccaccgcggcacatcgttaagctttagcgtgcttcttaaattctctggagctgcgatcagcccacaaaagaggtcactaaatttgtcttccaaatataattatcaccctctctcatagccaccgcggctcatcgttaaactttagcgtgcttcttaaattctctggagctgcgatcagcccacaaaagaggtcactaaatttgtattccaaatatcattatcaccctctctcatagccaccgcggctcatcgttaagctttagcgtgcttcttaaattctctggagctgcgatcagcccacaaaagaggtcactaaatttgtattccaaatatcattatcaccctctctcatagccaccgcggcacatcgttaagctttagcgtgcttcttaattctctggagctgcgatcag

SEQ ID NO: 25595 - DNA, 1336 bp, Heterodera glycines
  unsure (1)..(1336): unsure at all n locations
attttatctttttgaaatagtctcgacaaaaattttcatgccttgagcataatcacatcaaaacttagaatttaccattatcgataatcatcaacataagaggaagcccaaattttaaccaacaaattaataaattactgatagagaggcgatatcagtcagcaggaagagttaattttaatgcccaatcactttgtcttctgagaaatctcccgagagtctcgactccatgtcacgtttggcatgggcacaaatacgcatttttggctgtgagtgctttgattgtgccgactctcattcattgttgtcacaagcagcagcagcaaaagcattgtcatgtgctcccattttagctttgcttttctgctgctgttagtccgccattgtccgcttccaactcgcctcgattagatctttttcccgttcaccgttcatctccggaacagagcaaatcccctcatttaatttaaccggtttcttttccctccgtccgtccgattcgggtggttgaggaaagggctgagaaagcgatccacgggggaggggagacaatgcttggagcaaacaaagcgctgggcgtgggtgggtggcagcatggggatgccatcctcgcccacctctctccttgctgccctcaccctcacgctttttatatgttcagcggccctgaaaacggcatgacaaattgatgccacctatcgctaccattttttgaataaaaatttaaattcgattttttgaatttaaaaattataaaaaaaattttttgtatgaaattgctttcattccttcccaaaaattattgtaaacaagttcatcttttttgcatttctctaaattaatttaactcttcattctgaatttggtgcctcgttttttgctttttctccctaaatgcaatcgttgtacaaaatccggctttttctttgcgcttttcccattgctttgatgacggccacctattgtcggtacacttaacagatgcgtaatgacaaaactgtcccaaaggtacttctttccctccccccccccaaattgggttcatctcatccaatcatttattcttccatcctccttctgtcacaatgttcatttgcattttcttccatcaacttcgaccatttttgtgcaagaaaatgcccattatccaattctcctccatttgaatccattccgccaccaccagcacttanaattgtgagtgattgagtgtattttttccaatggaattntcatttttaggaaatcantaaaaaattanacaaattgtcattagtangtcattagtatggaaaagaattatatggatataaaatcgcgaaatatgggctataaa

SEQ ID NO: 25596 - DNA, 802 bp, Heterodera glycines
tagtactatctcgtcgtttctctttttctttataatttctctcactctggcgtactatctcttcattttaattatgtaaaaaacaacatttacttctctttaagaaactttttttcccgtcaatagattttctttaaattttgcttatcgatagagaaaaaaattacgaacaaaatgtaaggggttttaagagcaaaaaaaagggttaactaaaaagttatggagtgattaaaatttttgcatttcctttcctctcgtgttggcgtactattttcacatctctaacacacaaaaaaaatcaaattcgtaaatgctaataattttggttataaggatacaaaatcactttgtacatttagaatcaatagagaaattaatagttttagcatttttggtgaaaacagcagtttaggacttgacttataacgtgataaaaatttgaaagtatcacaactttttttctgagatgtcaaattgcttagcattcgcttagaaaaagattctccttttcaaaaactttttttagataccaaatttgttcagtttagttgggaatgaagtgagttatggcagatcaaaataaaaaaatacaaaaaaggcatttttcagtgtaaattttgaaatagcgcgcaaattacgccaaatgcgctatttggcgttatgagcaattttgtctgacactggggcgtacccatagtgcagtcataaattcactctctgctgatctctctgccaatgctaaaacaattaacaattttccgatttattcatttttttttatttttgtttatttcttttattt

SEQ ID NO: 25597 - DNA, 914 bp, Heterodera glycines
cccagtccgcaatcccgcatttttttggaaaatgcgggatttgcgggattaatctcacgggattccgttccgcaaaaaaaaaaaatgagttcaatcccgcagcgggatccgcaaatttgattttttgtgcgagattttattgttttttttgaaaatttttctaagacagaatgccaaatatttttaaataaattaaataataaatttaattaaagttaactcatttttcatcgcaaatttcattcaaaatttgtgaaatttacccggcgacgcctatcggcaccgccggataggcttttacttaataatcctgtagaaattgagtcaaaaactgcgtcatttggtcaattttagacaaaatctgtaaacaaatcgcattaaatttcataaaatttctcgcagatgtcgataggcaccaggtatagcacggaaagacttccggtttccgacatttttggggtcggaattccgacttccgaaatttttgatgaaaagttggaaattttttaaattttttttttcaaaaaactagtaagttttctacatttctgttatttttaaaatttcccggcggcgcctatcggcaccgccggacctaaaaatccctatttttcttgcaaaatttgctcaaaaccgcaaaattttgtaattttttggacaaaatctgttaacaaaattttcccggcggcgcctatcggcaccgctgtaccctcctctaagttcccaaaaagtttttgaaaaaatcgcgctgtaaaaaacgtgtaaatagtcactccttttcccaaaaatgttctaaaataatgaaaaatgacaaaaaaagattttgataaaataattgaataattttttcaagcgaatatactaaaaacatttgtgaaataccttttacttggttaagaattaaaaaatttagc

SEQ ID NO: 25598 - DNA, 1712 bp, Heterodera glycines
  unsure (1)..(1712): unsure at all n locations
ttaattttgtattttttattataaanatatttattttgtttaaagaattgttgatataaaaaaaaccttttttaggtaatacttatgggtgtccaaatgggatatattattaacctcacagagttagttacatttgtcgtcgtaggtctaaaaagtaaagcacatatgttaaaataattttttttttggataatttttttggaaataaaatatttagaaaaaaaaaattctgaaattcacctatcggaaccgccggactcttttctactaaaagtctttagaaaaacgcgccgcgaaaaaaatttaaaatttcaagaaaaatattaatattatacaaaaatattcatgataaaacagaaatataaaaaatataaacaaataaaatgattattatggaaattaataaatattttttcagagtgatctgatcaatttattgcaaatgacttttttgatcagtacacaaaactaagctaaaatgaatttttttagattttttaatgctcaactcgaaaggttacagtcttctaaaaagtgtctctattctaatggaacaccccaattttggaaaaaaattcgtaaaatttttttccgacatcctttcgtattcttattgttagaatcttaatattttcagaattgctatatacagttaaaatttcaaatcgatcggttcatgggaagtggtcaaactcccaaaaaatagggtgtctttattataatggaacacagtgtagttaaaaaaataaatccaaatttttagtcataaagtgtaatttgagtcgccatatgtcaaatcctcaaatgtcgtgtagcgaaaaaaggcatatgcctcaaaatactggctctactaataacataaactcattttaattaattggtccgttttattaataaattaaataatttttatttctataattcatagatattatttttttaaattgtttttttttatttgtaatataaagcaaattatctcaataatgaattattttctttatcgttgattgaaaaaaagaatgatattgattcgagaattaaaatttacttaaaaatgtatcctttttatgtgaactatgtgattatcgaaatgagaaaacataaaaagaacaaaatttgagattataaaataattataattattcggattcattttgatgaaaaaattttttccaattttacactcaaagggttttttggcggggattttgaaattatgatttttggtcgcttttaaatttggatgtgtacataatttttgaactttcctaggtttttcttcattgatgctttatctttggttaatttgttgttatttaggataatattagtgtgctctttcagaatatgctattggttttgctctatcttttcttattaaatagttgttggtagtggagttggatgataatttgattgaccaaccgttataaaatttgtcatatctcattgttaatttcttgttttttttttgccggacaaagcttaaaaaacatcatgtgaaaatctgtttagaaaatttaatctgaagcaattttaaacagaaatattggcatttatatttttgtccttttttcatttaaggcataatatctcgaaaactgaagtcctaccctatatttttaaatagctcattttgaagccgtttaatagctcatttttaagccgttttcgagctctatcgatctaaaaaatgtatatatattata

SEQ ID NO: 25599 - DNA, 1744 bp, Heterodera glycines
aaatttaggttaaaccctaaaaattacacagccctaggttatatagatttgaaaattaaaaaagaatgttattgtattaacatattaaaaacatcttgtttccaatggccatatcggaatataaattaagaataattaaaaaaatattaaatatttttttatttataaaaaagaataaaataatcaactttgtccaagtgtatttcaactaaataataagactctaatggaaagacagactcttggagactctggaacatcaacatatttgaattgaaaacatctcctgcatctttatttttaatttttgacatgacagtcaccctaaaatcttttttcatttttcaacaatcgaattccgtaatcgtgcagtagccgggttcttaaatatatagacccaaaaaatataatttaatgaacatagcaaactttgattaagtattctttccaaaattagtaaaaatgagtaaataatatgaaacgaggatgaagtcattactattataaatcttagttatatgttgaaataaataaatattaacgtaaaaaattacgataggtgcaaaaaagattgcgtccaaagctcgcaaaaacagaaacacataatcattttagcggtgtaatagctcactatgatttaaaatccggaatgagaaaacaccattttctctcatattatttatgtcttttttcagttccactggcctctgttgaatttaatttttcccggctctaaaatgcatataaaatttatttattttttatttaaaaatagaaaatttttatttttcgctttttaaaaaaatttaaatgcaaataattgcttaaatctttcgaagggactaatcccttttccttaaaattcacttatctttacacttaattgcttctcttttcatggtgccatagatcttacatacatacataacaatgcataaaccaattaacgaggtgctaattaagttgttcaaaacaattcaaaaaattagattgtaaacaacccaattaatgattgggctaattagtttaatgcagattagcaacctttaggctccccccattttatatgatatatttttctgtacatatgcacaaaaatggcaacatatttatatgtaatagtcccactgactacatacattatgtaaattatgcaacaattaattcacaaatccattttattagtcagccgattgttacgtaaatttacgtaaataatcccgaaagagtgcctttaattcctatcataaaaattatagcgatttttttgatttaaaaaatgacttataatgtaaattttcttttttgatctaatttttaatttttcaattaatgtaatttttaaataacaaaaattaaagtgtcattcaatgatgggtaattaatgaattactaattgggctaattaggagtgtgctctcttcgatgatcgatgacagttgccatttcttggcccgagtccaaaaacatatagtattcgacgagcttagaagaaggaatatttgattgatttgaggatgattgtttcccaataaaaaagcccaattaaaattagctaaatttattcatttgaaagcattgatctcttttggcgcattgatttttggaaaaaaagattaaaaaatatatataaattaaatctcctaaaatcataaaaaaacatttttcttatttttcaattcttttcgcgatatgactaatgtcccctataaaaatttaaattgcccgcttcaaataatttttt

SEQ ID NO: 25600 - DNA, 1011 bp, Heterodera glycines
aaaaaaatcccagaaatacgaggaaagatatgcttggtcacaataaaataaaaaatggctagtatgtaaaaatttgcggtcactaataaaataaaaaatggctaatatgtaaaattggcgtccagaaatttttagactaatccgaagcaaagcacgaatgaattaaagaggcgaaagaattcacagtatcgtttctaatagggaaatattgacaggatattcggctaaaaacgggtttgatcatttttagcgcatttttaggtatacatttgagacaattgggcaggacaagaaaagaatgaagttgatgcctcatgaaactcggaattggttatgttttgtcgaaaatatccttacataatactcataaaaatacaaataattcaacccacctattctatgaccacattctgaaaaaaatcccagaaatacgaggaaagatatgcttggtcacaataaaataaaaaatggctagtatgtaaaaatttgcggtcactaataaaataaaaaatggctaatatgtaaaattggcgtccagaaatttttagactaatccgaagcaaagcacgaatgaattaaagaggcgaaagaattcacagtatcgtttctaatagggaaatattgacaggatattcggctaaaaacgggtttgatcatttttagcgcatttttaggtatacatttgagacaattgggcaggacaagaaaagaatgaagttgatgcctcatgaaactcggaattggttatgtttagtcgaaaatatccttacataatactcataaaaaatacaaataattcaacccacctattctatgaccacattctgaaaaaaatcccagaaatacgaggaaagatatgcttggtcacaataaaataaaaaatggctagtatgtaaaaatttgcggtcactaataaaataaaaaatggctaatatgtaaaattggcgtccagaaatttttagactaatccgaagcaaagcacgaatgaattaaagaggcgaaagaattcac

SEQ ID NO: 25601 - DNA, 1846 bp, Heterodera glycines
cttcagttgcccgtcctttctcggagtgtgcaaccatttgaacaacacttggctagcagaagctacattcggctcatcatcagcaattccatgaagaaacagatattcgaaatagattgaaatcaattgatcaagatcggcgagaattgtaggcgaaattcgacggcacagagggtcaaaatgttcggcatcggtaaggctcagactacgaatgcttggtgcaaaaattggccaaatttcacgcgccaaaacatcccatttgggctgtttatcatcaatttttgtttccgacattggcatttccaaagtggcgcctttgctgtcccaaatttgtttgttggcacggagaaatgtgagcacagtgtggtcaatgtacctgaagaatatttgctcaacaaaaaagcatatttttatataattggaacgaaacaattaacaaaagcatttctgagagaaaaaagcacaacaaattgagatcgatcatttctcagatataattaattttcattgctttcatccgcttcttcttcttccgctggcagcgacaatggcctaaaattatttttattttttcaacaatcaaaaattgcttttgctgctcacccaatgcaactatttccaccccacacctcaaataggatattgttcaaattggcgcccgaattattgtcatgccgaagttcaaatctgatatagttcaaattggcacccgaattttcacggttttcccacttaactggcgccgtcgccgtctcctcaattgggcaccgttgcaacagccaattaaccaaattgtattctttgctctgtttcaatgtcagcttctcattggtccgttcattcaccaattcaaatgattcaattggcattggttccacaagaaaataaagttgaatattgtaactgacagaagtggtggcacggcgaaatgtctaaataaaaaattggaaaaaacaacaatttatagaaaatatggctagacacacctctttgaagttgttgacccattcgagattcagtggacccaacaaattattgcgatacaatcgcttcggttgcccattttttgtcggagtgtgaagccatttggccaaaacttggccagcatttccatttggcccatcatcagcaattccatcggggaatagagcaccagaatcaattgaatacaattgatcaagatcagtgagaagtgtcggtgaaatgcggcgacgcaatttgtccaaataatcgccatcgtgaaagccaaaatggcgaatgcttttcgcaaaaagtggccaaatttcgcgggtaaaaacatcccaaatgagcttgacgtcggtcatatataaaggcacaaacaattccaatttgatgccacttctgtcccaaatttgcttgttggaacgaagaaatgcgagcacagaatggtcaacgtaactgaaaaggggaaaaatgaagattggttttctgtataatttttgatttactaaatctgaaggtccttaaaacggattttgttgggcaacggatggtcgggaaatggaaatgccacgcatttgtcatcgatcagaacagacagtttcgcttttggtccttcgtcctttacaattttgattcttctccaaattgtcaattccgtttttccatcaaaatgtttgtccactaaaaagtcgaaacggtcggaaatcagtgccattttgagtccgagttggggacggtcaaaagatggcagaatgtccatccaaacgtcgccacaaatccaactgaaacaaggaaaaaaattgggtagacaaaaattttaatttttcacaaatttccttaccgtcgattcattttggtggctcgattaccacgcttatccctt

SEQ ID NO: 25602 - DNA, 1810 bp, Heterodera glycines
  unsure (1)..(1810): unsure at all n locations
ttttatttttctttaaatatttatttaacnntntcagctcatnaattatgtaatgatttttatgtccgccatcatttatttaatgattttcttataaaataaatgtaccatccggtcggaaactagtcgtttttcaattcattagatacttttttttgtaaatatgctcagcagcatttttaattttttaacattcagtgatttgaaaatccatttgggtcacgttttaccattttctagattttattacatttaaattttttggattattcttcttttttttatatttacctcttttaccgatgaaaagaagtttttttcacatagataactgttttaaatgttttattttggcccttttttagattaaaatttatttttgtaacaattataatttcgtttaaatttcaagccttaagtgtaatgtttaaactatacgtaatatttgtttcttataaatttagtttatttaggtttatttctgaattactagtttaattttgataattataataaccaaattttttcaccaatcgataatcattttataatctgacaaaaaaaatattgaaatattcttttttggaaaaatcgacaatttgattctatgcaaataaatttctgttatcccgttaaattttttatgtattatttggttataataaaatcatagaaaatgtaataaattaataataaattttcaaaaaaaggtaattttttggacaaaatcagttaataaattgacaaaattttcaagaaaatttcccggcagcgcctttcggcaccggtggactgcctgttcctcaagagttttttaaaaaagcgcaccgtataaaacaacttaaaaagcatcgtaaaagcattaaatttatggattgatcccataaacaatttggaccataaagtattttgaagcccgttttaaaggcgaagggttattttttcatacatttttaaaataatttaaaaatataggactttttgttgtcagtttggcagcaaaccctggtcgaaaagcacaattcgttggaaacgcgtcaaaaagtttaggctgatattttaaaaggttgcgtcgaacctagcgcactaaaatcgatataatctctccaaagtttgcagggcttctccattgcagaggactaacttaccctgaaataatgccaacgcttgttgatgttaaaatttttcgaaattctgactttttcattaatcatttattatttcggaaaagtacttcataaatattttttacaacgcgctctgaaacgctccaaatgttaattaaacgacaaataaggctctctgatgctttcactatcgaaaagggagatgaataaaaaatctaaaaatttttaattggtttttaagtttgcgaaagattgtaggcttatatttttgagagtctcatcgaacctagcgcactaacaatcgatataatctctccaaagtttgcaggacttctccattgcaaaggactatgttaacctgaaaaaatgccatcgcttgtcgttatttacatgtttcgaaattctgcctcttccgttaattactaactatatggcgacattcattcatccatactctttacaacgtgctctgaaacgcaccaaatgttaattaaaagtagactaaggtctctgatgccttcctttcaaaaagggagatgaataaaaaatctaaaaatttttaattgctttttaaatatgcgaaaaattttaggcttaactttttttttataaactgatcagaagcgaaccagattttgcgagggcatcaaaaagacaaggaaaagcactgctatgatgctaac

SEQ ID NO: 25603 - DNA, 1904 bp, Heterodera glycines
  unsure (1)..(1904): unsure at all n locations
agtcatagtgacttggggtcttttgcatattgtagagcattttgtgctctttcagatgcatataatgattttttccaggtaattttaataccattaattaaatattttaaactataaaatttaaaaaaaaccaaaaagtgaaaaaatcaatcaaataattgaattccatgaaatgtttattaagcacttgatcgagtgcacggaacatcagcaatagttcaataatttaattttaaaactaaaataagaaaataattccatagcccgccaaagtagtacaaacaaatcaaactaggttgctgccataaaataaaactaatattataaatgaagctgcattggtataaaaaaaaattaaaattaataaatataatgatattcattttaataaacaactcttaattatcgtaataccttaaaaactatggacaagtgacacaaccagccaaccagccgctcaagaaaaactaaaaaatcaaataattttatttaaataattttttctgcattttaacttcagttttattttttggtttcaatttatataaaaatttttaatatataattgttttataaataatctatttatatttaattacagatgttcagccaacatgaggaactgcatatatttntattaataaattatatataaaattgtttttatcttttggtaaaatgtgagcttatactttttttttattagagccttatataaaatttcaagctagtctccatttgtttgttcttagttctgcgtgtctctgacatggtttattaaaaaaatacaataattttgaattatttgtttttaatctttttgtctccttattgtgttttctgaaagaaaacccatgaaaaacgttttctatatttgttttcaatttcaatatttttatacatttccaaattatttttctcaaatttttttgattcttcaatgtaatatttttttattgttttatttaaagtttttaaataacaaagaaattttaattttgccatttttttatctctcgcacccgaccatatatctataaatttaatatattattttttaaaaatttatttatttgtaattacctatattgaattaaactattactccagtagtctagttgaacaaccattaattaatgcttagtagttttcttactaaaacataaatgactacttatacataatttggctttgcaagagaaatataaaaaagaagaatgaagcttttgaaaaaaaagaaattatgaactccaatgagtcgagcgagaattatacgattaaaaacaagaattatagcaaaaaataaatgttattaaaattttataagaaaaattaaaagttaaattctatggaaaaaattcaaagataaaattgttttagatataaaaaagaaaatcaatttattatataacttcgttgatagtaaattctagaaaaagcataaataaacaccaaattttaaaatcatgtattatgccttttacaacattttcaataagtaccatatgggaaagtcttatttaaattaaaattgcaccatattaataaattaatgcaaaataattaaataaatatctattatctatattctatgaaattaatgactctatcccggtaatgtacttctttggaggagttgcacccaagcatgtgaacaaaatttaattttcaaattctaaaagtaattattgaaaataaataaataaatgttccttaactcattaatcaccaaggaacaattgttgattttcgtttagtaaattactgcgtttttacgagtataattaaaagcaaaacaaagaatttgacattaatgactttttattgcaaaataaggtcattgtaagaaatgtaaattttggataaataatataaaaagaatttttttttgcaantataattat

SEQ ID NO: 25604 - DNA, 1778 bp, Heterodera glycines
aatttgacaattcataattctatttttcatctgattctctttattgttaatatcataaaaataaaggtcaagatcgattttcaaagttgcaagtactgttttactctaatttacaagcaaaatctaacaaatattatttcaaataactcttcttaattttttatagtttgatattttcgtcatcttcgtgttttgtctccgttcattttcttctattataaattgagagcgaaattatctttatatttctttattttttatccttaataagtgtgaatatgagttttcaattaatgctctttggaaggctcaattaagttgtgcaatcctatgatatctccatattttatcactttctctaattatacttgttccacaaaaattcccaattaatcactgattaatataagattctgtggcctaaattaatacatttttaaaattcgattataaagtacaattttactttgacgattatgcttttttcgattcaataaaccttacaatataagaaattaacaaaaatacacatccgaattattatgtttatattcttcttatttgggaaaagatcggagacgaaggggcaatagagagagaggcgtcttcgtaaggcaaaataattaaacaatttctaagattttttcaaattaaagattaatgttaaattttcgcccattccttttatttcgtgaatttatgaacaaaaattcataaaaaatttactagataaaattttggaaatctaaggttaaaaaatttcctcagagggtgccaaaaaccttcattttcattaaaaaaaatggatcaacatcgcaaaattagatcattttaacgaaaatttttaagaaatcacattaaaatatatgggaaaattttatgaactaagaataaagttgacttcataatctttcgtctccgaccccccccccccttaattatatttactcacaatggccaattgtgtctctaacattattgctttgattttaaacattaatttgtaattcgcctctatctgttatgttgctaaatatgtcgttagtgagtgtcaatataatggaaattaatgttttttgtaatgttcaatttgctactgttatgttcttcgtctttgaagactgtctgtgtttattctttagcagttattattgattaattaatgaacacttacattggcactgatatgggggaggacacatattaaagaaattgctaaaataccaagtaaccatggtgacgaattccaacaattttaagccaaaaattccaactgctacaacaacaacaatgcaattttgctacgacaaaacgaaacaaaaacaacagaaattgcgcttttgtattccagccgaactcattaatgagcttctcctttttatggagccactaaaatttttgggcgtaaagcgtttgttgagaataagcgcaattttttaccgtttaattgtctgcagaaaaaatattaaaaattggcgaaagccattctcaattattgtaagtgaaaatcgttatctttaacgtcgaaattatttcccttaaaagcaataagaaaaataaattttatattatataaaaacatgtggcattattattcagccaaattcagttttttgatttctttttattcactacgacttttaaatatttcagtgagaaaactcacttttttgtctttaagttggcttttttaatgctctttttagaaaatagtattttgttagaattaatttgatatagaatcgtgtggtaatattattcagcccccaatttgttta

SEQ ID NO: 25605 - DNA, 1627 bp, Heterodera glycines
aactacttcaactaatttcgaatccctgacccaaaatcgactaaaacagaagtcaaaaacaaatttgaaaaattgatttttgttcacttttggttcaaattcggatctggggttcggaattagtcgaaatggatctcattttacgtaatcagcgaacatgaaaacccctgaattctttttactctccctttgttcgtttgataaaaaaaaatgtccccccattgtatgcatcgcccccccctactttaaaaatgccaaatgttcttatctaagacaacatttttgaagatttttctctatcttttttaagtgttgcggcttttcggttctttaaggttaataaagctttcttagagctttcgaatggtaccaagtttattgaatttgatgacaacgaaaaacatgtcataacccaaaaaataagagctggttgaacaaagagccgaaaataaaatcaaaatgaaaaaacgaaagaattgtttgaggtgacaaataggtaaatcgattgcaacattttgtttatgtgttttttgattcgttaatattcattcaccaccggtcgaaagcagcaaaacaaaaaaaaagtggaaaggaaagctttcgtgtcgataaatttttcaaaaaacagcataaactgcgtgacatacacattgaattagtatggttaattcttcatttttattggcttatcaaatgcttccgtctaatcctgacgacaaaatagatgaggtcgacaagattctttcaaaacttgatgggtaaatacttcatttattcattttttgtgtttattagtattaaaatttgtttattaagaaaaattgaacgtaaaatggaccctttgatgtgtcgccataacccaagacagaaatgcacaaattgtctcccattggacgtaccttttctaattcagaaatgaatattaatttatttatattttaatcaaaagtccttttctctcattcatttttagccctacgatgaaaaatttctgcatgaaaaggacatcaaacatttgtcttttcatgctcatgtgcacaaattgaccgatttgcatggccgagggacgcgttcaaacaatgtgttggagaatgtgtgctgcaaactgcgcccgaactgcgcgggtggccatttgccatacccaaaaggcatttgcacgcgttgccgcccctcaacattgacactcaacagacaggtcatctccattttggccatttaagcgaggaatgagaaaattgggccattaatatcaaatgccaattccgacacaaaaaagaacgaattaatcaaattgtccaactaactggcatttttgcggtggcacagcaaactagggtaatagttaagatggttgcccctatttttgtcggaaattttcaaaatttaaaaagtcctttcaaaacaagtttttagaggttttcgaggtagttgatcacgattctggcatccatttcgcccaatttcgaatcccggacccgaattcgaacaaaaagtcgaaaattcaaattttcaagtttcgcatttttggtctaaatatgacttaacttttagaatgttttcatgtatttaaaccgatattgaaccaaaaatgcgaaatttgaattttcgactttttgttcgaattcgg

SEQ ID NO: 25606 - DNA, 1541 bp, Heterodera glycines
  unsure (1)..(1541): unsure at all n locations
caatttaaattgtgctaaaagtatgtttaatagcttattagaaccgccnaaaaatttgaagtgtgccctttctccaaagcccaagacgctatcttttaccccaccattccgcgtagagcngacaactggcgcccaccttaaaaaatttgcgaaaattttcaaaaattttctgaagaaacttttttttacgcaaaaatttcaaaaaacgctttccaccaaatcgatgcagaatccttaaaaaattttgacgtatttttgaattggaccgatccgagccactttgaagagagttattaaaaaaactgactgaaaaccccgattttcctcttatatagagaattttcgttataaattgtttagtttttttcttcatatcgataaagtattctctaagtgttttctattagcctgcaaaattaaaaaaaattttgttaggtttcaaaaaagttatggccaaaaatgtttgaaaatccgatttattgggtacttttggtcataactttgctcaaacttcgccaaattttttgagatattaggtgagctaatagagaaattagggctatcgaataataccaagaatgtttaatttggttagctttgacaaaagttatcgggcagttttttgttggaaattttcatttgatggttctttatatagtgccctttttgatggtttctattagggttcagccccgaccccgagccccccgacccgacccgagacgttttttggacctattccccgacccgacccccgacatgtcgtcccccgaggtccccggcccccgactttttgccccccgaccccccgacacgaattcgggggattggggactccgagcgttgtaaaaatttaaaaagttaattcaacaacgaagaggggaaaggttgaaaaatttagaatttttttaataaaattgattaaaaattacgaaaaactttccggcggcgcctatcgacaccgcctgcccccaaaaacaccaagttttttcttaaaaattggctcgaaatcacaaaatttagacaatttttggacaatagtctcttaacaaattatactcattttcaaaaattttcccggcggcgcctatcggcaccgccttaccacttccccccaccccaagtttccaaaaaaagttttttgaaaatcgcgcagctaaaattgttcaaatttatgagattaaaatttttgtgcctcgaaattcgattttcagtttctgaaaatttttggagcctgtgatgccttgttataaaatgccaactcaatcgattgcctaatttgctggttgcccattgaaaacttcaaaagactcattttcatgtaaataaacattcgattattagagatcgggtttttagttgctaaaaatccaaaatagttactaaaatagttgctaaaaaagtgcaaaatagttgcaaaaaacccgaaaaaggccaaaagttgcgtaaatagttttttaaaattggaaaaaccaagtgtatttacgcaaaaaaatcccaaaagtaactcatttttgatcaatttcacttgcaaattgcaa

SEQ ID NO: 25607 - DNA, 967 bp, Heterodera glycines
tgcagtggaaataaatattaatggtcgaagtgtcaaccaattggtgggaaattgaagcgaaaagtggttattggccacgggaaacgccaaatgttggcttcgataatatgagaagagcaaatgttggccatttagtcacagaatttgccttaatttacgcgaagagcaaaagttgccatttgtccctcagggatatgagacgagcaaaatttggacatttggtcacagaaaaagcaaaagtttggcctcagggatatgagaagagaaatagttggccattttgtcacagaaaatgcaaaagtttgcctttgaggccgttagggcagaaatgagatgaagggccaggatgagggtagaaataaaatgcaaaatcatgcaaaaactcataaaaaagaccaaaattggctgcaaatttttttccttagtgtcctggcataatttttaattttgtccacttctgattacatttagaagaaagtaatggatgatactgatcaatattttacttttacccataattaaaataaatttcaaatttattactcccaaattcaaatgacaaatattagtagtaatttcatcacaatagtatctttttttgcatttcttataaattaggtcaatttattaaggtcaattggtatgaccgcttttctgagtcctttgtctgttccgggtccaaatggccaattagtacaattggcatttttggcgaatctaaaattaatcaatttccctgataaatcaattaattaataattttaaatttaccattttcaccagcagcatcttcctcagaaaatcagcttaagcaataatgaaaaatgccaaaaagtgaaaatattcactcggttttgaatcaaaacgcccttagacacgccatttaatttgccagccctacttcttcaaatgctagttggcagatcttgcaaattaaaaaaatacgagattttcttttttcttttca

SEQ ID NO: 25608 - DNA, 1137 bp, Heterodera glycines
  unsure (1)..(1137): unsure at all n locations
gaaatttcccaaaaatggaaaaggccaaaggatagagacactaaattatggacagtcattggtaggaccgcccgctttttgaggacaatttggtcaactccttcgggaggccgtgcagcccggacaacgaacgccatctcgtcagcaccacgggtaacacggaatggcggagaagagcaagataaacaaaaaaaacgtatcaaaagatgggattgggtaaaattttggtggtattgtgccagaagtggaagtctctcgattgctctgggtgattgttttcgtcccctcaggcgccccatgccgaatttacaatgccatgccatgccgaacatttcgccacatttgccattcagaagaatgagttgaagccgcgggcaaacaatcggggctgaattgacaaaggtatgtaaggcttggcaaaatggaatcattttggcattgcaatttttatagcaaaatttgtggatgtgaagcaaaggtgtaacagaatggtctcaggaaatatgggaaaagcatttaagcccaagaagccccgcattggcggcatgtcgggatacgaagcccaaaactcgagaaatggacaaaatatggcaattataagcttttccaaagttcaaacccgaataaataggtatcattcgagatctcttaagagctgtgggccagaggagggcatatgtacatttaatgatattaaatgtaatttttggcaatttcgtcatgtttcaaaactgttaaaaaaccagtttaaaggacttgccatatgaatttttaagattttcctttcattttaagttgggttgggcccccgaaatgtcggggttttatgaaagccgtcaattgcacctgaaattagagatcggaccggtcggtttttttcggtatttttcggtttcggtttttaaccgaaaaaaaccgaccgagaaatttttgagtttttcggtttctgtttttttcggttttttaaccgaaaccgttcgaccgaaataattaaaaaaccgaaacaatcgccgacttttttgacaaatcagttggccattttttaacaaaattcattaaaaattcttaaaattttcctccggcggcgcctatcggcaccgccgaccccccaaaaagctatcttttntaaaaaattag

SEQ ID NO: 25609 - DNA, 979 bp, Heterodera glycines
ataagcagggattccttttttatgtaggaaaaatcgcgaaatatgtaaataaaatatgtataaaaaatgctaaaatatgtatgaaatatgtacaaaaactcccaaatatgtacgaaaatatgtaaataaaaatttttttaacggttactttttttggaaaaatttttcgtaaagggtgaaatatgcataaaatacaataaaaatgacccaaataggcctagaatcacattttagtactttaaaaattaattttggtatctgtttttgaaaaaaattgattttttagaggtatatttctcaaaaaaaaaatctaaatttcacaagaaatttctataaattctcaaaatatgaaaaaaaatgaaaatatgtacgaaaaattgctaaattttggattttttggggcatttaataaaaatttccttaaaaaatcctcaaaaattgaaaaatatgtacgaaaaaatggcgaaaagtccaaaatatgtataaaaatatgtaaataaaatatgtataaaaaatgctaaaatatgtaaaaatatgtaaataaaagtcccaacttttgttcgcaaacacaaaaaagaaagtgtttttccaactaattaggctatggagaatccaggaaaaaatatgtatttacataaaaaaggaagccctggtgataagtaattctaaatttcaaaaaatattcgaccatttagcccaaatgattaattgcttcaaataattgaagaaattttgatttgaaaattttctttaatttaatttagctttaacttttggattttattaaattaaaaaaaaaattacttttgtattatttttcttgaaataaattaaaatttgaattttttgattttttaaaatcttttttgaatttttaaaatttcccggttggtccctgttcccggtcccgaagaaaaatcgaggtcccggtcccggcttctcaggtccccaagtcccggtcccggttttgcccaaaatt

SEQ ID NO: 25610 - DNA, 1930 bp, Heterodera glycines
  unsure (1)..(1930): unsure at all n locations
aattaactatccgttactttntgagttattataagttccttctttgcgctaaaattttccccgagggcgatatcgacattagtggtaattatcaaaaacacccattaaagctcataattgatcattaaattttggccttcggcgtgtggtaatcctaaattgattaaaatgccgactgatcaaatcccgttcaatcactttacatattccatgccatttgcgaaatgctttttttactgctaaccagagaaatcacccataaaccattccagccagcctaatggcagcccatcaccagcatccgcatgccgttggcgcaggtggcatttcggcagccggactgctccagcagcagttgcagcagcaacaactgcagcagcagcaacaacaacaacaacaacagcagcagctacaaaatgccacaaacgccgtcactgctgccacacagcagcatccgatggccgccgcatttgcagcgcaagcacaactcacagctgccgcggttgctgcagctgaagcttctcaacagcagcagcaacacaacgccagcaacaacaacagtggcaacgccaacaacattggatccggcgctatggcaactgtgcacacaacactgccaaccgcaacaattgctggaattccgtcagcgaacgcgttgcaacagcagcaacaacaacaccagcaacaagtcgcagctgcagccgctgcagctgcgcaacaccaacaacaacagcagcaacagttggttgtgtccagtcaccaacaacagcagcaacaacaaaacaacgctgttgcaacacagcaacaacctccagtccaagctgtacaaccacttcagcagcagcagaccgcaatcccatcgttggcgtggccaattttttatgtgagagaaaattaaagttttcattgaccgttcatcagtactttttgaaaattatggtccttttcagtttgttttatgggtagggtgaggatttttagtgacggaaagtgttttaagaataagaaagcctttcagttaaaatctttgaaatttgggattttttaaagttatttcacaatcctattaaaatttaaacccttttagaatgaaggtggtcttattttaaggtttttttgtgtgaaattccaaagcttctgtgaggctttcaaattgcctctttgttagtctgatcacattcgaaagataggagtcgaatatttattaagctgatcttgagtcccactctcgactcgagaaaagccgaatttgtgggtatagccagcatatcgggtctcggctttttagtctcggtctagagtagcactaaccatcaattatatatttccgagagcaatgcaaataaatccccattaatgtttagccgatcgtgaatatcccctacttcgacatccccacttatcaacgcgtcaatttggacgcgttgccgagcgcaatgccaaacggaatggatttgccgttgcgcgacatcaacacgctgcggtttttcttcaattttggcgtccaacatgcacgtgccatcctcctcaaacagcacatcaggtggattctgaagaatttcggcattttgaacgagatttcaattatgttttactatttattatcatcgcaaatattaaaatatttgctttttaaattaaaaatatttacagttcacaaaatcagccaacacagcaacagcagcaacagttggcacttcttcagcagcaacaaaatgccacaggcattgggcaacaaacgggcggtggccaagagtatgttttggcactttctgaaaaaaaaacataaaatttaaatataaccaaataaaaataataatatttggcatacaatttccatgctgcccatctntgaaatagtattgtttttcctttttggaggctcaccaatgaacagcttcaatgcaacagaaactgttgactgctcaca

SEQ ID NO: 25611 - DNA, 1466 bp, Heterodera glycines
gccctccgatcgggcgcttcctttgaatacttacccgaattccctgaccgaggacagcgaaaatgagtcggatggtcaagcggaggacaaatggctgctttctccgtctctgtcaccgcgcggtgacggtttgcctgctaagattctcagatgaacattccccccatttgaatctgaatggtatcctcaaatcgagggacttaaaacggagcaacaattacaacaaatcaatgcccacttgctggagagatgggctacgctgagattaccgtgctgttcctgggatcaattaccgtatcccggtccagggatcaattacccttccgggatcaattaccatcctggtcccgggataaattacagtcctgatccccaggatgatttaccgtcccgatcccgggatcaattaccgtatcccagtccagggatcaaacaccgtcccgggtttaatttccgcacgatcccgtgatcaattgccgtcctgatctcgggaggcatcgtctcggtgccagaattctggttttattcaccttttttggcaccggtaattaggagaccggaagcccgtatttagactattttttttataaatttcagacgaaaccatttaggcattttcgaccgcctcatctcccgtcaatttcatcatggccttttccttccccttgtgggccaataatatcacattgggcccattcgtttgaccaatctttggaccggcgaacggttggcactgaaacagctcgaccaatggcgctttttgatgatccgttgtccaattgtgcgcgatgagcaaaagtgggccaaatgggagaaggaggcgacggagtggcgctttgtacgccaatggaaccgaattgacattgccgtccacccggacgagttgccagacaaatacgcgtaagtaaattatattttttagttcggccggacaaattcccgatttccccaggattttggcttttttgaaaaatgaagggatcatcggatctctgctaaattccatatccgggccttgaattttaaacactatcctttttatatgattttttgagtttaggttagcaaattcccttcataaaacactcatttaaaaaattttgaattgaaaatttaagcggcatcttttgaattaatacgcaaagtttactttattatttttgacaaagttctcaaaatatttttaatattttttagagtaaaactaacggattggtagtgatcatactactcggatgatgacagatgatcatcatcaaatgaagcatatattatgtaaagcgatccaaaatgtttaatttgttgattattcacaataataataatgcatttgttagttccattgaaaatatattgaaaaagcccataaaaacaaaaatactcaaaaaatgtggcgagttattattgaaatgcttctgagcgtcgaatctcggaaatgttagcccttgaaaagtcataatagttaa

SEQ ID NO: 25612 - DNA, 1515 bp, Heterodera glycines
  unsure (1)..(1515): unsure at all n locations
tgaggagggcgggcaggggacgaatccaagacattccttcttggattgttacccaagccttacaaatagacacaaaaactagatcgggtaaattaccgttttatttggaaaatatttttaaaaaatggacagttttctggcattgtgagttcatggactatccccatggctacactttgaagaattttatgtttgaaaatttaagaaaaagtcagggagtgcacccccgtcaaaatttctattttgaaaactttaaaaaatccccagcgaggcacgacttactccccttttgaaacatgctgctgaccttgacaaaaaaatattcccttttcagtgaaaatttgcatgatttggcgccggagccccacacaaaggcaattcgcagtttccatctgttcggtgtgcgcctcttcgagtgcaaaggcggcctcgagcaccgcgtggtggaggagtaccgggacgcatcggagcaattcccaagcggcaacgacgcgagaagacgcgcgtttttggcccttttacgacgcgaaccattctacgggtgaccaataaaaatggttaatcacatggtgatcggtcggtttgaccaatgatcatgtgatcaaaaatgggtgcacttcattcccccccccccgcatcgtttcctccccgagaaattttatttttaaaaattgctaacttagaaatttttcaagaaaaaaaatcttagaaagttttttcataagaaaattctaagaaaaaaatgttttgagaaattttcagcgattttttggaaatttttttgaaaaatcttagtaattcaccataaaaatttctcaaaaaatttttttccttagaattttcttgtaaaaaaactttctaagatttttttatcgaaaaatttctaagttagcaaattttaaaaaaaaaatttctcggggggaaccgaactgggggggggggggggggacgagctgctcccatcggatggagccaaatttccccaacataataatacttttgagcgtcgtgcccaagtgcgtgttgcattttgtacaggaaacaattcgaaagggcagaccctccgtcgccacttcggtcacttcctttgccaatttatcagtgttttggaagagaatgaacgaattgctgaacacaattttccgctcgcccggcagccaatggcgcgaagaatcggccgacaaaacgggcgaaaagcccaaaataccctcgccagaattccgaggctgcaccgacgacatttccaaatgagcaccgcaacaatcggaagaaagggcacagaaataatccatttggggtgccgtctccagccaatcgtcgttgggaaacacaccaaacacaaagtcactgaaaatgggcacaaaaagtagggtgaacgagtaatttagggagcagaaacatgncaatggtntaatgaagtgccgtaaataaatataatgccatcaaaaatctcaaaatccaacagaccctttgctgtgcgagtgaaatcaatgaccgcatncgcgacagttcacg

SEQ ID NO: 25613 - DNA, 1522 bp, Heterodera glycines
cttaatgatttgacaaatatttttgcttttcttcctaagttttcgattttacacccctaaattcggaactttcttgcaactatttacccatttttagcaactattttggaggtttttagaaactaaaaactaattattttggcagtttttagcaactataaatccgagccctagtcatgaagaaacaaaaatagagaattcgtatttaaattggcaaaatttttcatgaattttcctttttgccggcgacccgccgctctttccatctttaattgcaacattaaaaatttacatgtttactttttgggagttgggtaaacaaaaatttgaaattttagagtctattttaattcctcaaaactttttcaggattttgcctgccaatgtttgcgttacatttgtcaaaatgcggacgaattattcgaatctgatgaattcttgcaaattgaccagaaattgttgtgtgaactatttgactgtgatcagatggtgaccagcagtgaatttgaaatttggaaagctgtaaaacaaatatttaaaatttaattatatttgtttattttccaaggcacttaattgggccgatgaaaagtgccgtcaaaatgccatcgaatgttccgctgagaatcgtcgatcagcgcttggcccggcactgttcaaaattcgctttcctcacatttcaatggaggattttaccgaaagcatcggtagcaatttttaaaataaaacaaattctttatgtatttttgcagttccttctggcgttttgacaaacgatgaatttgtctccatttatcagttccattgtcaccccaatctccgtggtgtgcccgagctttacccattaaaattccgatggcatggacgaatttctgattggaacatagccaaaggcaacagagggaccctggcgatggaaattgagaaattttctgaatttgcgcgagaggaagtggggagcaggcgaaacagtgaaatcgaagtgtcaataaaaggactttcttggaaaatatcggcagaaataaagacgaaggaaaaaagcactgatgagaaatgcctgggatttttcctttcgtgcaccgcttcgggaaaaggtgaactcaaaattaagattttttgattacattacctaattttgattgccaaagatggaaattggagttgcaaatgttcggcaacccttcgaattgtttcacaaaagaacggaacggaggatttaacgaaaaaaattgaccatgtttttaacaaggaatgggccggctggggattcccaaattttattacttttgcggtgagtggcaggcaaaacaacatttattggcttaataaatagtaaaaattaaggaattaatggacccgagcaaaggattttacgacaaaaataaggacaaagtgacgctggccattgattttacggtgggagaagaaaaagggacaacaaagaggaaattggccggtggataagcacatattccaatcactcattttctgttgatttgacaattagcaaattttattcaat

SEQ ID NO: 25614 - DNA, 913 bp, Heterodera glycines
caggaaggaaagggggggggagggaatgccttcgcccccccccattcattggcattttctgtgctttcatttcgccccttttcttacaaaagcgtaaaacaaaaaaagggagtgggcggtgaagaacaaacaaagattcatttatattttttggatgttttaatcagccaatgaaatgatttgcttatgatggaaattctttcttccttttttttgtgctaatttcccaatttccgtcgcttccttttgattgcttttccatatatttttatttccaatttttaatttagattttctgcctcccctcccatccgtcgcccttttcccatttttcgtccgccaattcgtcgtccttttccttccagtgcaacccccccccccttttttttgctgcatttggccaatgtttcccccttcgccgtccatcgccgaatgccctcccccgtccacttcctttgccaaaatgccgtcgtcgtccgctctgacagccgcgcccaatcagtcgctgctcagcagccaaatggtcgaaattcgctgcttttgccacttcgatttgcttggtgctcaattctccataactcacgacgaccaaacgaagtgcgatgagtaattaattaatcattgtgactaattgcccaattagctcatgttatcggaatgagcacagcagaatttggtctttgcgcttcgttttgtttggcattttgccacacattcttagcttaagctggaaaagctttttctgctttcaatttgttttctcttgccatttagcatttttgtaattcaattttttgtgtttcgtttttctcccatggcatttaaaccctccggcgtttttacttcccccccccccctcttttttccctcactctttcccctttcgcaaccttcgcttcttattgccccatca

SEQ ID NO: 25615 - DNA, 1648 bp, Heterodera glycines
  unsure (1)..(1648): unsure at all n locations
attggcatatttaggcgctgagtttgnccttagtcccctctgttgtgacctccgcggttgcgncctgtgtgggttcattcgctgctgaacctcctcaatcgttgaggacatgtgaatttgcttccggaaacgtgctgtcagctgcatgctcgagtgcttttgcttgaattggtgacgtagtttaacgtccttatggaccaattgtcgttgcttttttgacgtcatttcggaccctgaccgtcggatggattgctagtttagcgtcttttcggacaatggttgtttggtggccggtgcttagctagtttaacgtcattgcggacaattgatgctttgctagtttaacgtcattgcggacttgtgttgtttgctattctagtttaatgtctttgcggacatttgttgttaggttggttctttagtttaatgtcattgcggacgattgttgtgtgggttggccgatgctttgctagtttaacgtcattccggactcgtggcagccgggtgattagcgtttcggacagttgttgatggcttaggctagtttaacgtcattgcggacgattgttggtgattagcttagtttaacgtcttctcggacgagtgctgttggcatggtgtcttactgattgttgccgagctcatgtttgggcaattctgttgactgcccttatcaattactgttgttgagtccgagcttctggccaatgtagcgacgcaatgatggttggcgcctgatccacttgcggttggcgacacggctttcatttttctgttgagttcatttgtttggcttgtttttgtgggattcgctgcttttccttttggttgtttgctggaagaaaatgctggtcgcttggcaactgatgaactcttccttgttggtgttagccgttgcactgccataggaattggtgccgttgaatgctcatttggtgatttggcttgtctatccctgactggattttgtatgatctcaatgccggatgcgtcgctgtctgatgaaagatcaatcacgattgattttgagctgatgggagccgattctctcttccgtcttgatcgcaatgttgcaatgctggacaagagtttgtcgcgttgatgccgtctcactttgtctttctctctctgttgaatgttctctctctctgagatctgttactctcttccgcctctctctctcctccccactctcctctttcttttctccttttttttctctctctctctctttctcccactctcctacccactctcttccctctattttctcctttttctccctctctctctcccacctctctctctcctcccactctctctttctctctttctctctctctcttttcttctctttatttctctctctcccccactctctcttcttttctctctctttctctattctatctctctctcttttcctctctcccacctctctctcatttttttatttatccctccctcataaagacaatcgcgtcagatcaaggggttttgatgtatttgggcctgcgatgtcgctattaaaaatttaacctaattttatgaattttttttttaattttgccgaatagagaaaatttaggtcccgcaaaataaaaaaaaaattaagtatagaaaatttttgaaaaaattttcaaattta

SEQ ID NO: 25616 - DNA, 1935 bp, Heterodera glycines
  unsure (1)..(1935): unsure at all n locations
tcccttgaattttcttaataaaaattttttcgagttttttctcgaaccagttaggtaagtaaaagtttttgattatttttttttctaaaataactaaaaaaatgtgcgcgacgttatgtcccagcgacgtttcggctgtcgacgttttgtccggcgacgtttctgcggcgacgttttgtccggcgacgtttcggcggcgacgttttgtcctgctcccaaaaaaagttgcgaaaaattaaggaatattttcctaaaactttcattttcccccaaaaattgcaagaaatcgtttaatgattttattcaacaaaataataatgaaaaatacacaaattcattaaaattctcataaatttttgcactgtctctgcttggcctgttcaaggccaacctctgctgcaattttcacaaattccttcattttttcaaaaaagtcgtgcacaaaactgcgaaggatggcccatttgatttctaccatagtgtttccaatctcttctaccgtatcctcaatttttcgtgacgaaatttgccgctcaatggcgccaaacaaacggtaataaacgtgtaaattcaacaaaattttattctcattttcataccattgttttcgtgatgaaatgaatgatctcgagatgacattttgcaattttaaaatttaatttattatatatgttatattatttataaatatatttttattatgaaacttataaaaagacattttaaaatcattaatttggttttggacgattttatgtgtcccatgacatattatgtgtcccatgaatgaccatcctcagtttcttaggccataactttttacttatttggtaaatacctctattcttggtatcaaacgaaagcttaatgtatatagaagcttttataaactttatttttttagctaaatgcaatagacaaaaaattattctcgaaaagttgagtttcgtgttttctcattgtaatttcttttttaatgccagtatttgctcttttcttgcattaataaaatcccgatcatgggacgcataaaaccgaccagaatntaacattttattctttgaataaaatagataccatttaaaattgacattttactaaggaaattttcgaggaaatgtcaaaaattcactaaaatttggccctgtgtgggcaaatttcaagaaaaagatcaaacagattaatttcttcaaaaattagtttttaagaattaattataattttcaattagatttacagccaaaaccctcgggtttcagcttaaaatttttgaattttgttggttttattcaataatatagaataaatatttaattttagtcccaagtgtccctctattagcctgaaaaatttaatgaatttcgttttaactttcaaaaaatatcaccaaaaaatgcttgaagaagtaagtttttttttgagttttctggccgtcttttacgggttttcccaaaattcaaaaaatttttataggttttcaaaatgaaatttaactaaatattttgaaaacccaaaaaacattttaggttttgtgtctatcttctacgaatttatttttcattttggttgtttttgagtccgggctcattgtcagccccggatgacattccgaggccccaaaaattacacggaaacacgaattccgagccccaacattttttgtaagtctgaaatcggaattccgcccccaaaaatgacggaaatcggaagtctgaattccttgccatccctggtcagcaccattacccaccctcatgcttctcatcaagccggatgaggtctcatcgtcaaacattttgtcctgcagcaactctctttgggtccaaatgatgtactccttcaaattgtagataatccgatcagaactgatcagtgcgcacaacgctttgtccatgtcgaccaactcgaacatgtgccgatacaaaatgtcatcat

SEQ ID NO: 25617 - DNA, 1248 bp, Heterodera glycines
ccatgccagtctgtatattgttaatttaaaacttcaagtccaaaaactaacccataattgtttcacgtttccttttaaatttttaaaggaagatttcctgaggcaagtgttctgttcaaaaaatatttatcataaaattataacaaaaaatatggaaaatccacaaaagaataacaggattttcatatccattctatcaaaaaaaaaggatcatatagttagttatgcaatggtttttcagaacagaaaatccacctggcatttggataaaatcaaagaatcaaaatttttttctgtcgacggattccacacatattagccgttataaatttgaaacaatttattggctatatgttttctgcctgacaaagccctactctggagactgttgggactcggggacacccaaaatggggaccctcgtcgcagctccgggcgggccaaaatggccctaaacaccaagcccccaaatccgcttttcgctgtcctctttatttgctgagtggaaacccaagccaagcgaaacaaagttgaacaattaaccgaaagaatgaacgaacgggccaggggaattgagggtggaagaaaggggaggggcagttggtcaattgaggggacaaaaagtgatgagaggggctgacacaaaggaagggggaggaactccaagccaaaggggaaccccggccaatgaccatcttttcatcacattccccaccgacgacattgccgcgccctcgcggcaaaaataacaaagcgatgtggaaaagggaaaaagcagagaggaaaaagaaagaaaaataacgttaaagagagagagaaaatggaggaaaaaaaatgaaatgattttgagacaaagagatgcagccccctgccccaaccgacgaccgatcgctccagcgttgttgtggtcggatagcagaaaaagttagatgtgaaaagatgataattcgacatccaaaagtggtcatttgcaaaaatatcttctggtggtattcatttcaaacccctcttctcttttcattttcctctcagttttgtagctattccattttttagtgaattatttcggcgtaaaaattacaaatgcgtctggcattgtccgtcattgtttcgactcttcttctggtggctctgaattggccctctgctttggcttccgcagaaattggtcagcgaatgaattgcgatcggtggggcggggagagaaagagagagagagaaagagatgaaagagagtgagggcgagag

SEQ ID NO: 25618 - DNA, 1537 bp, Heterodera glycines
  unsure (1)..(1537): unsure at all n locations
gacggaaaatggacatcgagttttaaaattaatatgaaggaaattatacacggtattctgataaacttactttaacaccagctaatctctgctccattcctttaatcattcaaacttctttaattcgttaaaaatcaagttatttccaaaactttttgaacaccgactcactagaatttttttccttaattattagtgttcaatttttatttgttggccaaaaaatgatatttgctaaaaatgattattttctcattaaagccgtccgcaaacgtcggtgcgcaaccggtgcgtaaatcggctggcagcccgcccatttgtccctctccgatgccaattatcttccccccaattggtcaatgcctcatttcacaattggacaaatcctatttcccaattggacaaatcctcatttcccaattggacaaatcctcattttccacttgccccaccgtcatcgccgtttcgtccatgcgtatccattccttatgcgtagcccacactttgatatgatagcggtcgcacttttgtcttagctcgctgttgaacacaactttggtcgacgtcctccccttggtgaacgacttgaatttgtagtcatcgtactcttcagaaactgtccatttctccacttttttgtcctcctcgtcaattttctgcatcctacttttcagcttatcatcatcacaaaacacgcgaaagtggtaaaaaaggtcaggcgtctccaacgcgggcccaatggtcagattgaaaaagttgccaaacataatccacttgttcagcccatcgtttgggatcgcatcttgcagataaggaacgggcttaacaaaaacccaaaaaataataattaattatgaaaattaatcttacaaatattccccggattttgaaaaacttgtgaatctttaaagaaaaattttatttctgcttaacaaatttcctaaagggttagacattgaaacattttttacccaagtgctcctgccattccgtgtcaatggattcatttcgattggcatttccgcattcattgcattttcgttgattggcatttccgtccagagcatataaatgcacacgtgaaaataagggcacactcttccagaacggaagttcagtgtgacaatggcttctccattcgcttgttcctctgcaaatgccatctcatgcccccccaccaaaaccccttcactgcgcattcgctgggccaggaattgatgtaaaaagcgattttgaccctcacaatgtccaaccacataatacacngtggtgggtgtcgggcacggccaagccggggatcagcttcagatgcagcgaattgttattgttgtgcggctgttgcgcattttggcccatccaatgggaggacagcaaaaggccaataattggcattagcatagcaaagtttgccaaaagaaccattgccttggtggtactgcagttttgaatgcgagggattttatttgagagtttaaatcagggcttcgatctcaaaattttgaaaatcctcattttagccataaaaaatcctcatttg

SEQ ID NO: 25619 - DNA, 1278 bp, Heterodera glycines
cccaacgacctgggaaatcgtcgactctgatctcgactacgacgattgcctctccggtcccgcgcgtctcgcagcactttggaaagctacccgggaggccgccgaccatttctggctcaaatggagtcatgagtacctcctcgccatcagagagcgcgccggatggactcataaaggtcgccggcttcgaactcccaccgccccccacatcggccaagtggtcatcgtcgaagaggacctccgcccccggaatttatggccaatgggcatcgtcgttgccctaaatggctcactccctaacgtgagaagcgtccagttgcgaatgccaaatggtcaaaccgtcacgcgaccaatcagccgtctttgccccttggagaccgaaaaccagaccccggaacccgccccggacgccaccgtatctaccccgactgatcaaagccccagagacgccaaaaacaccgaaatgtctgtaaacgaaatgccgccgatcccttcactttccggagaaccgacgatcagtaagcacaacggcatgcttacgcgacgaaaatcacggcttttcgcgatccctcccaccacgacaatgatcattgccattttcgtcactcacctgtgggcccaagcctccccggcacaaggaatttggccattcgacccggaccatcccgggccacccccaacatctaattgtgtcggaaatcacgtcaattgcacccgaaaaggcgtcaaaatctcgtcaaattctgcggtacaaaaggtgacgatttgttgttcgaacgcctgctttgatcgtctcgccgcctctgagatcagctacgagttgtcctccgacctcctcgtcaacgagtatgtctgctccgcgacattcggtctctcttcgacccgcagctgtaccgccgaaattgcctgtccggcagtcgacgaatgtgaattgatcgattgttctatctgcatcgaccgacccgccaattggcggtgtaatccccggctctcccttgtcctacttctggtcattgggtcactgatcagttgtctgaccggatggattgtctgtttttgctcctccgcccgcgtcgtgctcaatcgcggctaccaaatcgccgcattcctcctctcctggcccattcgactagccttcttcatcgccggccgtccctggacacgagaagaccgggaacgggttgcagaacgcctcgaacttggtgtccaaagggtccgacgacagacacggaaccacggacggcgagcccaaagggcggccacccgactcattggcat

SEQ ID NO: 25620 - DNA, 931 bp, Heterodera glycines
  unsure (1)..(931): unsure at all n locations
tggtatcaatgaaagcttaaggtttttagaaacttcttgtataattttatttttgcaaatgcaataattctcgaaaaagttgaatttttgagttttcttattgtaattttttttaatatcaatatttgctcttttcttgcatttactttcattggataccaagaatattggtattggccaagtatgaaaaaaagttatggccaaagaaactgcgaattgtcattcatgggcgcataaaaccgaccggcggaaccccaaattccctacccatttcgttgtcggccttctccgcttcgtcctgctgctctccgtctctctcttccgcacattcgtccgtccctttctcgcctcccttttcttccgtcttctccttttgctcctccgtcttctgctggtcttccaccacttctttttcagtcccatttttgcttttcaattcctcgccctgttcttcttctccttcgtcctcctcatcgctctcgtcaatgtcatccatcggtggtttaataggtagcgattcgagacgcgcaaccttcaagtcgggaaggggggttgtcattaatttcgaatttcgtgtcagttttcctccattcggcttgggggggggtacccttcacctctggcgacaacctttgtttcacaccatttttttgcgaaaaaaaatttggcgaccagagggcggccccggcggtgccgataggctccgccgggaattttttttatttttaatgagatttgttaaaaaattttgtccaaaaagtgacaaattttgcgattttgagtcgtttttagcagattttcttcaaaaatagtggtttttttgaaaaattaaaatttaggtgaggctggttctaaggggagagaggtaccagcaaggaaaatttaagattttagcaaaaatactatttttccctntaaaaaatttcgggtg

SEQ ID NO: 25621 - DNA, 1275 bp, Heterodera glycines
atataacttattgaatacataataaagtttgcttttaatgtattattattaaacgaaaaaattctggcggcgagattgccaaaaaacaaggcgcggcgagttggccgcggcgagttggccccgcggcgagaaagcgcgcggcgagttggccccgcggcgagatggccgcggcgagttggccccgcggcgagaaagcgcgcggcgagttggccccgcggcgagatggccgcggcgagttgggcggttcccaaaaagttgaaatggtgttttccccaaaatttgcatttatgcaacaaaaccaatacaaatgcacaacttccctgaatttgttttgcgccaacgttttggtaactgcgaaaatgttataattttttggtggcatgtctctgaacaaaaaaatgaattttaaaaaattggggattttcgagtcggtgttcggaatcatcggatgtcagatttgtgtgggaaaacacctaaattgttttatacttttcaattctacaaaaaaaaaaactcagaaaagtacggtatcattttgatggacagcgatcggcagcaatattttaggccccattttttccatcaaaaattcatataaaagacagagaaaaatggcaatgacggtcattttttgtacaaatattttggccagcaattcatactgcggtggccatgcaataaaatggttttttgtttcacacacaaaaaatgaaaatgaccaactaaatatgtaatttgttcttctttatataaaaattcgttaaaaatgattttacgggaacaggcaaataaagaaattgggaattttttcttcaaaaattcatataaaagacggagaaaaatggcattgactgtcactttttttttgtacaaatgttggttaatcagcaggcggcggcgccgtgcaaatgtttattttctttgcttttttagctcctccattttgtttctaaattatccaatcacttttttgtttaatttaaatagactaaaattagtttttttggttcacacaaaaagacgaaattgaccaactgaataattgtgtccgttttaaataaaagtccggtaaaaaaagattttacgggaacagtaaaatgaagaaattgggactttgctccctgaactctgtgttggaaaccatggtttacaaaaggaatctcctgatttcacataatttgtcttttttagtttccctaagctaatttaaatccgtcaaaaactgtcttgtaatttgcgccaacaaaatgtcagaccgcagaaaagaagcggagg

SEQ ID NO: 25622 - DNA, 1082 bp, Heterodera glycines
tagtggtgatgtgctcattaaagaatgagaaaacttaaaatactaaaaaccattcggcgctaattaattaccattttttctgaaaatcaacaaaattaggattttttagtaaaaatctcctaaaaatatggtcaaaattctcaatttttcccccggcgtcgcctatcgacccgccggaccccttgttccacaaaagttttttggaaaaggccggaaaaatgggttgaaaagcaaaaaaaaaaggtcgtcgcgcccgaggcggaggtacccccaccccccgccaagcctaaatcctgggaacatcactgatggccaatcaaaaatataacatttgaacattttaggagtgttttgaataaattttgtaaaaatggggctttttaatccaaaatgaggcttttgaaaattttcatttgcgagccccgatcatttttaattggatggatggtgagggtatttggttcttgtgaatttgaaaatttttgaatacggtttttttatttatttattttaaatagggttcgagccccgtgggcgggggtggcttttcgcgggggcgggggttggcgggggtcagagttgcgggggcggtggcgggggcacgataattccgcccccgcgggggcgggggcgggggtttgctttgaattagctccaaaaatctcacaaaaaaaatattttttatgaataatttctttggctccacattcttttattcgttgatcgccttgataatatttattttgacataaattgcacagattttgactaaaaataatcaaatttagcgatttttgggtaattttttaagaaaaaaaggtttttttttgggggggggggggccggtgccaataggagagaattttaaatttatttctaacagatattcaaatttgcaaaatatctactaaaatatgtaaataaaagtccaaacttttgtttgcagacacaaaaaagaaagtgtttttcctactgattaggctagggaaaagccagggaaaaaatatatatttacataaaattagcagccctaatcatgatttaactcagggaaattgaaaactcagatttttttaattttt

SEQ ID NO: 25623 - DNA, 1043 bp, Heterodera glycines
caataaaccatcttttcattatccattttctattaagatcacatgaacttcactatttccttaattttattttccaagatatgaacttatcgcgtaaatcttataaaagatttaaataatattaatttttaaagattctacaccgcgtttgaaaccttcaaatctgtaagtaaaatattttccacaaagtgctaatttttccgtttctgttgaatccattatcaaatgatttttttatcagagcattaataaatttcgatttatcatttatataactaaaatatttttaatgattaaaataatattaatttatttatagatcttgcactcgaattaacaccatttttttcaataaaccaccttttcattatccattttctactaagatcacatgaacttcactatttccttaatttttatcgcgtaaatcttataaaagatttaaataatattaattttttaagattctacaccgcgtctgaaaccttcaaatctgtaagtaaaatattttccacaaaatgctaatttttccgtttctgttgaatccattatcaaatgctttttttatcagagcattaatacatttcgatttatcatttatataactaaaatattttaaatgattaaaataatattaatttatttatagattctgcacgcgaattaacaccattttttcaataaaccaccttttcattatccattttctatcaagatcacatgaacttcactatttccttaatttgtatcgcgtaaatcttataaaagatttaaataatattaattttttaagattctacaccgcgtctgaaaccttcaaatctgtaagtaaaatattttccaaaaagtgctaatttttccgtttctgttgaatccattatcaaatgctttttttatcagagcattaataaatttcgatttatcatttatataactaaaatatttttaatgattaaaataatattaatttatttatagattctgcacgcgaattaacaccatttttttcaataaaccacatttttctttatcatttttctatc

SEQ ID NO: 25624 - DNA, 1937 bp, Heterodera glycines
  unsure (1)..(1937): unsure at all n locations
taaacatttaaagtttcgaccccaaaaaaaggattccgagttagatttttgaggtttaaagaacatttgtacgaaatcaactggctcagattcattgtctaatcatttacgcataatttaggtctgatttcggcacttagttccgcgaatgtcccgaacttgcaagacattttgcatgccgctggtctccctgtgcctgacggtaccaatgatcgcgtgggtttggtagaaatttatgaatgtcaattccaataatgaattgttggcaattagctaattgattcgatgtttaggcaaatgtttttctgaacagaagtgttcaggtcgtccgaattgtgtcaattgatcggtattttttgtttccttaaaatactttttgatgtgccatttttgccctctctgattaataaattttcttcagcctaaatgctgatttatttaattgcaattatatattattataaaattggttatctaaataatatcttcttttcttggttcaaaatagcggtgccgctgattgaccccatagataattaaggcccccaaaccaaatgggtgagctcacacaacaaattattcatttcccattaaaatgaacccaaaaaaactgcccaatgaattgttttttgaaattgtcattttgcagtttcacaaaaagtgggcccaacttcgggtgtcctctgtctttgatcactttcttcttgctcacatgtcccaatttctgatcaaatacaaaaattcggtgagaatttcgcaattagcactgatcaacgggaacttaaaaattcttttattatataattttgttattatttctttgtttaaggcggaaaagtgtttaaatgcggtactgaagctgtgcaaaatgttgttaaaactgccgggcattatccgttataacggaattgaagagcctttagagcattttgtaactgaccgcgaattgttttgtaagtaaagcaaaggtcgtagaaaaacaattaaatacataatgcatcactgatcggaaaaaaaatttgcgttttttaaaagccaacattcaaaggtataaaatttttttcggcgctgcgctgaaatttttgaattttttacaaaaaaagataattataaatttttaaaatatttcaatttttgtagggaaaaaataaggtaaaaataagaacaatcgtctgatataaataagaaaaatgtatttcaatgttatttttaaaatagaatcccaaattgcgacattagatttgctcattggtcttgaacgtatccgttgtccgcccaacataaaagcgcaggtcggccttccgccagaatgggaatcggaaccattggcgaaaaatacggtacagagactgagacaaaatattgtaaaaatatggcctgatttgcaatgagaatttatataattttaatttttgctgttttcgagtaaaattttgaaatttctgtgggaatgagttgggcggaaaatttgggaaattaaattgagtataatttcctgggacattccgtcagcattttttcggaaattaaattatttatttttcaaaatttcgaaacaaaattaattgtcatttgctttaagttcctcgatatgcgggcaatgattgttcaaattgtgggcattgtctgccagtggccagaaacgacaacagaagacttggcgaagttggagagcggtaagaacttgccgaaaaatcggtgatggattaatttttattttaagaaaaaatgcgaaatacatattgaaaagctttatcttgaccttaattaagaccaaggtttcaattttagccaagtgtttgattacccaaaaataacggaataaacagaacttgcccatttgcagtccacacttttgcgccttgtctcaataggcttaagtgtcttatactaattagcatgcaaaattntgacaattttcagaannagtaatctct

SEQ ID NO: 25625 - DNA, 1157 bp, Heterodera glycines
ttcctttcactctccgctttgcctcccctccggcgccgctttcctccgttggctttgtgccgctctgtctcctcctccgtcccccctcttccgcctccccttccctccgccttccgtcgttcctttcactctccgctttgcctcccctccggcgccgtttcctccgttgctctgtctcctcctccgttccccctttccgcctccccttccctccgccttccgtcgttcctttcactctccgcttcgcctcccctccggcgccgtttcctccgttggctttgtgccgctctgtctcctcctccgtcccccctcttccgcctccccttccctccgccttccgtcgttcctttcactctccgctttgcctcccctccggcgccgtttcctccgttggctttgtgccgctctgtctcctcctccgtcccccctcttccgcctccccttccctccgccttccgtcgttcctttcactctccgctttgcctcccctccggcaccgtttcctccgttgctctgtctcctcctccgttccccctttccgcctccccttccctccgccttccgtcgttcctttcactctccgctttgcctcccctccggcgccgtttcctccgttggctttgtgccgctctgtctcctcctccgtcccccctcttccgcctccccttccctccgccttccgtcgcccctcccccaccatcgtccgtcttccctcccgctgcttttccctccgatgtgatctctccccgtggcgattcgcttctttcttccctcttcgtcacaagtgtccttctcttcctttcccttcgtcctttgttttggcaacatcgacataacaaaaaatgccattaacaaaagaattgctgccaatgaggcgcctccgatcagtgccattgtcattcctttccgagtgattgcgcattctgccgatgggcttctcagtttctgaattttttggtctttaagaagagttttaagcaatgttagccaatgccaaaagcatcccatcggctgtgaaagggacctcttcggtggcaggaggcctttcgtccaaatcgtaaatcaaaagttggccgtagaagcaccggcgagtcattgggaccatcagaatgaccctggggaggccttaaaacgacgcttcgacttgtgtcggtttt

SEQ ID NO: 25626 - DNA, 1434 bp, Heterodera glycines
tctcgctcttacttcactcccttctttcacacatctctctcttcctctcccccactctctccggaacgggccaactccgtccgagccaactttgagtcaatataactcttgaagtttttgaccgaatcaaacaatcttgatatcattcgaaagctcttcacaggctctattagcctactaaaaattacagaaaatttcgaactataaaaaagatagaaataaaaaactttgaaaattctgccttttttgcggttttaaactgacaatttttttgagagctgattaatcactgagaaatagcttataaatatcttctaaacatctagggctttcgaacgataccatgattgtgaagtttggccaacaaagaaaaaagttatagctttttgaacattgctgagacggagttgacccctaccgactctctctgcttttttttatcatctcaactcttttgattctctcttttctcccattatctcgccttttctcttccctctcacccactcctctctctctctctcactctttctcccttctccgttctctttccccattctctctctctcatccacccccccccactctcccttcttttctcgttcttccctttgtctcctcctctcatccctcgcactctctcttatttttcctatctctcacttcttattccctcccgctcctacgctttcatcacacataagtaagcaactgtctggtcttcccttttttctttgtatatgctatttcttttctttttctcttctttttttcatattaagtcaaaacgccaaatgccaatttaattgagggggcggggcttgctctcatttaatataccttaggggattgaaacaattgagagaaaatgttggacaaatttgtgatcaaaagaatcagattttaaatgacagacaaaagagagaaattgtggaaaaatttcataaaataaaaaataaattaagaaaatgggaaagaaatactcgagaaaagaatggacaaaaattgaaagaaaaattgcacaaaaattgggaacaaataaagagaaaatttacaaattcatcatttatataaatttgagtagtttgccgttttattaaatcaatgagaataaaagcaattaataaaatggatttatataatcattttcattttataaaaatgaatattaaaataatattagttttcttattaattctcaaaaatctaaataaaatttatgctggtggaataaaggaagaaaaaaactttgacgaaatatttggccaaagatgggacgaaaaagaggaggaaaatgaagagaatgaaagtgatgaaaatggaataaatggacaaatgaatgatcaaaatgagacaaaaaatgatgaaaatatttcaaaattattacatgagaaacaatttaatgaaatttttgatgaaatttttaaagtgaaa

SEQ ID NO: 25627 - DNA, 1317 bp, Heterodera glycines
gcagtcgtttacgtatatccgtctccctcaaaatagcaaagtacccttcaccctttccccacccatccttccccccccccgtcccccggcgcgtttcatctccttggcttttgttgctgcgcttctgctttcttaaaaacttctttctcctcacgcctccctccctccctctctccacccattccttcctcctttttcattcgccgtgacgaaaaacgtcttcaaatttcacttgaagaagaagaagaagctgccagacgcaaccaccagcagaaagagcagcacaagccgaccgcttttcctccccccccccccctccccctatggcgctttgaggtctcttccgccgctcgtccgacctcttccccacccacttcccctcctttctcatccgctcttttcactgtggcgtggcggccaaacaaactgttcattttttgggaaattttttcgtttgggataacttttatgccttttggccccttctttctttctctctttcggtgcaatatttatgtgaaatttgatcgtttgccgctgcaaaaattttggtcattttgttcaaagaatataatatttttttggaaagaatgagaattcgtacagtcaaaaatatgggaaaatgcgacattttttgaaatttatccccattgtttctgttaccatagttgtttattcattcatcatttttgcaattatccaatttaattggccgttaatacgtgggaaatttggccataaaattaaaattactgacacctattccaactcactttttcttacacattttattttaaaattatttgttattttttctctttttgccaatattattttgttcaggctgttattaaattatcgcattgaaaacttattaaattggggaagggaataaatttccttttctttaaaatttattcaaaattgatcaaaactcacaaccccttttcacattaatcatttttgctgtaaaatcagcaaaatttccatcaaaattcgatctttgctcctcaacaagttcacatttgttccctattgcaagagttatgtatcccacctttctgaacggccgaaggggggggggggggagaatgggtggtattatttccacaaaaaaattttcgctgttttgatttttgcgcagtcaattatttcattcatttttggaccaaattaaaataacgaattttaatgtaaaaaattggtgttactaaagacttttctaatccccccccccaattcgaagagtgtcaaatccgtcccggccaattcgtctataaactgttataatttaacctacttaaacttcttgacagg

SEQ ID NO: 25628 - DNA, 1034 bp, Heterodera glycines
  unsure (1)..(1034): unsure at all n locations
cctccgtctcatacgcaagcgcttttgtgaggtataccatttaaagaaaaaagagatagacatatttcntgggatagagccttaatttaaaaattccctcaaaaataaaaggtaaattgcgcaccgccctccctatcatgctcgagagcatttgtctgtgtataaaatttatcaaaaaaagagatagccatttttctgggatagagtataaatttaaaaattccctcaaaaataaaaggtctattgcgcaccgccctccctatcatgctcgagagcatttgtatgtgtataaaatttctcaaaaaaagagatagccatttttctgggatagagtataaatttaaaaattccctcaaaaataaaaggtctattgcgcaccgccctccctatcatgctcgagagcatttgtatgtgtataaaatttatcaaaaaaagagatacccatttctctgggataacctctacatataaaaatcctctgtgaaataaaatggtgattgttcacatccatatgtgtcatacgcaagctcttctgagaggtataaaatttttcaaaaaacgagatacacattcatctgggatagagtatgaaaatttcagctcccgcaaaaataaaaggtctgttcaactacgctcctctctatcattctcgagagcctttgtacggatacaaatgtaggcaaaaagtgggataggcatctttatcggaaggcctctcaatataaagatcctgagtggaacacaatggcgattgttcatctgccctgcgtaacatttgcgaaataaatgttgaggtacagaatttatcacacaaagatggggaggtcgtcccccccccctcccccccggcgatggctgctgccttttcaacgcttttcctctccattttgttttatcatttgttatcagtccgatcgacagcttttgttcccctcccccttcttatcgccgccaaaaaatggcctccgaccgcgaaatgtcgtcgtcatttttgcgccaccggcggatggaatgaatcggcggctaatcgaatc

SEQ ID NO: 25629 - DNA, 1511 bp, Heterodera glycines
acataaacaaaaccataatcgcaatcacttttttggtgttgataagaaaaaaagcctctattacatcatcctgatcattattatttaattaaaacattggcattttttttaaatttcgtcgaaaatctttcaaaaaaatttctgcgtctattttttggaaatttcttaaggtcctttgaacaaataatctatgtcggtgttttttgaaattttttaaattcggaaaaccaaaaatttacaaattttccaacccacacaattaaaaattccaaagctttaattaaaaatttatttaaaaattgagttataggcgcttttttcgtttttttttaatgtgtaaggaccatctattcttaaaagaaaatttcatttaaaaacaactcagatttggctttaagcctttcaattaaaaatcacgaagctttaattaaaaacttatttaaaaattgaataaaaaattaaatttttttttcccaatttgaaccaaaaaaaaaaattgtatcgtataatttttttgcagatttttactgcaccaaaaatgacttttttccacataacgaattagtgtttttttggaactaaaaatcgcacccccccccccttccttcccccatttgttcagcgcgccttaaggccaccaaaacgatcagtgatttgctgattaccacaatcactgatcaatcgatcgatcgatcaaaccaattctcccttttgtgaacgtttcgtttttggagacctcacactgcttggagaatttctatttaaaaacaaattatttcgcgcttcccttttatgatgcaattctatttttgagccatccccgcccaaaaaaaaagtttttaatttttggttttttacgctattatttgggttccttttattttaaattttcaatttatttttgggttcggcggtgatgacaggcgcggccgagatatttaggcacaattgttaaatggtttcaccaaaaaagaccaatgttaattgttaatccgcgttttaaaaagcaaagaaaattctaattattatttttataattgaattttgaatttttccaaatatttacaatattaaaagtaaaatatttttttcaaataaaatttttactttctcccaaactcccaataataatttttctttcagaccataataccccattgttaccagtgcataaaaatttcgtatttcgtgccaaaatacgaaactatcaacatccctggcacaaacaaaagggatgtgagtcgacgccctcaaaatttcggcaaccggaattatttgaattacgagcccaaaaatttcggaaatcaaaaccagcaattttctaaaattttgtgtcttttaatttttaagattcggatcccctaagaaataatttttttttccatcaatacttggaaatgttatcttacaattccaaattggaaagatatatttgtcataaaaattgccccattttcccatgggtttgcgtctttaagagataattaatcccactttccttctttacgaga

SEQ ID NO: 25630 - DNA, 1503 bp, Heterodera glycines
ttccatttcaaagccgaaagaggcatcgatgataatgcggtcctagaaaatcgaaagaattctttatccaaatatccacaaaaaccgaccaaatcggcaatttttgctgcgtcgaccatggcatttatgtcatttggcacttcaaaaaaggtcacccgtctctttttgctggtcaccacagtcactgggccttaggaaaaatggaaacattggccaacaaaggtaaaacaaattgccaccttttatttcggataggctctgtttgacgtaattcttcaccagacagcgcaacagtgtgcttttgccgacccccgggggaccgacaagggcaacgagcagtggcgggaggacgtcgggacttcggtcgacaatcggaatgtgctttttcttctcgctgagatcggcagccctgaaaatgacttggtaaaaaggcgccgtgggtccttcgcccgccttcggatgagtttttgcgctttgatcgccgagcgaaatttgaacgcctttgggttgttgccgctttgtgccgtcgtatccccactctttctgctctttttcttcaaaacctttcctccctttttgtgaactaaaaaacagaaattaaaatgtccattctcaaaataatggaacacaaaatttacctctgtgctgtttggcattttcagtgttcgagcgcattttcaacaacaaaattaaatggaaagaatgggtaatggttgaaagtataaaaaacattgtaataaatctatccaagaggaaatctcgtgccaaacaaatagatttactcactaaatattttttaaaatggcaaacatgaggataatttgagaatgtaaatgggatggtaatgaatcgacttattgtgagactatcaaagtgaatgccgtcgaagttgtgttttaaatcatttcaaagatgcgagtgccgcggccgcttcctcctcctctcgcagtgtttcttggaaggcattagacgaagaagacgatgcccccgccggcattgggaggcgtatgccatgcagcaaaggtgggatttgccggttcagcgtttccgggctcgggattttcagctggtcactcactcttggctcgctgtcaacagaaacacttttcaacgacgtgctgaaggagtgccgtgccgaatgcaaatggacgccatattttaaagttgcaggaattgctggctgaagttgtgatggcagattcaacgctatttgggttgggtgccgaaaagggactctttgcggaggttccgcaattttccgctctttcctgaaattcaaaattaattttgcatttgcctgacctttggcaaaatgactttggtctgtctttgtctccgttttcctctttttccttcttctctgttggctttcgttgtctgttcggccctgttgctggcttggccttgaagaatgcggggtcaacttcgtaaatgtttggcaatttgatgggcttcagaaactgtaggcactcttttggcgggcccaaatcggcaacgacttgt

SEQ ID NO: 25631 - DNA, 1929 bp, Heterodera glycines
cgtttaatgtaaaaactaacctttagttttaaattttcgccaggttattgtctgtcggaacgcgaaggtgtggtcggcactcctgagaagccgttgtccgacttgggcaaagtcagctaccgttcctactggtggtgggtgctcatcggggtgctcgaccgagagcaggtggagtccaacatttcggtagccgaactctcgcgcctctccggcattcacacggatgacatcattgagacattcaaatcgttgcaactgattaaatattggcgcggtgagaaatgccgacgaatgaatataaaaaacatgcgttttccttttccgttgtcaggtgaccacgtcgtgcgcataagtcaaaaggtcgtctcccagataaaacaattgcatcttttccatccgccaaaattaattctccgcaaatctgcggtccgttggcgtcgcgggtcgacagtctctaacgaagtcggaagaaattgtagggaagaacggggccgttcaatctcagcacattgattcattttccaattatcaaataaatatttctgaagctatttcttcctgacaagttacaatatttgttttcgaacaatcatttttctttgcaattttttaaatcaaagtttattgtctttcaattagccaacaagcgacagttatattgtgtgactcgcccaaaatgtcgaagatgggccgaatggaatcggacacggacccaaatacggtgacaattctgaggaagcaccaagcgccccagcgtgtacttaagtcggacgcggctgtgagtaattttgttttaggattaagaaaaatgctctcgataaaggtgttgtttggaatgaatgaaaaatgaggaaaaccgacctatttcacacgcattacaatttgattttttaaaaataggttaatgcggcaaaaaagcgcggcgacgacgtggaaacgacgaagaaatatttcgcaggggtcagaaaaaagggaataacgcgagaagcatgttaattgtaagtttaggtgaatcgtcagcacaaaacggacaaaaacaccgcggttttggacgcggagacggagcaattgcaccacgaaaggtgagagaaaataggcaaaccaatcggaaataaatgtttcaaaattaagggtttcgctcaaattgggcactgtgattcagcaggcgcggcaggccaaggaatggactcagaaggcgaattttcattccctctttatttacattttttattttaggagttggcaacggttggtatttttgaattgtcccatttttccccgcctaattcctcgctttagcgtgccaatgagaaagtggaggtcattcgggagtacgaaaacggcaaagccgtgcccaaccaatcggtaattcaatttaaaatttccccttttaatcggatttgtccagcaaaaatatatcgcacctcgcttttcagatccttacgaagatggagcgttgccttggcgttaaactgcgcgggaaggaacttggccagccgcttgcgcccgcctcaacggccaaaccgacgacgacggcgaagaaatgagcagccgcaagaggcgaaagtgaacagaaacgccaaaacgactcaatgcctgtgtaaaaattcaacttgtcaacaaatgttcctcttccgatacaatttgtttccatttttcgtttgcaaaagtcacaattatttggtattttgttgttgggatataaaaaaggtttcacacgggctgtatcagatataggcctacccccttttcaatgggatgaaatttcctataccattaggactcaaatggcgggactttttaagtcgactggagatttccgtgatttaaattcccatcccgtcatttccaaattacgtgccagtccgattgaatagactctcttcacaaagtcggtgcaaaatgggcaaaattagtatatttaaaaat

SEQ ID NO: 25632 - DNA, 1429 bp, Heterodera glycines
cacaaatccagcattttccaaataaatcgggattgtggacaccgcccgcccccccccacccaaatccacgttcctacacttctacctaaagcaaatcgatcaaaatattgcttgctttagcctcccgcctctgccaccgccgccacacatccaaacacctctcaaaaccctacgacaaatcacccaaaaatatgacaaatttattattgcactaatgtgttctgtctgattggatggttggtaatgtgttgtgtttgtacatgttaaagaaagcaagtggattaagctctaagattttttgttgttgtaaattttgtccgtaattagttgggtgatttaatgaaatccatgagaaaataattttttttaaaattatttttaatgataaatatatggaaaaattttattattttaaatcagagttcatatcggagttgagatcaatttcaaagtacatttgtgaaatctttgtaaattcaaagaacacaccaaaaattgatcagatgcattaaaaaggggtaaatttaattaaaatatttattttaaatttttgcacaaatttgttaataacacgttttatcctaaaaaagattctaattgacagaataaatgccaaaatttttattcattttttaatattcctttaaaaaattacgcttctaattttaaaagcacaaaaaggtactgtacttttcaaaaaagcatacgatatgaaatctgttttcaattataacaaatgttcagtgattttcatattgaactgttcgcctcgttcagttctttgaataatcgttttactattttttttaaatattaaagaaaacatcaaatataattcatattcattcattcattcacaaaacaaaatttggtttatgtgtaggtctaaattgttctctcaaattttcacaaatttatgagggttttaactaaaataataatttaaaaatagatacttttgtatttttaatatacaatatttaattttttttgaactttatttaactaaaacaataatttcaaaaagtattttttttttagaagaaaactgggttattttttttcctttgttctttttttaaggttttttttaattttaagttttattttcttatttttttttctgttttttttaacttttcttgaatcaaaaggatttttaagttaaatttttgagctttatttaacttaaaaaataattttaaaaaattaaaatctttggttttagttttaacaatcaaacatatataaattatcgcttttttttaaattgaaccaatcaaataagatttatgggttttcaacggcgaaaatttgaaccctctcaaaagatgttgaaaaaccgctccgccccccccccctcccccgggcgcagctggagctgagcatttgtccggacgtacggatcacataaatccatttccctcca

SEQ ID NO: 25633 - DNA, 1805 bp, Heterodera glycines
cgccattccgaaggtaaattaacgcgaaaaagggaaaaggaaagtaattaggctaattgctttttggtatttagcagcttaacatttccttgcaccgcacttcggtcactctcttttctatgaaggttaaatgctgtccttttgctttttaatttgccgttttatcaaagggcccaaatgatgccaattcgtccatgcaatttgaactgaggctggtcagtggccgaacaggtcggccaatcttctcacccgacctgcccaattagcagatcgggcacatcccttccttcgatatttagtcgggcattccccttcccgcgatcaatgcccgatcagctcgggcatccccccccccgatcagatatgaacaatgatctcccgggtccttttgcctcacaattcaatcgctttcttttctcaataaatttttaagaattcccttccgttttcctcgccactcgcgccaattttctacttcaaaaaggtgcgcataatagcattgtgatcgcgcatcaaattttaaggcgaaaatcgcaactcggccattatttcgctgagggaccctttggatgggccgcaggaagtgcacctggaactgttggcatttttggattttcattcctttggcatttttggattttcattcctttggcattttttggattttcattcctttggcatttcccgtccttttgccgttttcgtccttccgtccgtcgttcagttctctttccctcgttcagtgtgcttcgtctgagtgtccgcggaatatttgccggaaaatacatggccaatttgacggttttcgtctcccaacaaaaagcgcaaccgcaccatccgccgcaattgcagcagaaaaacagcgcaaaaagacatcggaggaggagacggacacaccgtaacagagaagaaagaggcgcaagcggacaccgtaacggaatacgtaccgtaaccgaaaaaatcggcggatggtagtcaagtcacaaatcaaatcactcactgtcagcaactgcttttaaccggccatttcggtgtttgttctgccgaatacctcaatcattggaggatgctttttctctttttgttcatttgttttgtgccgtgaattgcaaatttcattttggcatttcattttcattttggcattcgcttttattctgattagataaatcgctagagaatgaatgaattgtctaattgttctattaatctttgtttttcaagtcaaattgacgatggcttttcctgcctgaaggaatgccatggcaccgacgcgcgttgcctttccaattttacgcgtgaaattctgttccaatttcgctccgtcccatccatccgaattatcaaaaaagcgattgaagtgccacttaatttaacatgtaatcaatcagttttagcttttagatttcgcgaattacaactgatttgaatcggacactttccgtcgaatattccctaaatggcaaaaacgcgcattatttctccgtggaacagcagcaaaatgccggtgaatatatgccacttttcaatcatttttcaatgctttttctcccttttatgcatcgtccgactgatcgaaccaatcaaaggacctcaaattgtgctcgttcggctgcacattaccataaagtcagcccgaaatgtcgcactttcgcacaatttggcattgatcgaagtgcacgtcgcagcaaatcacttttgaaaagcattaaatcaaaagttactaattgtttttatgtacatttttaatttttctcattaaattagcgcatttttgttccttcaatccaaaattatgaacattt

SEQ ID NO: 25634 - DNA, 901 bp, Heterodera glycines
tttgtgccgtgacagtccgatcaattcgtgtctgatcagaaatcatgggctgatcggtcccaaataatgacctgatcaggaaaaggtgggtgggggagggactgatcagtcctgcataatgatttttacgatcagttaaccaattcatttctcattcattgcttctccctctccctgtctccctcctctctttaaacacttttttattactttctctctcgctctctcctctctctttctcctttctctctccgctctctcttttctctcccctttaattgtccttcttatgactttctctctctcctctctgcactctttctcgtgattctttatttctttctctatggactttcttttctttctttctctctgttaatagtgcggccggggcggtgctaggtcgtttcttaaaaactgccaagtggtcgtttcttaaaaactgccaagtggtcgtttcttaaaaactgccaagtgggcgtttcttaaaaactgccaagtgggcgtttcttaaaaactgccaagtgggcgtttcttaaaaactgccaagtgggcgtttcttaaaaactgccaagtgggcgtttcttaaaaactgccaagtgggcgtttcttaaaaactgccaagtgggcgtttcttaaaaactgccaagtaggcgtttcttaaaaactgcaaaacaaatatatttatttattaaaaaatgtttatgtcagttgtttgccaacgttataaataataaaaatatatatacatataatttttacatcatttgtttgtcaacactatcttcaacaccaagctcattgtcagtaaaattaaaatattaataaatttattgcttctgatgattgtagttaataaaatttacaaatgagctcaacgatatatttaatattttttctt

SEQ ID NO: 25635 - DNA, 1137 bp, Heterodera glycines
  unsure (1)..(1137): unsure at all n locations
ttttactacaccatttttgctaggcttagatcacatgcgatttcggcactctgataatttagcgctcataatgggatgtataaagccgatggtagaaggaatggaagcgctaaaattgtttgagaagctttttgagcgtaattacgatttttacttagaccatttttttctaggcttagatcacatgcgattttcggtactctgataattttagcgctcataatgggatgtataaaggcgattgtagaaggaattggaagcgttaaattgtttgagaagctttttgatcgtaattacgatttttacttacaccattttttgctaggcttagatcacatgcgattttcggcactctgataatttagcgttcataatgggatgtataaaggcgattgtagaaggaattggaagcgctaaaattgtttgagaagctttttgagcgtaattacgatttttacttagaccattttttgctaggcttagatcacatgcgattttcggcactctgataattttagcgctcataatgggatgtataaaggcgattgtagaaggaattggaagcgctaaaattgtttgagaagctttttgagcgtaattacgatttttacttacaccattttttgctaggcttagatcacatgcgattttcggcactctgataattttagcgctcataatgggatgtataaaggcgattgtagaaggaattggaagcgctaaaattgtttgagaagctttttgagcgtaattacgatttttacttagaccatttttttctaggcttagatcacatgcgattttcggcactctgataattttagcgctcataatgggatgtataaaggcgattgtagaaggaattggaagcgctaaaattgtttgagaagctttttgatcgtaattacgatttttacttacaccattttttgctaggcttagatcacatgcgattttcggcactctgataattttagcgttcataatgggatgtataaaggcgattgtagaaggaattggaagcgctaaaattgtttgagaagctntttgagcgtaattacgatttttacttagaccatttttttctaggcttagatcacatgcgattttcggcactctgatattttagcgctcata

SEQ ID NO: 25636 - DNA, 1508 bp, Heterodera glycines
  unsure (1)..(1508): unsure at all n locations
aaaaaaaatgcaattaataaatacattttattatgataagtatgtacatcatggatgtgtaacactctcatgaagatttttgggggttcgggaagcgaattatttttatttactttaatgagtaaagtaatttatttattattgtcatctatgaaatttagtgataaaagaaccgttttcactgggaatgacttaaaactaatgattttattctaattaatgcaatgcgagaaatattgcatatcaataacaaagaaaggtaaaaaaaactaaaaagatcactacagtatgaaaatctactgtggattgacgtgaaaattaagcgaaaaatgatttattttccgaatccgaatccgccacagccaccgccgcatccgccggcacagttcacaatgattgggccgccaccacagccgccaccgccgcaacctcctgaatgttaaaatttgaatggctatatgttacccaaatttttaaatccatttttcagtgtaaatttttaaaacgatttcgcccaacttaccgcaacagcatggccgggggcacggtggtgggcacgggggagggcacggaggagggcacgggggagggcacggaggagggcacgggggagggcacggaggtgggcaagggcacgggggcggacatggcggggcacagcagcagggctggacggggcacggaggagggcagggcggaggggagcaacagcagcaacagttgttgccaccaccgccgaagagaatggcatcggaaagtggcaccagcgcaacagcaacgatcagcagaatggcagatgatcggacgaacattttttaatcggatttgattaagattaagcggctaaagggaaagaaaaataattaggtgacaagcggctcgatcttagaggaaaattgttggcaatgtcgggagacggcatgccataacccagcgaagtaccaataaagtggggcttagggaagtcactggggacgtctactcgaattttggggtcgggttactgattgtcctcgatttgttaatgagacccgttaattggggattagtcaaaacaataagaatttgtggttggaagggtgtgggatcgacatgccatttattaagtgccaaaaaaagttgagactagtgattgaggttctgtaaatgaatttgtggttgtgttgtgtgccttcgttgatccaattagccttaaatactctgtccaatcgctttgcttttgcccaatgtctcaccgttctgtgctttgtgctgctttctgtgctaatccggttctgtttcgctgctgttgcgcccgatttgctgttgatccatccgtccagacattgtgttgcgatcactttttgctgatcattttcccaaatttttccttcccctctcttttcgctgatttgtccccccttgttttgggatggcccaatgacattttccatgattanattcggtgccttttttggctttcgttattttatgcaattacatatntatgtgctccccatttgtctctt

SEQ ID NO: 25637 - DNA, 1749 bp, Heterodera glycines
cgctcggtcgtcgcgagttggatgaccgtgatcacattggcaacaaacgcttggatttggctggtccattaatggcaacgcttttccgtgctcttttccgcaacttgttaaaagaagtgttattcacatttgcttaacaattgcaaaatttgttcaaaaggtccgtctgactgctcaaaaatacatcaacaaaaatggcaattttaatttggatgtttgcgttcggcctacgcttatcactcgtggattgtcctattctttggcaaccggaaattggggagagcagaaaagagcgcatcaaactcgagcaggcgttagccaagtaaaaacaccttcgaagatccaaagttttccaactaaattcaggtgcttaatcgactcacttacactgccacactttcgcatttgcgacgatgcaattcgcctattggacgtgaagggaaattggcaaagcctcgccaattgcacaacactcagtggggaatgatttgcccagcggagacacctgaaggccaagctgtgggcctggtcaaaaacctcgctttaatggcttacatatcagtcggttcactgcctgaaccgatcctcgaattcttagaagaatggtccatggaaaacttggagggtttgtcttttgtctcttctactattttagctatttctttttgaaatttagaagtggcgccaatgtccattgcggacagcacgaaaatattcgtcaatggcgcttgggtgggcattcatcgcaatcccgaccaactgatgacaacattgctgaaattgcgtcgccaaatggacatcatcgtttccgaagtgtccatggtccgtgacattagagatcgtgaaattcgcataagtactgacgcggggcgcgtgtgtcgaccgttgttaattgtgaacgatcgcaagttggtgttgaagaagcaccacatagaacagctcaaggagagggacgtcatggacgaacagcaacagttcacttggtccgatttggtggccggcggagtggtggagcttatcgacgccatggaagagggtaaagagcaatttcaaaaaatgcaattatttacgcgaatactgaaaagtgattaagaaactattatggttgcaatgacacccgaagacctcaaaactggtgggtactgtgaaagctacacgcattgtgagattcatccggcgatgattctcggcgtctgcgcgtctatcattccttttccggaccacaaccaaagtccccgaaacacttaccaaagtgccatgggaaaacaggcgatgggtgtttacacaaccaactttcacgttcggatggacacattggcacatgtgctgtactacccgcaaaagcccctggtgaccacgcgttccatggaatatttacggtgaaacttgttttgcttttttgtgttaattatagacgttttccagtttcaatgaactccctgccggcataaatgccatcgtcgccattctttcgtatggtggctataaccaggaggactccgtgattatgaatcaggctgggattgatcgtggtctgttccgttcggtcggttttttgtttttatatgcccaatttcatgggcgtatcatttctaggtgttttaccggtcatatcgtgattcggaacaagagattgacaatgtgaacgagcaactgattgagaagccgacgcgcgacaaatgcaaagggatgcgaaacgccatttatgagaaattggacgatgacggcatcacttcgccaggcactcgg

SEQ ID NO: 25638 - DNA, 768 bp, Heterodera glycines
ttagaaaaatctgaaaaatttttctagcgtgttttttctaatttatgatgaattactaattttttcataaaatcgctagaaaaatttctcaaaaggttttcatgaaaatatttgtttgatttttttcgaattttcgggaagagggggagggaacaacaaaaattcttttgagtgcaaattaactgaaaagtatttaggccgaacgtaacatcatcatgcaagtgacatgcaatgcaactcagtccaccgacagaaatgtccgcgtggttgccctccagtgtttggtccgaatcatgtcactgtactaccgtcacatggagccttacatgggccgagcgctgttccaggtttgcaaaaacaaaaatatatgtcaaatgtatttaccaaaagtgtttttgacagattacgcttcaggcaatgaaggatgcaggtaaaagggctaaactaagcaggaatttgaaaaaactgtccatttttaagaggatgatgttgcactccaaggaattgagttttggtcaaatgtttgtgacgaagagttgaacttggcagcggaggttgaagaggttatgtatctggtgctggggcactacttcccccccccccccctcacggatcatttgcatgccccccccccataaaaaaattttttttttttaaatttctcttaaattttttttggagggggtgggggtggcgatacaggaggaactgatcaacaatattgtcaaaaattctttttcctcaacatatttcttgcttttttggtct

SEQ ID NO: 25639 - DNA, 1212 bp, Heterodera glycines
tttttatctgtggaaatcccaaagataattccataactttttatggtgtattggctcgaggtgtgtgatgccataaggaagacgagtgtgggagaaggtggaataacgaacacgggcaacctctaaaaggagcgcccatagctcactcggatagagcatttcatggtgaggaaaaagggcgtgggttcgagtcccaccgggcgagttcatgttttatgcaatgtttttgaggaaatatagtctgaccataacttattcattcttgggaattaataattggattaaatttattttgtttatgaaaggctcacatattgggacattaattacacaaaaaaaatatgaccaaaaatgggctgattaagttagaaaaacgacaatagcggaccaatggtaatggctagggcgtccaaaaatatggatataaaatcgcgaaatatggatataaaatcgcgaaatatggatataaaattgccaaaatatggacataaaattgcaaaatatggatataaatttttccaaatttaggctataatttctcaaaatttcttcaaattcgctaaatgcaaagtaaaactttcaagaatggctagatatgtattaaaaatcatttttgaagaaaaaaacacgatacattaatcaaaattttcgacaaaattttgataaaaaatgcctttttcgcaaaaattttccgatttggggtcaaaatcccaatttagctgatgggggccgttctaatagaggttttttggaaaaatcccagaatatggacataaaatatggataaaaaagccaaaatatggaaatatggacataaatccagggctcggatctgtccttatttataagatttgtccttatttggagggtccaaatcttacaaaataaaaatgtccttatttgtaagatttgtccttatttcgggctattgttcttattttgttctgctttactcaagtcacttaaaacgaaaggcccaaaaattcttataaatatattcaatgtttattgtcgatccattttggaatttggttctccggtttttaatccatatatgaaaaaagacattcatgctcttgagaatgttcacaaaacttttttacgtattgtttttagacgtaataataacaaggatgatatacccggttataatgaacttctccagctttttaaacaagaatcccttttaaaacgcagaataaaaataggctc

SEQ ID NO: 25640 - DNA, 1033 bp, Heterodera glycines
caaatatcgtaagattgtttgatagggccagacaagagaaggcaactgttggtacccaagtttgcggtaaaaaaatgataaaaaagagagccattttttggtcaagaattttttttgtttgcgtttcaaatatcgtaagattgtttgatagggccagacaagagaaggcaacagttggtaccaattttgcggtaaaaaatgagaaaaaagagatagccattttttggtcaagaattttttttgtttgcgtttcaaatatcgtaagattgtttgatagggccagacaagagaaggcaacagttggtaccaattttgcggtaaaaaaatgagaaaaaagagatagccattttttggtcaagaattttttttgtttgcgtttcaaatatcgtaagattgtttgatagggccagacaagagaaggcaacagttggtaccaattttgcggtaaaaaaatgagaaaaaagagatagccattttttggtcaagaattttttttgtttgcgtttcaaatatcgtaagattgtttgatagggccagacaagagaaggcaactgttggtaccaattttgcggtaaaaaatgagaaaaaagagataaccatttttggtcaagaattttttttgtttgcgtttcaaatatcgtaagattgtttgatagggccagacaagagaaggcaacagttggtaccaattttgcggtaaaaaaatgagaaaaaagagatagccattttttggtcaagaattttttttgtttgcgtttcaaatatcgtaagattgtttgatagggccagacaagagaaggcaactgttggtaccaagtttgcggtaaaaaaatgagaaaaagagatagccattttttggtcaagaattttttttgtttgcgtttcaaatatcgtaagattgtttgatagggccagacaagagaaggcaactgttggtaccaagtttgcgcctcggcccccctggctacgcccttggttccatgttttcaaattattatgtttaaaaaatttaaaagctatgttcatggtatgt

SEQ ID NO: 25641 - DNA, 1762 bp, Heterodera glycines
ctcccttccttttccccctttgggcctcttttgtttgctcttcgtctgtagtaaagttgagccctgaacatcgcaggacagcggggggaaggacttgtccagtcatcagaagcacttccccggccctttacagcagcagacactgttcgttcgtctgtcctccgccggtcagcgactgttcctcccgtaatggaaatggatatttttattcactcaatgaattcatttgtgagaaactcggccaggaatagcctcgggaatggaaaagaaacgactgacaaatgtggggaaaagaaaatccaaaatttaaaataaagcaaaaacaaaaaaggaaacaaacgatggggaaagacaaatgtttacttgttaaagatggaggacatcaaattaaactctttattaatcttaactgaacaaaatatttatgtaacaaatgtcaaaattgagaagcaataattggcgcggcataataaaaatttggatgttcaagtgacatttccctttcatttctttattagtgaacgcagccaaagagcaaagaaagcgaccaatcgaagcactgaagggaaagagaaacttcggcggaataaattcggtgaaactggccaattatcatcgccgccattattccgtaatctctccacaaattgttctcactgaagctcatcccttcgagcacatcggtgccattacgacaacaattcaacgggtcacaaacgatcactccgccgcttttcatgtgcggctgcggaaagggcgactgacagcctaaaaatggcaaaaatatataaaacggtataaaatgaaaatatgcggaaaaaggcacctgaaatttgatggacccgcgtccattgattgatcgccgcagtttcataagcgtaaccaaaataagagaggtatttgagcggataaaagtaagagggcagagaatcctgaaaaggaaaaatggaaggaaaagaaaggaaaagggacggacggacctgactgatgtaaaagccaccaaatgcgagcaaagggatcacaaaaattggcataacggcagtctaaacgagaaatgaattgaaaatggtgagtggaaaatggcaaacaccgaaacatcgttggctccaaaaatacaagcggaagcataagctgaaaatgaacagaaaaagagagagaatttaatgaaatgggaaatattaatggacaaacccaacccacctaaagaaacggcaacatttgttatcgaaacacagctcaaagtgaataacagcgaagaatcgaaagaggcgacaaaacgaagtgccatccaatagacaatggaggagaaaatgacagggtaaacgacgtattggaccaactgaaacaaagtgagggggggggggcaccgtttgaatgggagacaaatacggtagaaaatgaaaacctctgccaaatttttagccaaaaaatacgtgtcgacgcggtataaattggacgaatgttcgcgcataaaaatgggcaattcgtcacaaaaaacctaaaaagaaaagatgctaataacagagaaaataagtgtacatggacagctgcgaattggaacatgaaattcatattggcaaccgcttgaaacatcagtccgttgatgttcataacggtggactgagtgacagcagtgttccaataaatggagcccaaaagaagaccgacgagctaaaaagggagaagagtaagtggacggacgaatggacaaatggaaaaccaaagtttggaagagccgaactcggagtaacatcggctcacg

SEQ ID NO: 25642 - DNA, 1244 bp, Heterodera glycines
gggttgtcagtttgccattaggggtcagcatttcaaaaaatggtaaaatattgggggtccggcggtgccgatagacgttcgccggaaaaatttaatccactttattagaaaaaattgtttagggaaaatttttcattcccgggaggggggggggagattccctctctggctccatgcctgtcaaaatttgccacaatcgacaagcaatataaaaaaaaatcacaagccggttcagagaaaatcaaatattcgctgaccagttttacctgggtacaccccaaaatctcgccgccggaatctcgccggcacaaaatctcgtcgcaaatttcaaaaaaaatttttctaacaaattttccaaagaaaaaattggaaaatctttaataaaaaatttataaaaaaatttttgaaaattttttatctgaactcagattaataaaatttcaaacccctaaccccgaactgaaggcgacggcaaaaaatgttttttttgaaaaaaattcaaaaatgttcgaattcgtggttaggagttcaaaattttattaatctgagttcaggttcgtgcttagcgaccccgaaaacccctggaagcatgtttataatgccttatattaaaattttttttttatgtggtttagaccacataagtaccgaaagttataatggaaaaacatgccgaacagtgggggccgaactgaggtaaaccgagcggtaggggtcaactgcgtctgaagacaattaagaagccatagatttaatacttgaaaactgcaaaaaaacttgaatttttttgtattttgtttttaattgttttagtggctctgttccagtttacgcgtccaattagttaccatcctcactttctttggtcataactttcttaattggtcaatccaaacattttggtatgaatcaaaagcttaaagaaaaatgactaagtttgcaaattagagccaattttttaagaaaaattaaggattctaggttccggtggtgccggtaggcgccaccgggggaaaattgaaaatttgaccatattttgtagattttcatgaaaaaattcacaattttttgtattttcataaaaaattgataattttttggatattataaaaaatttagcaaaaattttttggaaaatttgggtgaggtagaggtcttggagcgggtaccaacaagaaaaagtcgaacatttttagcaaaagcatttccttaaaaattccccgtgcggaggggccttggggggg

SEQ ID NO: 25643 - DNA, 1581 bp, Heterodera glycines
ataaatccaaattcttaataaaaaagaagcaaattattaagcaaacaaaaaataccataccaaaaataaatgcaaaaggctgaaattcaattgaattcatagttaatttcatttaaaataaagatgtgatgaaattgttttatgtaaaaaaatacaaaatgaaaaatatttttgtgtattatttatgctaattgagcacatttaaaatttcggtctaattttgcgtccaaatgaattgttccaatgtcaaacgttttgcgtggaattggatccaagctgacaaatgtgctggggaccttaacacttaacttaatcggcaaaatttaattatttaaaaatatatttaaattattttttcacgactccttcttacaaaatcaaatcgctttaaaaagcatttcctcatttttcgtgtctcactaattagccctttattaccttaatgaccatttgcacaatgcacgggacattgcactccttaattaattaaagatggattaacagcttgtttatggtaattgcgtttccaaatttacgtggaaaatgatcagtcgcgggtccatttccgccatcgcttcagcctcctcttcgtggccgatcagctcaaaattgcccgactgatcagttgtgccctctgtcatcatgtcatcatgttcaagcgctagaatttaaaaaaaatttaaaaatataaaatttacataaaaaatttttaaattttcgaaattcgcacattccctgtcgtacagtctgacggtgagcccttcgtacggatttccattgcaaaacattgatccccgaaccgcaacggaccgagcagaattttcgaggccaaaaacgagaaattgtgaagcgaaatgtattgttaataaaatggagcacaaaagcatttgtttggtgggcatcgtttaaaaatcgaaaaaatttgaaatggaatggaaggacaaattaggaggaaggaaatcagtgtccatttcgggcaaatttaattggatcatttgaccttctaatttaattatgccattcttccccccgccccattgacgtcaatgtcttaatgaatttgcgttaattaaataaacataaaaataaaataattaagtaaatccattgaataaatgaatgaaaaaattatttttttcaacttctgagaaaataagaaatttaaaaatgggttgcgcagacatcaataaatcacaattaaattgaattggaactgttgagtgaaaatgggtgcaccgcaaaattgggccaatcgatcgcccgagggctaagaaaggaaataataaataaaaattaattacaattagcaaaatattaaaaaagataaaaatcaaaaatgccaaaaaactttttaatatacatatgctctgtaataaaattaaggcaatgggaacataaaaatcttgatcaatctcgatcatcatgaagaagtggtctgatcacttcggtcgctccctctcttcctctctcgcgttctctttaccgtagattcattttaccgtatccctagatgcccaccctaaatagaagaaataaaactaaggatttttcatttttaagaaatattttaacaaattacgc

SEQ ID NO: 25644 - DNA, 1663 bp, Heterodera glycines
  unsure (1)..(1663): unsure at all n locations
caaatcctgcaagttttgcagaccacccatgcatttggtaatctgacgcatccgatcagcacgataattgaaaaagaccaatgtgtcattgtctgaaattgcaaattctgcttgaaaatgaatgactaacaataagcatctttagagccggtacagcaaaaaggccgagaacaaaaaatttttttttcgacgttttgcttttttgggtggagggagcaatatttatttcctaaaaattggtatatccttttggttttattcatttattttctatttctgaaaatagtactattacatagtttcatggtggttgatcatgaatgtgtttgttttttcaaaccaaagattcttcctttgttttttccttgaaaaatttacccccccccctaaaattcctggataaaaacagcaattttttcatacctttcacacgcgcttcgtccgaaaacacgatgggcatcagaaattcgtcagtctgttggattgcgtagcgcccgttcaccaattgtacagcattcgccggttcgcactgttcgcccactccgccaaccaatgcctcgtaggcaacctttaggaaaaatgaaaatccaaaaaatgatattttttcgaaaatgagtgccttaattcgatcccatcgtttgtcacggtccatggcataataacgaccaacaatggttgccaattcgccatagtcttcggcaattaagaagtcaagcagttgttgcaagaagacggctaaaaatggcgggagcatatataatcgcagatttgttaaattgaattttttattttacctccactcgttggcgatgcgtcacggccgtcggcaaaaaagtggacaaaaacttttggcacttttaattgtttgaaggaatccaacagaccaaacaaatggcctatgtgcgagtgagcaccgccgtcactgatctgaacatttttgtatttgattggagaaaatggaataaaaaacgattttttataaaactcaccaaacccaacaaatggagtcgtccgtttccgttgattgcttgttctgcggcgtcgatcacttcgctgttctcaatcagtttcttcttgcgcacttccatattgatgcgaacaaagtcctaaacgaaattatgaatgaggacgtggaattccatttaaaatgtgagcgttagttgaaaagtagcactttttgaaaatttttaaaagccaagtggggacccaattggacagcaatttattttaatatgatgcctagcgtaaaaacatttttatatttctgaacagggattcggaaatgactctgaaaacctcgggaaaagttttacgatttttagcactattgcagtttacacgacctaaaaaaatttacaaccaagaagtccccacatttcaacaagcgctaaaaattttgatgactaaaaaaataacctggtaaatcacgcgacccgctccgatgttcagatggccacattcggaattgcccataaccccctcttncagtccaacatgttcaccatgcgcttccaactgttgccaattgccggaacaanngtggtccatcacccggtgtgtccgcatttgcaatggcattgcctttcttctgatcagagagtccccatccgtcaataacatcagcacacatttggtttccattaagcgattattaatgattttt

SEQ ID NO: 25645 - DNA, 795 bp, Heterodera glycines
tgctatagttaagcaggaccgggattctgtcaaaaagctgggaccacaattttcatccaaaatcgaaatactcgaaaaaaaaaattctcatttttaattgaattaaatcaatgaattcttggtaatggaagggtgttactcgaaattagtacgcctccagctaaaatcgaacgtttgcgcccgtttttacaaaaatttttaaatttacaatttggaaaacttctaccgttttctttttcaaacttttatgatgaactactaagttatgtcaaaaagtttttaaaaacgctaaaaagttttttttaaatttaaaatttcttctagaaaatttgttacgttttttcttgaaaaatctcaaaataatgagcccgtcatccccccgccctcaacagatgaacgagcacttggtccgatgtgaggccgaacgtccgtatgtgtgcgatgcgctggtcggcacgcagaagtgcggacggcgttttacctccgccaagggcatgggcgttcaccagggcatgtaccacacggggaaggagaaggggtcgcgcttcaactgcaagcactgctcgcacggcaccaacaatgagcgatcattttacgaccaccaagagcggtgtggtcgcggcgctattgtgcgacggtcgcgttcccgctcgcgtgggcccagtgtgtcgcgggggcccagcatggtgcgtgagctgagcggtgagccgcgtgatcggagcgtgccgcgtgagcgaagcgatgcactgcgtgatcggagcgtgccgcgtgaacggagcgtgccgcgcgagcgag

SEQ ID NO: 25646 - DNA, 995 bp, Heterodera glycines
agaaacaatttccagaacaattagtatcggcgtaattattctgagaatgcggttgaattcctattactgtgagcagaaaaagagatagccaattttccaaattttcccaaacaaacgcgcagagaaacaaattccagaacaattagtatcggcgtaattattctgagaatgcggttggaattcctattactgttgagcagaaaaagagatagccaattttccaaatttttcccaaacaaacgcgccgagaaacaaattccagaacaattagtatcggcgtaattattctgagaatgcggttggaattcctattactgttgagcagaaaaagagatagccaattttccaaatttttcccaaacaaacgcgccgagaaacaaattccagaacaattagtatcggcgtaattattctgagaatgcggttggaattcctattactgttgagcagaaaaagagatagccaattttccaaatttttcccaaacaaacgcgcagagaaacaaattccagaacaattagtatcggcgtaattattctgagaatgcggttggaattcctattactgttgagcagaaaaagagatagccaattttccaaatttttcccaaacaaacgcgccgagaaacaaattccagaacaattagtatcggcgtaattattctgagaatgcggttggaattcctattactgttgagcagaaaaagagatagccaattttccaaatttttcccaaacaaacgcgcagagaaacaaattccagaacaattagtatcggcgtaattattctgagaatgcggttggaattcctattactgttgagcagaaaaagagatagccaattttccaaatttttcccaaacaaacgcgccgagaaacaaattccagaacaattagtatcggcgtaattattctgagaatgcggttggaattcctattactgttgagcagaaaatgagatagccaattttccaaatttttcccaaacaaacgcgc

SEQ ID NO: 25647 - DNA, 1026 bp, Heterodera glycines
  unsure (1)..(1026): unsure at all n locations
cgcaaagaaaagcagaattcttcttggcacggttttttattacgggtcccttattattcaattaacaataaaaactaagtaattatcctataaaagtttcctttatccattgaatcactttttgccacatttcacgagcagttgaaggggtggaaatgtgaatgaactgaccaacatgcatatgctataggtgacgaactgaaaaaacaaatcaaattaaaatgaacatttaaactgtgaaaaagaaatgcatttttaattatctttaaaattaatttattaattttattttattttaatttaaattatataaatgtttctagttcttatggataatttaattattaattaaaaatgattgaaataatgtatttatagtattaattaattatttgccccacttgtgcttcaagtgacaatgcaaaagcaccatttacatcgacaataagcagtgtgacgactgattggagcagaagcgcaacaaaactgttaatgccaaacacgaggccataggcgccatttggtgacaaatgagtggcaatcaaattgctgagcaaattaatgaggcaattaaacatttttaattgtttaaaactcaatctcccggcttaattcttttagaatttggtaataatccacctaagatttttttaattttgttcaaaataacctaaaatatagtcaataaaagatgcgggttttttatttataggattgcccggcatttttgggggtagaatttccgaaattttttgaatcatcgaatttcaaattgccgaaaatttttggcgccatagtgacctggaaatggcattgagcgtattgtaaaacatataaagcacaatgtaaagaatgtaatcggcaaagagcgagtcaaagtgcaccattgcatacagtaaccaggccatggacattgtggaaacgcacacaccacgacactacggtactcggcccatttgagcggaacgaactgngccaaaatacaacaagcgtgtcttaaaaacgagttaatcatattgataacat

SEQ ID NO: 25648 - DNA, 1091 bp, Heterodera glycines
  unsure (1)..(1091): unsure at all n locations
aaaagatgaaattcttcgctctggggttgtcttatagcaaattcttgatttaacagaacatcgcgagaagttcatttcatttctagaaaatttttcattatatttcctntaaaagttgaattntaaaaatgttcttaatttcttaaatatttttaagtcttcaatatttttcttgaaaatttctgcctgagcaattgcttttatagggagcttaagctggccagcagcttggtggtctcatatttttgtcctcttaccttacctctttattctgtcgatttctctttttatttattcagctcttttcacgttttcgcacattatttctcattgaatctgcttcgcaccattctcttttcccctattaatttaaaattctgaaatattaatcttaaaattatcaattaatcagctcaagtaatgataattgttgcttattagttttccagaaaatcagctttacctaccattattggaatgcttattgggctgtgagtgatgcttcaaaatattagtttcattaaatacttttatagtttggtcttgttttcaattttaccaaaatttaatatattgtatggcattttagtgcataattttatgtttgccaattttcaggtcaatggtaaaactgggctgctgaaaacacattgacatattttgatcatcaaaattacttgtttaataaacaagaaaaaaatacaaatgaattttacacccaaaatatttctatattacttaatattaatcaattatattaacatatttaaccaaaagatttacaaaaaaaaaattaattatataaattatataattcattaatttgatcaaaattattaaaaaagccgattaatacaaataaattatagaacattaaatttttatttatattaattttaagaaagattttttatggataaatttttataatatatatttatcttttaggcttaattatacacgtgctgaatgtccttgaagttttcaaggaaattttttatttcataggggtatttttttttcattgctgggcgacgatgttttagtcaaattaaaaaaataatgtcaataagcacaaaaaagcataagat

SEQ ID NO: 25649 - DNA, 1164 bp, Heterodera glycines
ctgcggtctcagccgccgctcccccaacaacgccaccgtcaaaatttgttgttaatttcgaagtgcccttcttgagggtatgagctattccgcttttccctgagtttagtgcagcccttaatgcagttctttctgcatgaaccacagaataatggcggccaccgtttcgtaggagatgacgaaaaagcgtgaggattgaccgtaaaatatgcgtctctccatgggtagaaataagagcggaaaagagaatcaaaaggataagggaacaatgcattttgactagttgctaggagacaaattgctacttataagcaaccagaaaagctcagacagctgacgtaggaagtgttttcgacagcctatgtcaaggtcccgcctaggggagaagcaaagtccaattctcactgctgacagctgttcattccttttatttctgacgttgaagatgcttgtgacagctgatggcaactctctgggcgagggctaggccaattctcattgccgacagccgttaaaaaatcttattttttgtcaacaagccatgataaaatgatgcgaattggaattcatgcaactgtcttttttttctgcctaatttcaaaaagctttgttgaagccccagccgaccgaacaacaaagggcaagtatttaatcctgtttaatgggtatgagtggcggaaaaaaaaatgtgatagcggcaggagaagttcaggtcgtttgatgtagtaagacttgtccaatcttggtataggtctgggtttgtccaagaaaaacttgtccaggccgcgctcattctgccgttggatcgatcgagcttcgcgttgttacagcacataaccatttaatcgattcaacgcaacataccgtaattaaaatgataagggtgaattatttggaatgattaggtgcgtgatcgcaaggaacaaatcaagcagagagccgcaaatcatgcagatgctcccagaaatattattggggcggcacgggctaatttggatgatgaatcgcttttaaatatgccgtcaacttcaactgctaaccgtttaatttccaggcaaagacatattccaggacgagaaaacgttgatcaaaatgacgtcaacgccattgtccttgaagtaataaagatatatagatattttaatttcttgttaaagggcgaat

SEQ ID NO: 25650 - DNA, 2111 bp, Heterodera glycines
  unsure (1)..(2111): unsure at all n locations
attttatcaccttcaaacaaacattgattatttagattattcatttcgttttgtgatgagcaaaccaccagttccgacgcggattggcccatttcttaaaatgtggcacgatttttggggatctttttcgcgcgtcaaaaaaaggaaattcgttggtgaagacagcgcaggcaatcgcttttacgaaattttggagggaaaccgaaaaggaaatgtgaacaggtaggaaatgttttttttgctttcatatttttattttaccataaatctgacggaattgtccagggaatgacggcatttggttatttttgtcaaactatcgcctatttttcaatcatttaatttttatgggaatggtccgcagtaccagagaaatatgtgattttgtttacagaacaataggactaaagcatcacacacactgagaaccccgcttttcgtttaggggttttgagccgcccccggacgtcgaagttccgtcagaaccaccggtggaatggcgcgcgtggctcaacaaaagcaggcgtttccctccgtcggaagaagaaattcagctgaacctactcaaacaacaagtaaaaaagcacagaataaacaatgtaacctctgcgccattctaaaattgcgacaattgcaattcaaaatttaaaaaaatcgttgaaattatctttttttaattgctcttttcccaatagcaatgtttatttgttactttttaggctcaactggtacaaaacacagaaacggaaaagaaagcgccaatgattgtgtcgacgggccctggggcagcggaaactgacaaaaggcgaaatatggcagggaaagaataccctaagtacaccgaagaagagtacgagggaattgcgggggcaaagacgagagagcaattggagagggagcagaaggagggcaagtggaagtacaaaaaattctttttcgagaaataattggctgacaaaaccatcatgtttattgttttagctgttgtttttaataggaatattgataaaaacaatgaaagaatattgatgattatcaaacattaaaattgttttaaacaattgacgattattaaacattgaaattatttggattgtgcaattaaggaacaatgaaagaaagaagtcataaaaggcagtgaaaatgaaagacattctctcgaaagactaaaggaaagtcgaaggttcaaaaagtaggttaattgctatccgaaacggctttttcaaccttagtggttggtcatcacttttatttcttatgcaaaacgaataaaccctgctttattcggtgctttcgcttttgttgaaggagttcgcgttgctgtccacgatcatgtccctgacggaagtgcccactgaccaaacgaattccgggtcgtcggcacattttaacgcggtgacgcgactgtcctcgtaataggcaccctcacagagatcgtcggagaaagcgacgttcaacacgcgagtcgcggccaacagcggcgacctgcgaaatttaagaggaaaagcaaaataaagaaattggcaaaaaaaagaccaaagcaccaacctcaaaaatggtctcaaaaatccgttgatgaataatcggaagggccaaaaaacatttcggtacaatttgccaggcacaacgccgggatggacactgacaacggcgattttactctgtcgaattctaaaatacggcataaaatagaaaaccaatctataatactttaaaacatggttcaaatgtttgacgtaaatgccgagcaacaattttgagtcggcgtacgatttatagtcgttgatgcgacggcaccaaaacttttctaaaaaatctcagtgaaattaaattaaaataatttaagcgggtaaatttcattttttaaatatttaattcgttaaataatgatggcatttgcccttcattcgccgtgccttcgttctccaaaagtagtgacagttcgccggcatgcgcagtgcacgaggaaaggaaaacggcgcggggcgaacggaagcgactgcactccaaccgaccggcaaaggaggcgaaaagctgcgcatttgccagcacattcacncgcgagatgnggctcaatgatggaacagccgaagcgaccgatgcngaaggga

SEQ ID NO: 25651 - DNA, 1849 bp, Heterodera glycines
tccaaaagagtaaaaacccacgaaatgtccaaaatttttcaaaatttataaaaacaaaatgagtctaatttaggatttttagggttttcggggtcgctgaatacgaatataccatttatattaccccttgcctaaccttaggcccatctgaataataaaaaactcaaattcgagacttggacatttcgtggcctggacattttgtgggtcagcgaataagtagcaaaattaaggcattccatttccatgaaaatcactcaaaaggccaatcttttgtcttacaaatcgatttataacgcaaaaactgtttttggatgcggtgaaaaagagggcacaaaatactgcacaaatgtaaaaaaatatgcaaacaaacggaaacggcgggacctaagcaagacattttttcattcgttaaaatttaataaatttttggtgaataaatattttttaatttgcatttttatacatgtttaagaaaaaataagaataatttaacgaaaataaaggaataatttcaaaattacatatgacaattctcccattactcttcctctttcttcgcctcttttttgtcttccgtttgtccctctttgtcactgatctgatcggaaatccaccgcaagtacggctctgacccgtactcaattggaaatgccacaaattcggggacctcgtaactgtgaaagatgcaaagaaatgggtgctttattttaatgcttgatcattagggtttaagttgtatgcactaaaaaatgccaaatatgcgcataaaatatgcactaaaaatcccccaaatatgccctaaaacccgaaaaatgcccaaatatgcactaaaatatgctttaaaaaactgccaaaaatggcttttagccctcaaaaaatgccaaaaattgtgtataaattaagaattacttttaaaaaaccaaaacaagggctaaggagcattttcggtccttaggggtgtattttcgcatttttcgtatgaaaattcgccaaaaatgcccgaaatatgttctcaaaacgcaaaaatggccaaatatgcagttattctcgaaaacccccaaaatatgcttttatatgcactaaaaaccttcaccaaatcaaaaaattttaacgtagaaatgctatttttgagcccctttcttcatagcatatgcgcagaaatatccaaaatcatacaacttataaccctattgatcattaattacgggtgcagtttgatcactgcctctctgagctgttccagccgttctctgcccgttttgatgatcagcaatgactcgctgtcctcctccacctttcccttccattcgtagactgaagtaatctgtggcacaatgttcacacaagcggccaaccgactgcggaccaattcatgagcaattcgtttgccaatttcagcggagggaacggacacataaacaacctttgaagaaaagaaagagaaactgatttggggaaaattgtaccaaacaaagaacagaagagaaaaccgtttaaattaggaggggggggggagattagctaataattgtccacctaaagcatcgtttaaatgaaataagccttaaataaaaataagttgagtttgaaattatatattgtggcacatggttggatcattctaaaacttattcatggccaatcatacaaaatgctttttgcttttcccaaataatttgccttttgctaaataatcagaaaaaggggccactgacagagaaacgcgaaagactcgccactgcacgacccgccatcagttgctgctgctgttctgttgtgggatttgtttgagtcgacaatcgccgatagaaatgagaataaaaaacggaagcgacaattaaaaatg

SEQ ID NO: 25652 - DNA, 1144 bp, Heterodera glycines
  unsure (1)..(1144): unsure at all n locations
ggaaaaagaatgaaatttgtaaaaatgatgccaaagaaagcacacccttttctgacacaaccgaacccatcgaatccccattaagcggcgcatacccattaataatacncgatgaatgaacgaaccaatgctaatgtgtcccgcatcgcacgcgatcatcagcggagtcatgccaacttccaggcccaagtcgacgttggcaccgtgcgcaagcagcacacggcacactcccaaaaagccgtacgaagcggcgacccaaaggggagtcccatctaataaaaattcgttttgaaaaggcccaaagccatttttggctcacaatatttgtaatcgccgttgattttccgaaggctcatttggtgcgggtcggctcccttctccaactgagaaaaatagtcaaatgagtgccaatcattggaatttgtcccgggcccaacggtggaaaagtctcggcttttagggtaacagaatttcttctataatgcaattagtcactgatcaggcctaatgtcccttttctgtctgttccatggcatgatcagctgtttttttcgattggtgatcaaaatgctgcttatcgcccgatttgacagaaactcggacataaaccatgtctttgacttagtgtgccaaaacattttttgtctttttgagatttaagagccaatgttcgaatttgctgttgacatgccaaaactgccgcaacttccggcttgtttcccactgtggcgatcagcagcggagtcagccgcttttcggtgccctttggggcgtactgtatgtacagtaagtgactgagttcgtcgcccgggagcgaattgagcagggcacgcaactcttccgctttatttttgtagacaaaatcaaaaaattgcttcataataacccaccattcagctccagcatatcccaccccccccccacccccctcaccccctttcttggcccacccattgaattttccccccgtttttttttcttgcggtcatcgctttttcgagactctcgactcttgagctcgagaatttttttgggtttcaattttgttgaataatcctcgagtcattttgacaaaatgtcgttcgttggtaaaatttcgtcgacggatttataaaaaaatattttggccttaaaattacaaatt

SEQ ID NO: 25653 - DNA, 1724 bp, Heterodera glycines
  unsure (1)..(1724): unsure at all n locations
atttatatttcgagttaagtctataaaagggaatgtnaaagcgtcagaaagttgnaatattcaaaggatttaagatctgttcggccataaattattttatgagccatgaacagatcagaaaagctttcgcctgctttcaagtgttggcagttgaaggtattctaatctttgttggtatggaatgggtggaaggctgcatntaaaaagaactaaaaaacggccgcataataattgaggggagagaatacgcacaaatggcgacggatgggcaccagagaaagaggggaacacaaaaatattgggggacaccacacacaacaaacacaaatgactgtgcagcgtgcccagcagacacttacagaccatttgcgctccgacctttgagcctttgatcaaaaaagggaattcaaaaattcattttcttcctctacagtcggaaatcatggactataatttgggaaatcccaggaacagaatacctaatggtgctttttcataaacaaaaaggacaaggcacggatcatgctataattacctagaaagtgtctttaattgtcgggatcatgctggatccccctatttgctgcttttggagctttcttttccatacaatggaacgaataaaaaaggtcatttacaaattgctgagaaaatccagtgtttacaactaatataagtgataaataaacaaaaagtgaattgcaaaaaggcatttcaactgtcgtcgtttattcacttttttcgtgcggttgtggacgaagacagcgacgaagccgattggagcgtgtcgaagaagtcgacaaatcccgacaaattgtcacgtgactgctccaagaagcctcgatttgaaggaggaccacccacgtcaccagcagttgattgagtagtggaagactttcccaatttttcaccggagactgcagcgggtgtccgtagtggcgctttctgcaaaaatttcaaattgtgcgaaaacagtttttggggaaattacatccccggcattcttcaaaaaggtactccaggaaaaccacgtcagggtttgtaacataatccacggtgcaactttttgaatgggttgttcagcggtgacgcatccaacaacatcgaatcggacaacggcaccaacattgtggagctgttcatggttgtgttgctgcagccgatcagatgactgctgctgttgatgctggcatcttgcgattgcgcagtggtagaggtgttattgtcaatgacaacaattgcattctcatcattttcatggtcccaaagcgcggaagaaagagtgacagatgaggaggacaaagatgatggcaccgacggcggagggagacacactttggcattttgtttatgctttttggcactaaatatgtatagggctaattgtgagattaattgctcttcatcattcacccgtcttctgcccgtaaagaatccaacaatgcgtcagcagtgacttttcgcttcggtaccaacattttgttcacatttggggccaccgtatcagcgacggtcctttcagtcccatccttagctaaatgtaaaattttaaaatttgatcagcattttgttccacctccattttgcactctccgatggtataacatggaattgccataatttaaatttgcgctctgctgttgctgccttttgcgctgctgttccgcctcaaccgcttgtaaatgttcgcgtccaattgaagcgatctgatcacagtcaacgaa

SEQ ID NO: 25654 - DNA, 800 bp, Heterodera glycines
attttgaccatatttttagcagattttcattaaaaaattctttaaaaccacaaaatgaggctaaagcctcagatctacgaaccctgattttaaataatatattattacttaatctttattttagggaatccatccctcaattgaaactttgaatttgttagacaattttgtgggttctgctggtcaacagaatgtagaagaggtgaattttgactttcgaattaaaaaaaatttacatcattttttattggaggtcagtggtgatcagaaagtggagaaaacaaaagaatgatcagaaaaacaaacgattataagcagtttgacaatgcaaagacacattgattttaaatcataatagtaataagcattacttacataaaaaaaatattttaaataaaaataatgcattcaaatttgagtttttcctccgacgctcgttgaaataaaagtcgtggaagaaattccccaacaaatttgtctgggatggcaggggaaatttgaaaaatgtccgaagcaacaaactcatcggggagaaaatattttgataaaagtcaaaaaaagataacagaattttcaaatcaaaaaaggcttggaaaaattggtgctaggtcgtcgtttttttaaatccaccattttagctagtttttcgacaaaatatggtataacttcgctgaaaagcaataaaattttacatttttggtaccattcaatagccaagctttttttctattagcctgcaaaatttaaaataaaattatcaaatttaacataagttatgacagaaaaccagttgggctatt

SEQ ID NO: 25655 - DNA, 827 bp, Heterodera glycines
ttatggcaaattttgctaatctaaagaattttcaatgttgagtcgaccgacttaaacttggtatatctctggaagccatcagccattttcagcaatcaaccccacgttttgaagcttagatgtagagctttcaaaaatggggtcgggaacaccatttcgatttaaggaacaggatttagaggcaaagcaagaaattttagggggtaaagaatcatgcaaaaatttcaaagaaactggtatatttttcttctgtgctgtcgtcgatttttaggatcttttcgaaagttgtaggataatgttccagctttccaatgacaccttgactgtgacctgaaacaagttctatgccgagctacaagcctcagaagctcgactagtcggtgatacttagaaaaaacacaccaactcacgagcccgggtattcccaattgatatggaaccgaaataaaggcgccaatcaattcgtcatagtcgaaaacctagggtatatggtttccgaacaaatctgagacactcgccaaaaactgttccatcgttcttaaggcaaaagtcgatttttataaaaattggcatttaaaatttttacatttttttcaaaaattgttcaaatcttcacattttgctcggaaccgctccgagacccccttcttctcccttctgagcaccggctcccggtaccataaataatatgtttagaactttgcgtcaagaattcaagatttatatgaaaaagctgactgacaaaatcttatgtaaggtcaatgcaacaactacaacgacgactacaacaccaactcatgccctacccaagagtacagtatcaatca

SEQ ID NO: 25656 - DNA, 679 bp, Heterodera glycines
cacccgcaactgtccaattttcgtgtcaactttatcgtgcaaaagtcgtttcgtgtcaacattatgtacgcccatcttcggcgctcatgagcctctaattcgtaataaaactaacagtatgcgcaaaacttactgacaacttcccaagatattcgagaattctgtaagagcggaaataaatcttcaacaacacatcttccaccctcagtaaacaaataaaagaaaatattcaatgttgatatgttaagtataaaccatttgaattcgccttcaatttgtccaagaagagtaatcaaaattattatagctagtaaaaatagattgatgagagcaagaacatatctaataggtttaaacataaatgctatatatttcccaaatttgtccatatctggggtcaaacttatactcttgttcgagcacacataagtaaccttatatgtgtcgtttataatactgacagcagtgtgatttaacgtaatgtaatcaccgaatgtagcgtttttatgaagaatatccgatgagttaaagaaggtaacaacatatatagagctatctttatgggaagtttcgtgttgggcgctgaacttttaagggtactttgggtactttgactccgcgagagaggatcaatttttggggtaatgttggatatttggctaagtaaaaaattatgtga

SEQ ID NO: 25657 - DNA, 1674 bp, Heterodera glycines
  unsure (1)..(1674): unsure at all n locations
tttttctcaacacaattttttatttancagtatgatcacaatgattaattgaaaaattgttatctgatcgcctttgaatacacctagagtattttgaactcgtcggttttgttttcgtccttctttgtgtgttttagctccgtatcgggctttgactcagcctttcgtttcactgaattttttgtttatttatttgtttgtttgtgattttggtcttgattagaactaaacgtctaaatcagacttttgattgatgaagaacaggcacaacaattttctctttaaacagatgaccggctttttacagttctcagatcagtgatcagcttttgttgttgttgttgttgttgttgttgttgttgttgttgttggtctttgtcgtttgcacttcccgggtcgtggcaccaaaattgatgggatgcactggttgatccaatcaattaatttaatattttatttgggatggggcgacaaaggacacaaagtggaaaatttggtagatttctgatcacaattgatcaatatccgcgatgcttcgaatgcccgagttgtgatgtattcagagcgagttgttgtccggcttgatgagtgaagagaaccgatgggctagcagagtgaattggttgaagcatgcttaaactgaaaacccttcccctttttataccaaaattttttggttatttaatagcattcaaaatttccacattatctttttatggttttttcatttctaaattattttttatcgttttagttttttcttcccttttatttaagaaaggaaaacttttcataaacaattttaattgcttttacgttcaaccgttttattgtggaataaatttatttattatttggggcgttttattagattatttttagtttttattgcgagaagcatttgcttcgtttttatgaattcattttgttttatttatttattttattttacttttattttatattcctttatttatttaatttaattttaaaaataaaaattttatgaaatgtttattttattttggatttatttttattaatattttgtattttcatgtaaaattcttattattttaatttagttttgtttttattaatagttttatattttttcggatttaatccgacacccctgggagaagggagtgggaaacatgatttcaaaattttcaattttttctagtctaatctactcaaaacggttcagaattcaataaaaataacattcacggtgcgaaaaatggggtttgacaagtttattggggaaaaaaagactttacaaaataatacccctgggagaagggagtgggaaacatgatttcaaaattttcaattttttctagtctaatctactcaaaacggttcagaattcaataaaaataacattcacggtgcgaaaaatggggtttgaaaagtttattttgaaaaaaagactttacaaaataatacccctgggagaagggagtgggaaacatgatttcaaaattttcaatgttttctagtctaatctactcaaaacggttcagaattgaataaaaataacattcacggtgcgaaaaatggggtttgacaagtttattgtggaaaaaaagactttacaaaataatacccctgcgagaagggagtgggaaacatgatttcnaaatttttcatgttttctagtctatctac

SEQ ID NO: 25658 - DNA, 1674 bp, Heterodera glycines
tttttacgccatctttccgatatgaaaatataacactcctccaccccctaatatcttttattggttgaaacttttggctcttatccctgttcctaatgcgtgaaagaccttccgtgtccatccgtcgcttctttgccattacgacacaattttcctccaataatttatccttttctcgcagcaacgattgaatgaattcggcggtggctgctaaaattgcagcctttgacattttgtcgccgtctttccgtggcaacaattgacggagcgcttggaatccagcattgatggactgaaaatggaaattcaaaatggacatctaacaaaaaaacgaaaaaaaacccaactttattatgacataccattctctaaaaacaaaacaatttgtttttaaataatgactgttctttgggtataatattcgattaattaatgaagactgataaaacataaagttagaaaatgcacaaatcacttttatttttgtccaacctgcatgcgccttcgctcgttgcaattggcaatttgacggcgcaatcggcgatcgtccaagtcgttgttgattgagtcggtgaacatttgccggtcatttgtcctttcgtccatggaaaatcggcagtttcgatgactcccattgcttacgccgctttgatcgccgccgctttcgtcagattggtcaaaatccgccgatgaacattttgtgtcaggcgattggctgaaagaaaaaagaaatttctcgcaaatggaaaggcgaaacctttccggcagccaaacgtcgcgacgtgccacggcatcgtcgaccgcctctataagaagctcccccctcttcccaccacatccattcttcaccttctcagcaaccattttctccattaaaactgcggttgttgctgttgtcaaggtggcggtggcacagctgccgtcctccaacatcaaaatgaagtcatccgtcttcaccattcctttttgcaggtttgctgatgcaaatgaaagatcaaaaaagatgggacagcaatggaaagaggggagggagatcaacctaaagaacggaattggagggatggcggaaagtcttttgaataaatgggtttgaagtaagaagaaaggtaaatgatcacacacaatcgacaattaattaaatgggaacgcagtgcacaaaaaatgttgggggagagcaggggaagaagatgagatggcaaaaaagacgaacgatcatttctgactggaccgaccctatcggggacgggctgcagtgcagggaaaggcgaaagggaggggggggggggggctgctgcattgcattttccggatgttagatggagccataccatcgccagcccagcagcagagcacagagaatgagtgaactgagacgagagagaacggagagtggcgaggtgggctagagaagggaaaaagagacggagggacggccaaccgatggtcggccagcgggcgccccccccccccccccggcaatgcctttctctccgtttcactatttgcttttctgcactatttcgctgtttctgctcaaggtccaactatttggtacaacacacagctggtaataggtacactctttaatcgttcattattataatttttgtcggtgcccgcgtgcaccttcctcacaaatgttctttgccctgagtgaccaatgtatgccgcgac

SEQ ID NO: 25659 - DNA, 990 bp, Heterodera glycines
aatgcccccgtccgctgatggcacagggtcgttcgagatgacttgtggacgctgcccaccattacggggcagctgcctcacgagccatgcttttggggtgcttccatacgttggagctgtggtataccgctcagtgctgcacgtgtgaaagcctgtgtatggctgctgcgtggcaatgtgtcggtggcgggccgcctcgcttggctggttcgctgcgccaatgtgggatgcacgctcgtggggcgacctaacggctgtgctggcgtctgtgcgtcgttgagcggttgttgtggcaggcacataacacactgactggggatggtggtttcgttcccggtcttacgtgccgtaactagcggtgtgtttgtgcttgctgctacgtccgtggccgtgatgagacgacgcggtagtgcccgtgcttggcctagcacgtggcttaagactcaatgagtgtcagctcgggcaccgccagctttttctttttttttcattatttttttttacacttctgttgaagaatgaattctagtcttatcggtggatcactcggctcgtggatcgatgaagaacgcagccaactgcgataattagtgcgaactgcagaaaccttgaacacaaaacattcgaatgcacattgcgccattggagttacatccattggcacgcctggttcagggtcgttaccataaaatgcactgcttgtgcgttgcttcgtgggatcatgtacttgtacgtgttcttacgttacttgctcagctcggctgtggggttttggtgtgctggcgcgaacttgtggttctaattcgcgttttacggaccgtaactcaagcgcaccaatgctttgcatgctgtggcggagtgcctggattactggcattcctgctttgatttttcgacctgaactcagacgtgaacacccgctgaacttaagcatatcagtaagcggaggaaaagaaactaacgaggattcccgtagtaacggcgagtgaa

SEQ ID NO: 25660 - DNA, 1701 bp, Heterodera glycines
aatgatcagctaaaatcatcccgattgaaaggaacgtcttctgtcgggggatctctcgggcccaattgcccggtcaacttggtggttaagtgccaagctttgggtgagatcaaggcaagaataatctttgatttaatttttctgggggtactcacctggcagatttgagttgccggccggacgataaaaggcaactgtaaaataagtaaatttactaattacatgtctatttttggccatgaaaacaagtgcaacaagtgaaaaaaaattcaaatttgaaatgcctaccgattgccagacagtttttggcggtgttccaatgccgtgccacacccatttccattgccgaccgccacaccatttgcgtgaagttcttcgtttctatgataattcaaaaaattgttgaataatcgatagtgctcgagactttcgaaatctgtgtcaaaatttgacgcgggaatttaattttcgttaaaaatttttggaaataaataatgattggaaatttcatttacgaaagtgacggcgcctcgtttcgagagtatggttttttggcgccgaattagaaaactatgccggatacaaagagctggacaattcagtacccataaaaaagtttgtcccgaccgtcattgttccatcataaaatttcccagagtgatcttaatgaataatcaacaggtgtcggaaataaccgaaaaccacaacaatctgccttttgagtggcggattggtgttgtacatgaaatgccgtgctaactcagtcccgcccaaaacttattgtattttctgctgtcctcctaccattgttccaccgtggccgcgcaaagtccatcttttgtgcttcggctgcccagtgtgccaccagctcaatgccggtggtcaaatggtcgccgattggcggacaatttgtcgccatgccagcggacggggacgaaatggcgtcagcggctgtgccgttgcatttgctggtcaacaaaaaaatgttctcgccaatgccgggcagctccggataaagcacactgccccggtcggccagcttcagtgcccacgttttggccaatgcggccaattcttgggaccacagcaggggcggtgatgagtaaaccttaaacactttttgatgggatgtcaagaatctcgaaccattttgcgccggtaaactaaatagaaaactggaaccggcggaatttccctctcaaaataaatatttataagtttaatataccagataatgttaaggcccgtagccagaaaaaaattcgggggggggggggtaacctttttttttttcttcattaattttcaaaattttctgcgccggggagaaaaaagtacgaatttttagccgttttcgcaaaaaaatgacaagttttgtcatttaggtcaaattttcaaaaaaatgtgctctttattgaaaattttttatttttcatttcggagagagggatttccttggcaatggcctgatagtttggaatttttcattttaattcgcttttatttataatatggattcatctcctgcttaatctccataagtttaaactcatcctaataaattcacaatatttaatcgttggttaatcttctcacaattcctcatatccccgcttaatccaactgtttaatccttaaaccatgcctaaatctttgactaatccgttcataactcctaagctcggtttttcctctcataat

SEQ ID NO: 25661 - DNA, 1893 bp, Heterodera glycines
cggtgaacgggacttctaccgggagcgggatttttacgggatccacgttcgggactcccgtcccggaaaattttgaactcccgatcccgctcccggaaatttttacccaaaaacgggagtaaaaatgcactggtaagaattgattttttttggtaaaaataatgatttttcattgaaaatctgttaaatatatagccaaaatttcaaaaaactttcccggcggcgcctaccggcaccgccggcctccctcctcctccttggtcaccaaagttttttcaagaaatacaccgcaaaaaattttgtaaaattaataaagggagtcaaaaatataaagttaataaatgttttgttcgaattaattataaaaaataatttatttaagcaatttgaaaaaattttctgatttttgactcaaaaataagattttttatttcaaatttctcctttataaatttttctatatatttttaatttaataaattgattgtcctttaaatttgtgcattaaaaatatttttgtgagtttttaattaaattttcaaattactcccgctcccgcccgggactcccgttaaaaatggacgggattttaactggagcgggatttttacgggaatcccgttcgggactcccgtcccggaaaattttgaactcccgatcccgctcccggaaattttttttaccaggactctagtttattttaaattagctaaagcataattccacacaattgccctaatatagcccagtctctattaatcccgcagtctccaattatcccccagtctacgaggtgttttgaaaaataatccctctatcataatcccccagtctctaattatccccccttttctgaggaggttgaaaaataatccggcgctagttaaaaagggctcccggccaatccgacagtggacaatccgacagtggacaatccgacagttggacaatccgacagtgaggacaatccgacagaagtggacaatccgacagtaaatttctatttaaaaaaatattttcaagtcattagaacggattatttcctaaaaatatctcaatcaaatcaatttggttccggcattcgataagcgattgcacgtagataggccaaaaaaggtctgttatgacgatccaagaaaatggcgcgaattgcttggtcctgctgtacgtaaatgtttttccttgccattcccctgccacgcattcgattttgtgggttattgttgtaatcttgcacaatcaaattccagtgtctgtcttcttctttcatttttttgacaaaataacttaatggcggatgaaggaagcggaattggctattgaaagagcgatgccacccctcgatgctgttatttgtcctcattaaattttgctcaactctaaatttttgtttcttaaaattctatttccactttcacctttcactcatattccacatttcctgtgggaaacttgcagacctcccctgtaatccattgttttgaattcgatttcgaatccatgcgtccactcgtccataagcacccaattccggatcatcttcaagcggaattggttgcagttgccaaacacggtcacacccaatccaatatgtcacaaaatattggacaagagctacaaaacaatgctgaggaatatttttaattgcagaaaccttcaacgtcagggtggtgctcaaattggtgaataacggcacaaaaatagttgtataaaggctcccctggtggtgtaaatgccaagcttatgaggcttttcacgagaattttggtgtcatgaccctcttggttagccgccaaaaatagtgtgtttaaatgggccaatgtttggacttttttgtaaatagcctgggcaaaatgaaaaaggcagccactgtgtgccgcctgagggaattcc

SEQ ID NO: 25662 - DNA, 1166 bp, Heterodera glycines
tgaccaacaaatcttcggagaatggttggcccgcattggctccaccccggcgcctacactctctcaaagcagccaaatgagcagcctttaattgacccctcacgcttcagctcatggaagcgtctaatgcgaacgacaatgttcgtattacgattcctcgccttaatgttcaaaaggggcgaagaaacaattgctcactcgagaagcacagaaaggaaattcgccaaatttccaagtctgctgaattcaaggcggaagacttcgcactcgcggagcgagtgctcatccgcctggaccagatggatgatgctgaagaattccaacactttaaaacagtgtttgaagacgacggaattctccgtctgaaaaccagactggagatgagtgagaagccatacagcttctctcatcccattctttttgccaagcattcagctttggcaaagctgatcattttggatcggcaccaaaaaaggcatcaccttggagtggacaccactctgacagaattcctgagcgaattctggatgccaagcgcgcgtttaaatgttaaacgggctcttcgggactgtcttctctgtcgccgaatgaatgcacaacaatttgcattaccaaccatgccacccttgccgggtgagcgagtacgccgacacgcgccatttcagtcaattggaattgactttctcgggccaacgacaatttctttggccggagaaaaaataaaggcatggatcctcatcataacatgcctcgcaacgcgcgctgtctaccttgaggcaacattggacctcacatcggaatcattcatcaatgttctccgtcgattcataagtcgacggggaaaacccgacatcatttggagcgacaacgctacgaccttcaaactcgctcagaaaaccctggagcttctcagtgctccggggccggatcaggaagtacaaaacttcctgacccataaccgaatccagtggcgattcattgcccaagtaagtccttgggcaggaggcttttacgagcgcctcgtgaagctagtcaaggactgcttcaagcgaactttgggtcgaaggattctttccttcgaccaactcaacacagtcgtggccgaagtggaggccaccctcaattacagaccgattaccgcggtctcacacgcagtggatgaccag

SEQ ID NO: 25663 - DNA, 1681 bp, Heterodera glycines
taataattcaatgcgcctaggaatgagcgaagtgtgctcaagtcatgtggtggcggcatttggcgaattgcttctgatcgtccggggtaggggcgaattcctttcgcagagatgacgtggccgagaaatagcaattcgggctggaggaatttgcacttttccaattggattttaaggccaaattcctggattcgtttgaagagtttgtaaagggaacaaatgtgctcttcaagcgttttggaggcgattatgccgtcgtcgaggtaggcaaacgcgcctgggatgcctgtgacgatttggtccatcaaatattggaaaatagacggcgcaggtttgacgccaaatagttggcgctggcattggaagaggccagggtgtttattcacaaaggtgtttggattcctcatccaattccatctgcaaatacgcgtctcggaggtcgagattggagaaatagacggagccgctgatggccgtgtaaatgtcatcaggccggggcaaagggtgtgtattcaacttgagcgaattgttgaggccggtggaaaagtcgatgcaaactcgggtctttccattctttttcattacgaccaaaatcggtgctgcccaatggctgaactcaatcggtttgatggctccaatctgcaaaagccggtccaattcttcgttgacggcattgagggcgccgtgtgggacggtgcgtgctttgcagaatgttgggtgagcatcggacttgagtatcaaatgggcctttgctttggtgcaatggcctaatccggggccaaaaacttcagaaaaatcagtttggagggcctttgtgagcgattccaaatccgaaattttgtgcgttggctgaggaatggccatggcgttgatttctgccggggctggttgagcttttggtcggatgtcggggtacatgatttcatgtgggatgacgtccaaagcctcaatccaaggcagtccgaaaagatcgtaattgatttcggaactgacgtatgccacaagctttttgggtgcttgattgggttggcaaacggtgcagacaaattttccttcgacgttgaatgcaacttcattacagttccgcgtttcaatgtcgggtttgtcgagttttggagaacccagctttttccacgttttgagtgtgagaatggtggcctgagcaccagtgtcgatgttcatcaaaatcttaattccattgatgatgaacgtgagtcgccaccagcggcctgctgcggttccaattcccatgcagtgggatttgacaacgacggtgtggacggatcgctctctgcgatttttcgcttggttggagctgcgtcggcacgcctttgcaatgtgcccttgtccttggcatttgtggcatgtggcgtctttaaatcggcaatccgtgcgccaatgatccgactccacatgagccgcacggatgcgttggtgatccgcggcttgccttgccataattggtgtttggtggacgcgcgggttgttcctttgcattgttggccctcttgggttgttgcgatgttttgcctttcgggtccctccactgttgtggccgggtgtgaatggcatgggttgcaacaggaggatttgccaaagtgagtgcgctgtccttcaccagctgaatggtccttaattcctcttcaatttgcttgagcgtgacttgcgtgccgtttttctg

SEQ ID NO: 25664 - DNA, 1839 bp, Heterodera glycines
  unsure (1)..(1839): unsure at all n locations
cccacgtgcttttttgagaaggggcagagcgttccgatttgtcgctatcgagttgctaaatcggagaagagtgttaccacaaaaattttattgntatttatttatattacatccaaaagactcctcatcagggattttcgaccggaaattgctcctcttccgcgatttgaagcaacgggttttcggaaatgcccgagaaagcattttgatgatgcggcggttctttaaagaaaataagattgcctatttcgataatntaagaagcaatagaacgaatttgtctaaaaaacagggtaataaatgatgttgttgttgttgttgttgtggtggtggttgtctttgtctttgttgttgtggtggtgttgccgcgttcccagtgtcaacaatctcgaaaccttggcgcgcattgttcaacacgattgtactaaatataaattttattcttacggaacttataaaaaaatagtaattaattacatttgccgagctcgagcaatgtccaacatgttatgaaccagcgcccgagcataaattgttgccaggaggtctcccaacaaaaagcccgactaaattaagattaaaaatcaattgtttcttgctcattatttacatgttcccaaacgtcttcatcaaggaggtagacgtttgccccacgcgttgtgatcacatttcttccaacttggttgaaggtaattatataccatttgcgctcttccctacagacggcacattctttgatgtcgtacaaagaagcagacaacacttcgaaatttttttcggccgaatctgccttatcgaattctgtctgctcctcgtgctcatggcagcactaaatataaaataataagaatacaaaaccgcggataagcggtgtgataactccgcctttcggcaatgtaaagcggagaacgcttatcagtggtgaaggaggtgaccgcctgatcggcggtgtggaggggggaccgcttatcagcggtgaaggaggtgaccgtctaatcggcggtgtggagggggaccgcttatcagcggtgaaggaggtgaccgcctgatcggcggtgtggagggggaccgcttatcagcggtgaaggaggtgaccgcctgatcggcggtgtggagggggaccgcttatcagcggtgaaggaggtgaccgcctgatcggcggtgtggagggggaccgcttatcagcggtgaaggaggtgaccgcctgatcggcggtgtggagggggaccgcttatcagcggtgaaggaggtgaccgcctgatcggcggtgtggagggggggggggtggccttttatgataatcatgacttacgctccgagagtagtgtgctgttttgcccgtccttgcgcccccgaaaagcttcagacaaagatgaagcgtcgactccttctggatgttgtagtcggccatggtgcgtgcgtcctcgagctgttttcctaaaaacaaggattacgtgaaacatttaatatcttggcatatcaagcagatgtacccgcgaaaatgaggcgctgttggtccggcggaattccctccttgccctggatcttcgctttcacattctcgatggggtcgctcgcctcgacttcaagggtgatggtcttcccggtgagagttttgacgaaaatttggaacattatattttgtttcaaaatgatccggtgtgcaaaacggaataaaattgtaaaaaatagggggaaaaaaaggcaaaaaatttccattgtaagaaaaaatctgaatttttattgaaaaagaccgaaattttaacataggtgaaataaataatattattttattaaaatgatatttttttctggtaaaatgaaaaaaacaaaaaagaa

SEQ ID NO: 25665 - DNA, 1165 bp, Heterodera glycines
  unsure (1)..(1165): unsure at all n locations
aagtagacgaaatgtcagtaggcgaaatgtccgattttgggtttgtaggcgaaatgaatgtttttggcttagtaggcgaaatgaatatttttggcttagtaggcgaaatgacaagtgggcgaaatgtcagtagtagggttgtaaattatatggattaacatattttttctgcgcatatgctatgaagaaaggggcttaaaaatagcatttctgcgttaaaattttttgatttggtgaaggtttttagtccatataaatccatattttgggggttttcgggaataaatccatatttcgccatttttgggtttttagtccatattttacacccctaaagatcaactttttggaaatttttaaaaattacaccccacaaaacacgaaaaatttgagttttcgtcgtcattttggcattttcaataaatattttcgtcatttttttgcgaacatttctttttttttaatgagaattttttcgaaatttggcaaacttggaggtgtttttgatacaacgaacaacaataaaaaatatgcatttttaagttttaaaccccattttttggttgtttattgtactttttaggtttatttaagcaaatattaaatatgcacaccttttttgggatttttgggggtttacaacatatattttggcattttttatccatattttggtccatatttggccatttttgtcctttttagtccatatttcgggcttttttagtccatatttaatgtccatatttcgcgttttttagtccatataatttacaaccctagtcagtaggcgagatgtaggtacaccaacttagattttaaaaaaatataaatttatatattttttgaatttaaagtctggaaaaatgagcatcagtaccaaaaaagatttgttaagagtgggtaggtaatttgattttgtaagatataaagggaaaatgggcgcaggttcgactccgttccacgaaagcactatttaatttatttttttgttcataaaaataaaatgactattttgaaaaatttttgaaaatttgcgcaataaaattatacaatgttggtcactcaaaagctcttgatgagtagaaccttttctccgccggtgtcgcattttccagtgtcgtatatagcgcggtgtcgcattttccangtgtcgcatttcagg

SEQ ID NO: 25666 - DNA, 1907 bp, Heterodera glycines
  unsure (1)..(1907): unsure at all n locations
gaaaaaatcgattttttttgttttcgaggcagtccccccgaaccgatgcgcccagatttatggggagaccgaatccttcgggaatagcttccctatagcctgtactttaattctgcgttggatttttgctccccataattgtttgagtaccccaaacggacactgaaaaaaatcgatttttttgtattcgggcagtccccccgaaccgatgcgcccagatttatggggagaccgaatccttcgggaatagcttccctatagcctgtactttaattctgcgttggcattttgctccccataattgtttgagtaccccaaccggacacttaaaaaaatcgatttttttgttttcggagtaatgtttttactagagttgagcggtaatcggtaattgcaaaaaaccggtaccggtactgaccggtactgcaaaaaccggtaccggtaccaattttttcaaccggtaccggtaccggtaaaaaccggtaattttagaacataaaaatttttggacaaaattttccaaatacaaaatttttattcagttttcgcgcgagtgcctgttttttagcattagaattgttcagaagtatatgtatattcaggttgaccaagccgactagagaggggatattgtactttttggctaattaaataatttatttatttttgtcacataaaattaaatccaccggcgtaaagcacagccatggcattttctccgttcagttcgctcaaatcatctgtataaatgaagctcaacatcattttaaaggctgctgcttcaacgtcggggacctccacgggacaatcagcagaggctaattgaaaattattagtgtaattagcggcggctaattgaaaatttattagagcaattagcggaggactattgaaaattaattagggtaatttgcagagactaaattgtaaatgtcattcagtaatgtttttaccgaattccgctttttcctttttggcatcaaaacggaacatcgcctcaaaaacgtcggaagcgtgtttcaaaatgattctatgggctggcacaagcttaagcggattaaattttaaaaaatacaacaaaaattactattcactaaatttccaatttttaattaataaattaaatttttaatttgaagactcgcctcttttgcgtctccgtcccccaccaaaaaataaacatccgcgtcctctcccgcgctcaacaaatgcttcattcgttcagccaacggtttggacatgctaagcaattccaaaattcgtttaattatctatttaaatgcgagaaaattattggcaatttcaaaattggcaagaaataaaaaccacggcacaaaatcagcaaaactttatgttcagttgggctttgtgattattttgaggaaatttgtagcaaaaaaaaacatgcaaatgtttcgttgtgctccttcccccccccccctgtttttatgcattttttcatcgctttgccatcggtaaaaaaaattgatccgactaaaatgcaaacgtaaacaaaaagaattttggattaccaagtaataaaaaagttatgatttaaaaaagtgaggatggtcactcattggacgcgtaaatattgattggacgcgtaaactggaacagagccgaaaattgaatatattcaaataccattgggtaatgtgaaactataaaaattttgcgccaaaaatagacacttttatcaattttttgactaaaaactgccattttttgttatttattatcaaaatcagacaaattanaaaaaagatgaagatgaaaggcggaattaaggacaaatgctactccagtcagtttgtatcccattttttagtcaacattttttncactctttttgggattaaaaagttatgaaaacaaatatttcgggggtttttgaggtcgctgac

SEQ ID NO: 25667 - DNA, 1127 bp, Heterodera glycines
  unsure (1)..(1127): unsure at all n locations
cgcgcctttcagtcagacggcgtccgtttggcccacccccccccctccgggcaaaaatgccaaagggaagtgacaaaatgccataaaatgggggacggacagagaacagcaagaaaacagtgacaaaaaggagggagaaaaagagagcaaaccattggggaaaagagtgaaaagtgccggaaacggaaattgccccggaagacggcaaagagaaaagagagagataaggagggaaagggggggggggggggaaaccgccaacagtcgggcaaatttgggcggtccatccatcaaacgacgaaccgaaaagagagagcatttgggacagagaagtgcagttacccgcactttgtgttttattttccaattttcatgattttaaattttttcttttttgccaagaaattgggtcaaattttggcattttaaaatgtatcttaaatactagttttttttgaaatatacggcatgtcaattggcacctcggactgaccgggattctggttaatgtcgtttttttgaattgatattttttctagctcgggttatctggtgatcagtttccctcaattcctccgatcacatttttatttgtcccgagtgccatcccccggcgtccatccgtcgcccatttcggatgcccgcccctgggcaatgcctttgtcgccgtcttccgtttgctcttctgctgcttctcctttcgctgtttcctccgcctctcattccgcacgtgccaatttcttctacaatgctgtttaggctatcagggaaaaaattaggcacgaatcgacgcattttggtttcgggaaaacgacgggcagcacatgttcagatagcacgacaaatgccgataatagaaactaaaaacaaacaaagggggacagtgattggcctgaaaacggaacccgtcagttgggccccacggcccaactgatatagaccgttagtccaaccattcggatccaaattaggagtgccaaaataaaaaaatggaccgcttagttctcgatagtcagttctcacttcgttaagataatttttcttacaaccctttctatgcccgttgatgagcttttcatcgacttgacgacctttaacccanaaactgtggcaaatttcattataat

SEQ ID NO: 25668 - DNA, 1208 bp, Heterodera glycines
gaaagattaaggtgattaaatcctaattttttggggtcctcaactcccttgtttttgccatagttggtgtgccacaaaaaaaaaaatgcgggattagaggaagaagaaccaaacaaagatgaacgatgaaaaacagtttcaggaggcgcccggtggttggttattggagcacagaaaaaattgtagattcagaattttaatggtaataatagaagaggcacataaatttagaaataagcatattgcagtgattgggaagaaagatttaagtgattaaatactgaatttttggggtcatcaactcctttgtttttgccatagtttgtgtgccacaaataaaaaatgcgggaatagaggaagaagaaccaaacaaagatgaacgatgaaaaacactttcaggaggcgctaggtgattattggagcccagaaaaattgtagattcagaattttaatggtaataatagaagaggcacataaatttagaaataagcatattgcagtgattgggaagaaagatttaagtgattaaatactgaatttttggggtcatcaactcctttgtttttgccatagtttgtgtgccacaaataaaaaatgcgggaatagaggaagaagaaccaaacaaagatgaacgatgaaaaacactttcaggaggcgcccggtggttggttattggagcctagaaaaattgtagattcagaattttaatggtaataatagaagaggcacataaatttagaaataagcatattgcagtgattgggaagaaagatttaagtgattaaatactgaatttttggggtcatcaactcctttgtttttgccatagtttgtgtgccacaaataaaaaatgcgggaatagagaaagaagaaccaaacaaagatgaacgatgaaaaacactttcaggaggcgcccggtggttggttattggagcctagaaaaattgtagattcagaattttaatggtaataatagaagaggcacataaatttagaaataagcatattgcagtgattgggaagaaagatttaagtgattaaatactgaatttttggggtcatcaactcctttgtttttgccatagtttgtgtgccacaaataacaaatgcgggaatagaggaagaaaaccaaacaaagatgaacgatgaaaaacagtttcaggaggcgcccggaggtaggtcattggagcctaaaaacaattgtagat

SEQ ID NO: 25669 - DNA, 1828 bp, Heterodera glycines
ccaactcttccgcttcttcgatttccgtgcccgatctttctagggttgaaggtgctttctcctcactttgtgccattctcttactgagtttgtcccttttgggcttagaaattcccgaggaatgtgccataaaacgcgtcccctcggctctatgttcatttgtcgacccattctgtgaccctaagaaacccgtcaaaacaacattttcggacatttccactgctggtatgtgcaaaagccgtggccaattattcgccaattccccccccccccctcccccccccctctctctccaatcgaattgtaagacttggagtttcgagaagttcggaaaactaaaaatggaaggagtacgagcgaatgaatggccggccatctttgggctatttattccatgcatatttcccattgtcagcatttaatatccgtgacggaatccttcggacgcccacaattgttcgtactttgttcttgtccattctcaaaagtccttaagaagtcagacgctctgtcgtcaatgtttggcgtcgatttgttcttcaaacaggtgggcaaagaaggaaaggcaaatgcgaacattcgtccgaatttgaggagtatttgcaagtgaccggcagcttcaaagagcgaggggcgcgctttgcccttctgcgacttacggaagagcaacggtaaaagtggcagcggaagcaaacaatgccaacggccttttgaatgttggcacaattcgcaaaaaattattccccgcttaaggcgaatcggagtgatcgctgcgtcggctggcaatcacgcactttccctggtagtccgacttggattatgggtttagccactcagtgattttcattcttttacctccgttaggcttaccatggcagcaaattgggcatcccggtgacgtaagcatttgtgttttttgattttgcatttcccttcatttggccttccgttcgttttctcagtgtggtgatgccgaagttcgcccctctaatgaagatttcctgctgtgaatcttacaaggccaaaggtgaatcagcagaaggccactgattcctcctccgattgccccttttagtcattctccatgggcttaacattcaggaggtgtttgtttattcactcaaatgacttcccaatggccaaacaaatattaagtcaaagatattcgcttatgagttggccaaagagaaaaacctcaaatacgtcaacggattcgacaaccccgacgtaattgcaggccaaggaacaattggactggaaatactggaccaagtcggtcgactacgtcctttttgtgtagtttttaattggttggattaaggtgggcgatgtggacgcaattgttgtccccgtggggggcggtggattaatcgccggagtcgcattggccgtcaaaacgttgaaaccggaagtgctaatcattgtaaatgtgtatttattgtgaacaaatgcatttcaatcgtaacttttaggggatgtaagtcgcattagcaaatgttgccaaaagcaaatggaagtttcagtgaatccgaaatgtgtccgtccttcaaaaatgccatggaacactcggatgagccgctttatccggaagcgagcttagccgatggtcggacaaaaacgacattcattttcaaccatttgataaagcaaacattcacaccaattgcttttcaagggctcgcagtcccttcggttgggcacaatgccgtgtttatggccgatgggctaatcgacgaccttgtcactgtgtgcgaagaaagcatagcgttagccttacgcactcaaaaaaagtgcaaatagaattaagactggcaattctgcgcttatt

SEQ ID NO: 25670 - DNA, 753 bp, Heterodera glycines
gttaattaggtcatttggccattggcattggccatgcccttctctcctttccgcccccccccccttcgtcctcacctgtgatgcagatttgttgtgagaattgccaattgctggtccatccgatctctgctgttcggaaattgcaattaccaccatttcattgccccaattggaccataagcagaaaattgggccgatatttctgttccctccgttcaattatctgccatttaggcaatattattatcattttgtcaaaatttaactccatcggttttttcgttcgcttttttaaattttatttttcttatttccattgtttctcttctctttctctttctcttttccattttcttttctctgttcatccgatgagaaaagcttaattaaaattaaaagcccaatttttagcaatttataggcccgggcgcgaagagaaaattggggggggggggaaagggaatttgaagataagaaggagaaaggggggaaatggcaacaaattttcatgaagcagaagagaagcaatttgggggaaataagtaggaagagccgaccatcagaaaaggagggaagagaaagaatggatgggaagtggtaaaaaggagatgaatttaagggggcaaaaaggggagaggggaagggggggggcagttccaagaggggaaacggggggaagggaaggccaaggaataagttgccaagcgcatggagaaatacaggcaagagcaagcggaaagtgtcaattgcaag

SEQ ID NO: 25671 - DNA, 1715 bp, Heterodera glycines
  unsure (1)..(1715): unsure at all n locations
ttgaggacgcagaagaaataagcgacgaaagcataaaatgtataccaaaaaatttntancgatattttttattctttaagtcgacattgggaagccacccaaatcgcctgaaagtgtgtcattacgtcggcaaatttcagggacttctcagtctacgcnaacgtcgcgtattagctttcaattgnccacttacaaagtcttagnccgcactcaaattgattgtgatatttttaattggtggaacgatgttggcgtgcaatttcctgatttatttctcctggcacgaattgcccactcaattccggccacatcagtgtcatccgaacgattattttcaaaagcagggatgatatatggcaacaagttgcgaaatcggtagttgaaaaagtatcaaaaaatttttgttttttgttctttttagtctgagtggtgatatggcagaacaaattttgcttataaaaggaaatttgggtcatttgaatttggcaccatcgacagaacctgatgaagatgatgaagaattgctgaactttgatgagttggaaataattgaggattaaatctgatccaaatatattcttacaaactatttgcttgctttaaaatttaaaacttttatttttggtttgcctttttgaaataacaaaagcaattttatcaatttaaatttgtattaaaaatttgaattttttaaatttttaaaaaattcccggttggtcccgattcccggtttttcttgcggtcccggtcccggtcccgaaaaaaaatcgaggtcccggtcccggcttctcaggtcccggcaagtcccggtcccggttttgcccaaaattcccggtcccgtggcactctaagataaatgtatgaccattattgtatttatccgcttttaatttttaatatatttgggattaaaaaaaaattaaagtaaattgcaataaatgaatttatacatatgtatatttttatgtatgtacatgaagaattcagtaagcatattttaatcaggcaaaatggtcaaatcaacgatcactgatcaatgatggtgtttgataaaaatgtttggtgctctgatcagtttacaacgagcacaggagggattatgattatctgtgattattagagttcgacctggacctggatccaggtctggatttttcctggatccaggtcagggctgggcgaagctcggcttagcactcgaagccgaaggcgaagcccaatttttattcgaagccgaagtccgaagctcgaagcccaaaaaacccgaagttttcgaagccgaagttttttcaaatttttttttaattccaaattttttttcatcacataatttcggttaaatatcaaatttaatcaattgacgcagtttctagtagagaccggaaatttcaaatttgcggatcccgctgcgggactggaactcaaaattttttacgggacggaatcccgcggaattaatcccgcaaatcccgcatttaaaatttgcgggattgcgggattttggaaaattcgaaaaaatttcaattaaattcaaaaaatttccaaaaatcaaaaaatgctgaaaataaatttttaggggctggcgggatgcattaaaaggggctgatgggtcgactaaaatttttcgattggatccgacggtaaaaagttgatcggaaatcaaattattaacggttcagaagtttgactatttttttcttttcaaaaccactttt

SEQ ID NO: 25672 - DNA, 1472 bp, Heterodera glycines
ccggccgaaggccgggaacgccctgaaagtagtggaaggttcttccacctttttgagagcatcggggaaaactatagagaaaaatcagcgcggacgactgagtccggggaccgatttctcacttttctgcagttttagggcctgtaacttttttctaaaccccgaatcaaaaagtgcccgctgtgagggcactcccccaacactgtcctctacatgctggtattttttatttttttattagagccaccccctggcctgcacgcttggctaattgaagtgtgctcaaaatgtacacttcagtaccaggcgaataactcgccaggggttgctttgaccgaaaaattgtttctgagcaaaaatgtgtagtatttgaaaggctatccaaccaagttttaaaatttcgaaaattttgaaaatttttcgagctaggcctaaaaaacggttttcgggtttttgaattttaggattttttaacgatttttcccagagaaacggagaccacttccaaaacatagtttttcgagctctatcgactggtatttttttcggaaaaatttcgattttttcccggaaatagaaaaaatttttggcatgagcgggacatttgagtcccgggtccataactcgttaggggttggttttatcgaaaaaactccttagggcaaaattgtagagttttttaagctctatcgaatggtgtgccatattgccggaaattttcaaaaattttcgagctaggccccctagaaattttcgaaaattttttttgggttgaaaatgggggtcaaaaatatttttctggggtattttgatgtgctgagcacgaatctgatgttaattttcagtttaggaaattttagaattttttaaaaattcaaaaatatttggcaattttttgaccctcaggattttgggctaaaatttgaaaattcataactcaatggaggaacggtcaatttaagtgatttaaagctttaaaaatagcaaaaaaatcgggagaattttatgggatttatttgggatttctatcttctaaagaaaaaaagttattccagaaattctggaaattttagatttttcagaaaaaaattcagaactcccttctgaaaagtcattctgtaaaagtaaaatactacaaaaattcgcaatttttttctctataatataaattttattttacatttttatctcttttttgcgaattgttataaaaataaaagtgatttttggtttcgggaccatagggaggtgaccaggatttttgggtggaaaaattttttcaccgaaaatattccaaaaacatgtctttaggggtattttatgacgctgatcacgaatacgtgatcagattttacttttgacatcgttcagacctcagaatccctgtgtgattggggattcggaggcatcattttgaggggggggggaagttcgaatccgggcggtgtacattatttttctttgtatttttg

SEQ ID NO: 25673 - DNA, 1133 bp, Heterodera glycines
  unsure (1)..(1133): unsure at all n locations
tttatatgtaatattcgaaagtgccaagctaattagcgattcaggcgcacattggggcctgaattaagccattttccctttgatcggtacaaattggccgaaaaagagatagccattttctgaggcccgaaggaaaatttgagagggctaatttatatgtaatattcgaaagtgccaagctaattagcgattcaggcgcacattggggcctgaattaagccattttccctttgatcggtacaaaattggccgaaaaagagatagccattttctgaggcccgaaggaaaatttgagagggctaatttatatgtaatattcgaaagtgccaagctaattagcgattcaggcgcacattggggcctgaattaagccattttccctttgatcggtacaaaattggccgaaaaagagatagccattttctgaggcccgaaggaaaatttgagagggctaatttatatgtaatattcgaaagtgccaagctaattagcgattcaggcgcacattggggcctgaattaagccattttccctttgatcggtacaaaattggccgaaaaagagatagccattttctgaggcccgaaggaaaatttgagagggctaatttatatgtaatattcgaaagtgccaagctaattagcgattcaggcgcacattggggcctgaattaagccattttccctttgatcggtacaaaattggccgaaaaagagatagccattttctgaggcccgaaggaaaatttgagagggctaatttatatgtaatattcgaaagtgccaagctaattagcgattcaggcgcacattggggcctgaattaagccattttccctttgatcggtacaaaattggccgaaaaagagatagccattttctgaggcccgaaggaaaatttgagagggctaatttatatgtaatattcgaaagtgccaagctaattagcgattcaggcgcacattggggcctgaattaagccattttccctttgatcggtacaaaattggccgaaaaagagatagccattntctgaggcccgaaggaaaatttgagagggctatttatatgtaatattcgaaagtgccagctaattagcgattcagcgcacatgnggcctgaattangcatttt

SEQ ID NO: 25674 - DNA, 143 bp, Heterodera glycines
tgtcctttaaatttgttaggcggccaaaatcagcattgaagtgcccgctcaaggactcaccattcaacaggcgaccaaagcaggcctgttggacatgatgaaaatgtatggggcgagggtcaaagaaaaaaatgtatgtttat

SEQ ID NO: 25675 - DNA, 1036 bp, Heterodera glycines
acccagcagcatttcaatcactggggactcaacccaccagcatttcaatcactggcactcaacccaccagcattctaatcactggcactcaacccaccagcattccaatcactgggactcaacccaccagcatttcaatcactgggactcaacccaccagcatttcaatcactgggactcaacccaccagcatttcaatcactgggactcaacccaccagcatttcaatcactgggactcaacccaccaacattccaatcaacaggactcaaccctccagcatttcaatcactgggactcaacccaccagcatttcaatcactgggactcaacccaccagcattctaatcactggcactcaacccaccagcatttcaatcactgggactcaacccaccagcatttcaatcactgggactcaacccaccagcatttcaatcactgggactcaacccaccagcatttcaatcactgggactcaacccaccagcatttcaatcactgactcaacccaccaacattccaatcaacgggactcaaccctccagcatttcaatcactgactcaacccaccaacattccaatcaacgggactcaaccctccagcatttcaatcattgggactcaattctcccgaattcaaatcagtgggactcaacccaccaacattccaatcaacaggactcaaccctccagcattcaatcactgggactcaacccaccagcatttcaatcactgggactcaacccaccagcatttcaatcactgggactcaacccaccagcatttcaatcactgactcaacccaccaacattccaatcaacgggactcaaccctccagcatttcaatcattgggactcaattctcccgaattcaaatcagtgggactcaacccaccaacattccaatcaacaggactcaaccctccagcattcaatcactgggacgcaacccaccaacatcccaatcgccgggactcaacctcagcaaatttctttagcatttttaactttttgtgtgcctgggatgttga

SEQ ID NO: 25676 - DNA, 1200 bp, Heterodera glycines
  unsure (1)..(1200): unsure at all n locations
cccccccnccccccccgcccttcagagcacgacaaatatttcaacaaaaatttttaaaaattgactagagcaattgaacgctaacggacgacctaatggaaaaaaatccccgaaggagagaatttaattaaatccattccttcgggggaccgtgccgggtgccgcggggtaagcagtgctggttcgtttcatcacggcaccgaaccttttggctagtcagcaatcgttgcttaacttgccagatcggacgggtgcgcatgattccactgttccaagcaccccaccaaaagcaaaacgatataaccaaaatataaggaaaaattttttaaaaaattttttctccatcttcctttttgatactaaagcatcagagtgctaaaattaagttgtaaataaaatttggtgcgctttagagcactttctgaaaaaaatatttatgaaacaaaaaaatcgattttttcaagtgtccgtttggggtactcaaacatttatggggagcaaaaatccaacgcagaattaaagtacaggctatagggaagctattcccgaggggattcggtctccncataaatctgggcgcatcggttcggggggaatgccccgaaacaaaaaaatcgattttttcaagtgtccgtttgggcgtactcaaacatttatggggagcaaaaatccaacgcagaattaaagtacaggctatagggaagctattccggaaggattcggtctccccataaatctgggcgcatcggctcggggggactgccccgaaaacaaaaaaatcgattttttcaagtgtccgtttggggtactcaaacaattatggggagcaaaaatccaacgcagaattaaagtacaggctatagggaagctattcccgaaggattcggtctccccataaatctgggcgcatcggttcggggggactgccccgaaaacaaaaaaatcgattttttcaagtgtccgtttggggtactcaaacaattatggggagcaaaaatccaacgcagaattaaagtacaggctatagggaagctattcccgaaggattcggtctccccataaatctgggcgcatcggttcggggggactgccccgaaaacaaaaaaatcgattttttcaagtgtccgtttggggtactcaaacaattatggggagcaaaatcccacgcagaatanagtacaggctatagtgagctattcc

SEQ ID NO: 25677 - DNA, 338 bp, Heterodera glycines
cgacgccaggggagggaggacgaaagaggcccggaccgaaagcccaacccgacaagagcgcacggcagaatgacgacaggcacccgaggcggaaggaacacccgacgcagccgagaaacagcggacaccgaagagggagaaagcacgaacaacccgcgcggagggcagagagaaaagccagccccgacacccgccaacacccgcagacgcgcccagacgggcgagacggcacccggcaaccgcacacagacaagcagagaccgaccccgggagcggcacgcggcagaggacagcaccggcaacaccgaaacgcgcgagacgaaagggccccgggacac

SEQ ID NO: 25678 - DNA, 1455 bp, Heterodera glycines
  unsure (1)..(1455): unsure at all n locations
aaaattccgcggttcgttgaaggatactttttttagtgcccccctattttagtcagcgacacaaatttttggaaaaattttcaacgaattaccaataggagggggctgaactcaaaattttatgcacatatctagaagattcatcccaatcctaaccccgactcttcccatttttattgtcagagatatttatttttatgtggctgaaaactttgacccgccgccgcggcaaatgaatgggtttcttttttgccgatgcgtcccgtccggcgccgcccacgccaagtcgcgcgtgtgcaaaaatattttccttgcggcaccctttgaaccgactccgtctccatcgcttttccgcaaatgccccctaaacggtgccaccgctgccggaggggcgggggaaggccaccggcgccgcccaatcaccacaaccttcgcattttcgcctcattatctgtgcgggtgctgccgccactgttcgcttaattacccgcgcaataatataataataccttcgtattttgccttcggcagagcatcggaaaacggaaatcgttttcagaagattatcccagcttaaaaatgtggttttgtagcctgccaattttaggtaatataaatagtcaaaattccgtaagaaactcaattataaagtgggaatttttcaaaaaaaaatgagaaattttttgaaatacattcgaaaattaaatatttattttttatctccacttcagaatattttttcacttaaaacttattaattgtcctaaaaacccataaatattactagaatgacagatctgttaaaaaagttaagaatctcagccaaaaacccaataaggaataaaatctccacaaaattaaccattttggtataaatctgctaaaaaattgagcaaattttccagttgcaactctgtcgcccgccttccccaacagaaaatattgtcaattgttaataaattttcgaaaaaataatatttttcgtatattattaatttcactttttcgtttttggttgtttacattttctttttcgatttacaacatctcttcatcatcaccatcaccagtttttctgatccaattttgtcctccttttccactgaattccccaaacggaaatggttggtgggcctttgcttacaaaaacattggccaactatcgattcgctaattagtttttattagcataaacattttactgatttttaagcttctataaatatatgacctctgtgacctatccattcccgtccgccccataattggtcattaagtttaattgtttactgtacatttttgccgttttttgcattattgcctgactanattccgttaattgcctccacaatttcctccttcatttggatttgttttgtctttatccccatatccngtgctttacttttctcttttaccgtacctgtgaacctcctacccgtagcatttgctatg

SEQ ID NO: 25679 - DNA, 1756 bp, Heterodera glycines
  unsure (1)..(1756): unsure at all n locations
tgtcatggaatgactaaaaaaaagtgcgatcgcncgccaaaaatttttctttgcctttggcactcgcgtcaatgagcaattttattggctgctcttttcactgttaagaccgctgctcatccaagcatctcttctggcgattccgcgcaaattgtcgaggcgatggatgccatcgaatggatacagaaatgggcggaggtggcgcaattcgacgccgaagtaaaagtcgaggaagggcgaccatttgaccagaattattcgcttcgaatggctccgacgggcgaaaaatgtcctggccaatggcatttcgaagtgatcgaaccgagggaaatgatcggagttgaaaatgcgacttttgaagtcagggggggcaaaggggcaaagaaagcatcgccgccctcttccaagaacggcacgaatgttcggctgcgcttccgccctttggctctttccgcggccgctgtccgccacgcgcgccctttggtgcttaaaacggcgttcatttgcatgccgacgggccaaagtcaagtcatcaggcaaaagcaaaacagcacaatggcacaagggtaataaatttgcagacaaaaaattaatggaattggcacaacggcggaaagggaagaggaggaggggacggaaatgggagaaaacgaattggagatggagccgaacagactgttcgtggacatcgacgactcaccccaccaactcgccgtttttacagtaatttgctaagttttccgtccccccccccctcccctcgaagttggacatttccgtccctcctcgccgtgccgacctcctccaacgagtccatctcgagtcggcctccttctctccgtttgccctcctttggctgagtcgtccctctgccaacagttggcgcctttggctttctctccgagctgatcagttggagaaagagaccaattcggatggtgcccttttgatcagaggaggagaaaatgtaagcgaaaaatgaacggaccaaaaataacggataaaaatgaaaggataaaaaatgaaaggataaaaaatgaacggattgttatgagtaatttccgttcataccgtatccctttcagaggtactttccttttcctaccgtatcccctttcagttggcactttctattccctaccatatccaacggagttcttctgtccaatcggatgactttttgttcactttgactgtcaatgacccgtcctttgtgccgtcactgtccaattcttcgttgcggccaacggccgatgtggaactgttcagccagcgaaatggccaacacttcgtccgctccgttcctttcaacggtcttttcttttcccttttaaattcgaattccgaaagaaaaaggaaattcaaaggcaaaagtaggaaaatggaagtgattaaacagaaaaagaggccattttcgaactcttttcttgccattttctgctgttttccctttcgtttccttcccttaaaattgtataattttgcactttttctgatcgatttttctgcttccaattagtttttgaatttccattcgcttacttttgcccttttgtccggttgttcttttgtccaatggtcattccatcgaattcaccccataccttttgttttcgctttttttgacctttgaccttccccccccccatttagtgcccgtccaattcggtcccctccgttcggatatttttcagcttcgaattcgatcacgcgatttacgtcccttttcttcgctcgtcaaggcaattccaaaatg

SEQ ID NO: 25680 - DNA, 1371 bp, Heterodera glycines
aaaacaaatttttttctaaaaaaatttggctcaaagtctctaaaattggttatttttggtgaaatcagttaataaattgcattctaattctctaattttcaaaaatttttcgcggccgcgtttatagacactgccggacccttgttcccgaaaagttttttgtttttaaaatcatttttttgcggcgcgtttctaaagacttttaggagaaaggggtccggcggtgccgataggcgccgccgggaaaaattaatttggatggatctgtaacagattttgtccaaaaaattataaatttttttgattttgagcaaaatttgcaggtttttggggggtcggcgatgccgataggcaacgccgggcgaattttaaattttaagctctttttcaaacagttttcaccaaaaaattatgaatttctctttatattttgtaaaatataaacttttcatgatttagtcaaggaaaattaaattttttttattcaacgaaaggaaaattgggtttaatttgtcaataaattatgccaatgatgaccaatttttatgggtattttttttaaaaaaaaccctattaattacaaaaaaataattaaaaaagaagcagtcaaccaggatcgaactcacgacaaaagttgtgttagtgttaacacactacactaaccactacgccactactgcatatgaattggtaaaagcaaattactttattttataaaaatttggcaaaatggttaaaaaattcaaaatttgtatatattttttgctttttctcccacaaaaatgccattcctaggggtgtatatttaaccccgaccccgagtcggggttaagggtcggggtcggggttcgtcggggttgggagcgtcggggtcggggtcggggttaaccccgaaaaatgggcaaaaaagtcggggttcggggtcggggtcggggttaaccccgaaaaatgggcaaaaaagtcggggttcggggtcggggcggggtcggggacgcaaccctagtcgagacaccaacttttgtgacaattagtcgcacattcagtataaatacacaagagatgattcacttttctgacattcacttgttaaatggaaatattataattacgttgatagaatatatgaatggtgtttttaaaacaaattttgtatgcttcgcattttaagttatttggacccgaaaataaatttgtaagtttgcgattcattctaaatattttaattcttagttaatttttctcgcttatgtaaaatctgcatataagtctgatatcaaatcatatgcaaaattataattgtttttatttatacttcggctaatattggtgctattcaaattaaaataaataaatgcattaatttttggaata

SEQ ID NO: 25681 - DNA, 1275 bp, Heterodera glycines
aagtaattaatttttaaattaataatttcaaattattccttcttcacctctctttttgctcttttgcagctctttttgctgcttctccaaggcaatgattttcatttccagcacagtgaccaaatccgaatgtttgtccactttattttccaacttaatattttaaatttttttctaattttcaatagcgaaaatttcacaaatttgttgaaatgattgactaccactgcaaatttcgcagtagcatcaaattcaatgttttttctaccgtttctgagaccgtcatcaattgcttatgttccatttgacaaacctttcgttgttctgaaaaataattagaattgattaattttataattaatatttttcaaaatctatgaaaatttcgcgtcaaaacaattaaatggataaattctgaaacccattaaatcagaatcaggcaaatcatttcatgatttttttaaatattttttttgctcttcaatttcccttaatgattacaatttgcaattacccttaatttccttctccaattctccgattcttcgcagcattgctttttggttgttttgcatctccttgaaaaggatgtcctaaacattttttcaataatgacaaaatgccaaaaaagttaatttttaaatttgtttacggtctcctgctgttgcttcttcgggcactgtgcaattgcttcacatagtttcatttcaatttcggcgatcttctcacgaaagtgctaaaattggacactcagaaaaataaaatttaaacgaacaaaattactaaaatataaaatcaaatcaaaggctctgttccggtttacgcgtccaataagtgagtatcatcagtttctaggccataactttttttaagtgttcaatccatgcattcttggtatcaatcgttagcttaaagtttacagaagttttcgtatagcaaagttctgggataaaggcaaaagacaaaaaaattttcatgcatatacgcgaaaatgatgaactttgtattttctcattttaatttttcttaatgcaattttttttttaatttttttttcttagtttttttttagaataattggtaatttttttaaatttttttaaactgccattttctcttttcttgtatttgtaaattccccaaactttaagctttcgtgaccaagaatgcatgaattaaccgagtaagaaagaagttatgacctaggaaactgaagatggtcactgattggacgcgtaaactggaacagagcctatatttgcatatgtccacgac

SEQ ID NO: 25682 - DNA, 1230 bp, Heterodera glycines
cccccccccccccccgccgcccaaccgcacatttcgcctccgaatttgcgcataagcagtttaaaaacagtgtaaagttcaagtctcccaacagttctagggcgagcttaaaatgttttgttattaattctataatggacttcaaaaatgtgcaccaattcaattcgcatttaagcacaattttaaggcccattctgcggatttgctcaaacacatcgaacttaatgtgctgaaaaagtttgtcgctaatctgtgccatccatcgaatgttttgttagacgaattgtctcctccaaatgtccaattttcttgcgaaatccccgatgctccgtacggtcccatttttggtgtgttgcgcaatttctttatgacggatgaagacgctaaacgtgcggaggaagagaaggaatggccgaagccgacgcggtgtttctgattctcagatggctttaactgactttcccctttagaaagcaaatgattctgcgcagttttctgccccatcccgggagcgggtcgagagcaatgccccagcgaatgtttgactattttaattaacatttgaaattcctttttctttcaggtacgtgtcttatcgcgagggcgaattcgtcttttgcgggtccttcacatcagacattgcatttatttgatgtatgctgtacatttccatattttattaaaaagtatataaaattatactaataaacgattagggaaccaaaagaatttttaatcaaacatcaattaatggtaaataagctcttgtcccggctatgttcgtctcggattattgtctttgtgtttttactactgaatgtatattaattttgcaacagtaaatgaatgcattatttcttagggattaattccggtggattagtgccgtttttctctcccttctctcaatcgatccctttcctttccttcgttctatgatgacgaatggttcgcctaagcacttggcccaatctttggaaaaggcgggccaaacattaaacccattgggagggcgtggagcgatcgatccctcccctttccaatcgtttgttccaatcgctttctcctctcactcatttgtcaatatccgctgagccgtcctcattccctcccccgattttcatcgtgcggtcatttggtggccattcaccaaattcccaacggccaatgatttagaattgtcaacacttcaacgatcactttaatccggaatggcagcctttcaatccg

SEQ ID NO: 25683 - DNA, 1165 bp, Heterodera glycines
tttgtttgggaaaatttgaaaaattggctatctcttttctgctcaacagtaataggaatccaaccgcattctcagaatattacgccgatactattgtttctggaatttgtttctcggcgcgtttgttttggaaaaattggaaaaattggctatctctttttctgctcaacagtaataggaattccaaccgcattctcagaataattacgccgatactaattgttctggaatttgtttctcggcgcgtttgtttgggaaaaatttggaaaattggctatctctttttctgctcaacagtaataggaattccaaccgcattctcagaataattacgccgatactaattgttctggaatttgtttctctgcgcgtttgtttgggaaaaatttggaaaattggctatctctttttctgctcaacagtaataggaattccaaccgcattctcagaataattacgccgatactaattgttctggaatttgtttctcggcgcgtttgtttgggaaaaatttggaaaattggctatctctttttctgctcaacagtaataggaattccaaccgcattctcagaataattacgccgatactaattgttctggaatttgtttctctgcgcgtttgtttgggaaaaatttggaaaattggctatctctttttctgctcaacagtaataggaattccaactgcattctcagaataattacgccgatactaattgttctggaatttgtttctcggcgcgtttgtttgggaaaaatttggaaaattggctatctctttttctgctcaacagtaataggaattccaaccgcattctcagaataattacgccgatactaattgttctggaatttgtttctctgcgcgtttgtttgggaaaaatttggaaaattggctatctctttttctgctcaacagtaataggaattccaaccgcattctcagaataattacgccgatactaattgttctggaatttgtttctcggcgcgtttgtttgggaaaaatttggaaaattggctatctctttttctgctcaacagtaataggaattccaaccgcattctcagaataattacgccgatactaattgttctggaatttgtttctctgcgcgtttgtttggaaaaatttggaaaatggctatctctttttctgctc

SEQ ID NO: 25684 - DNA, 1046 bp, Heterodera glycines
tgtaattgtctattgccatcaccctgagacccaaaattctccccctgtacctatccacataaaaagacccaaaagcgctatttttcggatttgattaattaagcacattgttgatttttttgccaaaaaatgcaacgaacatttttgtactcagacacatccgacattttacgacttcgccacttttacgcctccatcggcaacaacagcagaaacggttgacattcattctgaaattgtccaccaccgaaccaaaccaaaatgagttcactcctcagaatcctttttccttaaatcgaccattgaccatctgttgtccgagttggagcggacgcgcaaacacagctacgaattggccgggcggaacagaaaactcgagcgcgaaaacgagtgagtacagggcacaccacacagacccggcccaatgacatttttggtctaaagtggccaatttttggggttttggctttctaatttcaagaattctcgggaagttcgcgtccaccggtgtgcggttaacagaaaaatgcaaattttaagcagtccggtaaagaaaaggtgtaacttttaaataaacctgtttatggacctggtccgaccacccatcacatggtaattgtgagcatttaaaataaacaaaaactagcgttttgatgaccgaaaacaaggagctgaagaccaaactgagccaacagcacagccaatcgcagcaattctatccgcgaactccgaagaagcgcaagtcgcagtttccgtacgcggacgacaacgatgaggacgcgtactgctcgcggacgggcggcgatgcgtcggcggttcgccgctccgtgtccatgccaccgccggagacaccgctgggcatcatcggcacaaccgctgcgggacagagcgttgttcgtgccggcgttaccaccgccggcgccgcacgccaggcactgaccgtcaacgccagcgggggcattaaacgccgacgggcgttggtgccggcgttggtcaaaaacagtcggatcagccaatcgcatggcgacttgaccgggtggggacca

SEQ ID NO: 25685 - DNA, 1627 bp, Heterodera glycines
  unsure (1)..(1627): unsure at all n locations
acattgattattccgtctgatcatttgttgacaatccccaaaaacatcgaattgtcagcctacccctccccccccccctcccaaaacaccgggtggtgaagttgttcttcgctcggtttcgtctgttccggcacaaatgcgtaattgatcgggtcgcataaaaagcggacaaatccctcgaaggacatgatttgtttggcccggtaagttgggtccggctcgtgctcttggattagtttctgcgcgtactgctcgtcaatgtattccatcttaagtttgactttctctttctcgcaaaagtgtccttttacctgctgtgtgcagatgaactgcttaagtgctgctgaggtcaaaaactaacaaaagaaaacgtaaaaaacaaaaacaaatttggccgatttttcactgaattgcgcgaagtgtccatcggagcggaagagcaaacgctggccaatgccaacgcgttgtaaatcttctgctgcttgtcgttcagttggcacatgtgaagggcgctgtttctggtcaaaacgtcgtccgggacgaactcagcgcatgacgggtaactgctcatctgctgatcattcaatttgttaaaactcaacccttttgtcagttcggcaccctttcgcgtcacttacggattcgagacgcgactgaactcgcgggctgcacgacgacttgcagtcggcacttgtggcacgcttcggtggcacgtgcgagttggcactcgaatgggctgcgattacaaagtcctggaacagatccttcaagtctttgcgcattcgggtggagaaaaggcggaacaactccacgaattccttgaaagggattctccaaaattgcgacacgccttctctgataccgtaaaagtgatcggcttttcctggtattctttgccggaagaggtcagaagagcgccggacacaggcccaccaccgctggacgaaattgaacctgagttgggcgtttcgccaccgcgcgaccgccacgactagagcaaatgctaaccccgtgatcaaaccatcctctctccttccctctcctactttgatagatcgtcctccgactgatcggcccccgtatgagctggtggtgggcgtccgggagcggggcgtgtacagtgagtccaagtcgccagcatcggacaaagcggtgcccgtcgcggattcaaatccgctccgaggcttcagcagataaggaagcggactgtgggggccggggggacctaaagcattgcgaaataaagcgaaggcaaacggaggatagagagagagagaaaccgctttgactgctcagctgacttctgatcgacggaggacggacctttgaaaagaaaggagcattttgttcaaaatagccttggtaaaactgagaagcgtgccaattcgcttaccatcggcgactgtggcgctgggcttgtgcttcgggagcagtcgcgactgttgctgcttctcttcactcgccgcgtcactgcgatggtcatttgccgaagtcggctcttcgaccgtccgccgccctccgtcgacggcgacgaatcgattggccgaccattcggagaatacggagccccaacagcacttggattgacgccctaaagttttccgagacctgcagnngccatgcaagc

SEQ ID NO: 25686 - DNA, 1784 bp, Heterodera glycines
caatcggcatgccaacatatccctaaatgcacactataacccaatttcctacaaaatttaaatccaattttaaatatttaattttaaatttaatttggaatgttccctgtgccattctttctaatttttcttatattttgcccatgccgcggcacttttttgttccgttggttgccttcaaattcgttgtcggacccacaaaattggcgtccgcccggttcagtaccatgtgttgacgacaatgttcggcttgattctgacaatgatgcagcggtggaccagaatattgtggtggcatatttggacggatctttgcgggtagcaaaaatgcgggaaatcaaattaaaaatcaaatctaaataagttttttcattcatttaaattagggttaagccccgacccgatgcggggattatgaatgtgtttaagtgagttttgaagaattttttattttagaaaaatttctttttttttttttgattttttatgaaaatttactcaccgccgagggggttgctctccgacatttttaaatttctccaataatccccgataaattttttcaggatttcctccccggttcctgattttctctctctgagtgagggttggcacagctggggtacaaaagagtcttctgaattcttggttttaaatggatgactccctaatatcgctttcttgtttctttatgccaacattgtgacccttccgtcaaatggcattttgtactttggcactgggaacaccgaatttggcacagcgttgcgtgcaccaaattggcaatgtgcgaaacgggatcaaccagagggtaattaactaattatggataattaagataaatgatcaaaatttgacaaaatgtccaaacaaatccacgacaaatgggtcgatgttttttcagatgccaacttcaatgcacattacaatgagccaaatttttttgactttaataattggcaaattttatctgaaacttcggcacaaatgccgtcattgttacgcctggacgcggaacgcgtgccatccgaagaagttttgatggcattttatcaaaatgttttattttttaaaggatcgagtgcttttcccggatgatgccacatctaaagtgttcattgatgtgccggcacgggtcaaatcatttaacatctctgatcaggtgtaaatatgggcatgatggacatgaaaattggtgttggtttttgatcagaagatttttggtaaaaaaactgatcagccacctaccgtaacaacatttgattacttgtaagcttaatccacccctaaaaaagaccgaagaatcagaattatttttgggaggaattttgactattgaaaatgcgtgtgttattttctgatcatgattcgataaacaactctgatcatccacctaccgtaacatgttttggttactgtatccccctttggtattttcattttgcgctaattcaaattgccaattcttccaagtcgctcacttcgctcgatttatggcatctgctccgaacagttgaaggccaatttcgttttcgtatgggcgaacgaattagtatggcagtgaacagtgttggccaattgaaataccgttggcccatcgatacggtatttaccgtaactgacgacgatgaagagcaaattgaacaaccaccgcgaaaacagagagcagaattttttggtcgaccaaatttaaactttgctgagccggtaaaattttaatttatttaattatttttttttttataatttttaaatattttcttattgtatcatttttatataat

SEQ ID NO: 25687 - DNA, 793 bp, Heterodera glycines
attagaactggttaccgtaattatttttcaacctcctcagaaagggggaggggataattagacacggggggataaatggaaaaggggggattatttttcgacagattcatatatcatcattttgaataaaaatgcgtatcattataaaaaaatgagtattaaaacgaaggcgccaaattcaaaaatcttttattcccaactatttttaaaaatattgaaaatccaaacccaaacatattttttccgatattttttgcaaaatttctcaacaaaattcaagaaaatcaaaaaatacacccctaagaatcgacctaaaaatcttcaaaaaaacactcctaagactgacctaaaattaaaaaaaacttaaaaaattggggcaatggtaaagttttgtggtttcttcggaaaattatttaaaaatttaagaaacacattttctaggctggaaaaatgtgctgatcacgaatctgaacttggattttgcaaaataattattttatctatgattttttatcaagtactagatttttccaaaattttaagaaattagccgggcgtaaaaaaacacacaggatgttgtatagctcaaaaagagctttcgaatgagctattgaatgtatggagaagttatgtttttagttatttacgattttttgaaatttaattactattttttttttcatttttggcatttttagtgtattttttaaggttatttaatcaaatattgaatatataaacctttctaagtagggttgagggtttaaaacttatattttggcagtttttattc

SEQ ID NO: 25688 - DNA, 1636 bp, Heterodera glycines
aaaaattccggatccatttatcagatttctggtgttaacttagtcaaaactctgaaattaccttaaattctccgatgtctctgcacaaaaatgtgtcggcgtttccattgaaattggccatcaattaaaaataaacaacttaaaaataataattcgcttcggattgccatggcaacgacggaattttagttgaaaatgtggacaattactataaacaattgatcagagaattgaattgtcttttgcttttttaagttgttaaaatggcatttgtgccgatcaaagacggcgaattcacaagcacaatttacgccatggtcagtgaatgcctttcaaatccaaatcgaaaaattattccgcgctaagatcaaagaaaacaaattcacagaatgcattcgcattttgcagtacgaattgcagcggaacccggaggtcaatttcaaaaaaaagaaaaattaaaataaaatggaaaataaaaataaacaattgaaaataaaaatgaaaaaaatattttagtcacgcgccgcactttcacttttgggctattgttaccatcatatgcaaggtcaaaatgatagggaatgatgtagcgttttttacatagtttaattttttggtcaatgaaaatgctgcgcaacagtataactttttctttttgaatttcgtttacagtattctttttgaaatggcgaatacagtacccttttaaatttttgtttacagtattcctttttcttttaaaagattccattttcactaccgttttcccttttcttacggtatccgctgtctttctgtcccttttttgccccccccccctctgaaacacttttcagattttattatggccgccgagtgttacgagaagctcagcgagttgttcccgcagcacaccgactaccgtctttgccatgcccagtccctttacaatgtttcgttcccttggccatttttcattattcgcttcgcttatttccgctgttttttcccctaatttaggcttatatgtttcccgaggccgtttcttcgcttgcattggtaaacgttgagaaattccattctaaaagcaaatgtttcatttgtaacttttcactttggcacatttatttttcattcgcttcccacagataaatgagcctaaaatggaatgcaaagtggtcaagttggacgcggccatcaaatatcgggaggaggacgtgcaaaatgcgcgcattttggtggaacagttcgacagcgacgacccggacatggaagtgcgtccctccatactgttcacattcccttttcacattttgacattttcatgctgatcactcggttataaacccatcacattttggtcatttccccgtctgatcaattctttttctgattattttttgccaattttctcctcgcttctttggcttaaggtgaatttggcatgtctcgactacaaagagggcaattttgaaggtgcgttgcgccgtttcaccgccgcaatggcacaacaaaaagtggacgaatcgccggcctcgcagaaccaactgacttatgccatcgcactttgccactaccaaatgcacaacttcccacaagcattacaaatggtggggagaaagaaaacggaaagaatcggaaatgcattttaataata

SEQ ID NO: 25689 - DNA, 1277 bp, Heterodera glycines
cagctttggcgaagtttcatttttagggaaatttggacttttcccgccgcatttcattgtttttttaggtttggacggggctaatgcaaagtgttggtgcgtctcggaaagtgttcgaatacatcgacagaaagccggacatcgatacgaatggcacttacgcaccggacaaattggagggacgaatcgaattccaaaatgtgcattttgcgtatccgacacggccggacaatccgatccttcgggtgggaggggcaaacgatggactgggaaataacgcacaataaaagggcctctcattcaccgtggaaccgggcgaagtggtggcattggtcggacccagcggaaggtaattaaaaattggcatgggcgctaatgagaagagatcaatgccaaaccaagtgggaagagttcgtgcattgcccttttggagcacttttacgcgcctgagggaggcaaagttttggtggacggagtgccaatcggcgaattcgaccaccattacatccacaacaaagtgaatggcctgccaattgacaaatgaataattattgtgagtgatcggtgcttctttcccctcccctcagctcgctttggtcggccaagaaccgattctttttgcccgatcggtggcggaaaacatcgcttacggattggagaggtgcacaattgtggacgtggtcgaagcggccaaaatggccaacgcacacacatttattcaacagactcgggaccaatacgagacaaatgtgggcgagaagggcagtcaaatgagcggtcagtgggaggacggatggcagggaaataggggcagacaaacacaagtgatcagacaaatgcaagtgatcagacaaatgcaagtgatcagacaaattgagtgaacaggatttgagcaagtgattagaatcagagtgatcagaaatgatcagacaaaagaaattatagaaatgatttttaggcggccaaaaacagagaattgcgattgctcgtgccttggtgcgtcggcctgcaattttgctgttagatgaagcgacttctgctctcgacacgggtcccttttcgtcttgataaattcttttgcaaaattggatcagaatttatcttaatttttagtgataataattctcggcttttcctcatcccattttcacattgaattactctttttgttaagaatctgaacatcttgttcaagaagccatctataagaatctgaaggggcgttctgtcattttaagagctcatcgtttgtcgacggtggaaaaggtcccttgggg

SEQ ID NO: 25690 - DNA, 2251 bp, Heterodera glycines
gtaaaagaaacaaaaaataataccataattataagttctttgataatttcagtcgtttcaccttgtggttgaacgctgagagtcggttggcgactggtgaattgtgccgttctgaacgtcacttgtcccggagcagtttgactttgacgagaaggaatcgcttgtggagttgccgaaatttgttggatgggagcagccgactgttggtttattacgctgtgagatgttatggcatgttgttgtggttggatttgttcggcatttgaagaagagcgtctgctgttcttcgcatttgacaccgttggcttaataaatttgatttatcacatggaaagccaagaccacttggccaccccatgcgattgtggcacggtcggacccatcgattgattaaacggcgattcggccgtcgcatttggtccactccctcccaacgattggccttgcgcgtcgtgcttttttgcctctttcatcagcaaatacgtgccgaaaatttcgtcgaacctttctctttccaacgactcgtgtatttgctggagagtgtagccaaatgcttgcaacttcaaaatgcgcctttcatcccgaacgtcttttgtcggttcggtgtaaggctttaattcgtcttcctcatagcccatattcatccatttatcccgcattatcatctccaaagttcctctccttatcgggtttaaaacgagaaacttcttcaggagattctcgcagtctaaaattagatataatattcttcaatgaattgcacagtttcggacctgttgacatgtaaaaagggactctgtacttccctctgagaacccgctcacgaagttcctaacaaaaagttcaatttgaatttaattgtgtgtttaagtgtaccttaaggttttggccatcaaacggaagactgccggaaacaagcgtgtaaaggataacaccaagactccaaacatccacttcaggaccgtcatattttttgccttgaaataattcgggcgctgcatagggcggactgccacagaatgtgtcgagtttgttgcccggtgaaaatgtgttgctgaacccaaagtcggcaattttgatgttcatgtcggcatcgagcaacaaattctctgccttaaccacaaaatttgttccaataagaattagtttagaaaccttcaaatctctatgaataacattcttcgagtgaaggtattggacggcagaaacaatttgacggaactttgcccgggcctccttttccttcatccgtccatgggcaaccagataatcaaacaactcaccaccactcgcatattccataaccaggaacagagtcgtctcactctcaattacttggtacagcttgacaatgttggggtgatccaattgtttcatgatccggacttcacgaaaaagctaggaaaaaacttctcattacttcagttattcaccattaaacagacagacaaccttctgcaagctgctctgattcagtgccgttttgtcgatgattttgattgctacttccactccggtcggcacgtgctttgccaatttgacctatcaatcattaattttttagaaacttataaccgcaataacatacctttgcgaagttgccttttccaattgttttcagcagtttgtacttgccaatgtgcaggtcatctccggtacgtgtcctattcggagcacgcgaagaagaagcagtcattccagacgaacggtgatggcctgaagatgtgtggcgatgatgacctccttgatgggtcgcggaggacgattgtggaggttgttgcgagggagggcttaaattgaccttaaatagtgccgttttgtaaattggtgaaaggcaataaaatttttgtgaactgtctgtttgtatcaagttatgctgcattaaattgataaaacgaaagttttgagaatccatggttatgtaaaatgaacagagcctttttggggaggagggaggttgattcggtgttcggaataaaattttggaaaaaaataatgaatgaaaatctgaaaaacaagcttttatatagccagttcacatatacccaacggtgttgtgtcgttacataggtatttaaaaaccatcaaaatacatatctaacaaaatttgcttataaataacttttctccaaagcaaccaaatcattggtgctataagtctttcaacatgcagaattggttagataagtccaagtaaatggaatgccagagaattaagttacggcgattgtaataccagagaattgggtct

SEQ ID NO: 25691 - DNA, 1298 bp, Heterodera glycines
  unsure (1)..(1298): unsure at all n locations
agaagagcctcgcgcttaattgccttaattaatttttcgtgtgagtccttaatcgcttctgtctgcctgtctgtaacaacccattacaaatccgcataattagcattttcgggcttccattttgtggctttacgcattgtttcgggggcacattagcatttcggataaagggggggggggatgagagatgggtgggtgggtgactgacggattggattagtggatcagcagatcagtccggacattggaaagaagaagcacattgccggagggcacgcacccgccaccaccgcaaaatgcttctgctttctctcatcctagactctaattagagattttttaagcatatttatcccctctctccatgcttttttctctctcgctctctctctttctttgtctcccacttttcttctctctctaaccgcccatctcgatctctatctctctcttctctccgtttttctctcaaatactctctctctcgctctctctcttgccctctctctctttcactctccctctcttggtttgtactcttctctgttttctttttcctcttttctntcgctgcaatctctttccccttccctctccctcctctctctccttccttccctttctctgtccacatatacacacacacacacacactttatcacttattgtttcaattactggtcagtgatcataaaagtgccgtcggcaatttttccaccctccgccgcgcgacaattggcgttgtgtttgcacgtcgtttgttgtttcttttcaaattcattcccattcatcaacaaatctgctgatgctgctgctgctgctgcttgctgatgcgatatgctgacgttatgatgaattggaggattttgttgatcggcgggaagccgtctgttggttcgataattgcctccccaggggtccctccaaatccaccaaatccgccccccccccaaaacaaatcacaaatatgatctttgaaaattgtatagtttaagcaaattaagttggaccagcaggaaatgaccagcgttgagacacgaaaaaaccgtggtcgggcgtgattcattgaaattaagaaaatcttgggattcctagatctggatgggggccgaaaatttggacaccggaaaattggaaactggaaatttggacaccatattttattattttatatatgttaatttttctggttcctatgtccaattttcagggattgccaatcgggatcactgatcccgcccaaaccaacccttgttattataaccgtagaatttgtttttccatattaattatgcgta

SEQ ID NO: 25692 - DNA, 1374 bp, Heterodera glycines
ccccctagaaattttgaaaattttttttgggtgaaaaggggggtgaaaaatttttttctgtggtattttgaaatggtgattacgaatatgacctttgtttttcgtttcataatttttagaattttttaaaaattcgaaatttttttcaatttttttgaccctcgggattttggggtaaattttgaaaattcataactcaatggaggaccggtcaatttaagtgaattaaagctttaaaaatagcaaaaaatcgggagaattttatgggatttatttgggatttctatcttctaaagaaaaaaagttattccagaaattctggaaattttagatttttcagaaaaaaattcagaactcccttctgaaaagtcattctgtaaaagtaaaatactacaaaaatccgcaattttttcctctataatataaattttattttacatttttatcaaatttttaaaataagatataaaaataaaagtgattttgggattcgggaccaaaggggggtgaccaggatttttgagtggaaaaatttttctcacaaaaatcttccaaaaatatgtctttaggggttatttgggccgctgatcacgaatacgtgatcagattttacttttgacatcgttcagacctcagaatccctgtgtgattggggattctgaggcatcattttgagggggggggaagttcgaatccgggcggtgtacattatttttctttgtatttttgggttatttttaatgttttaattaatttcaagatttttataaatatttaatttatttatttaatttcattatttattttttgaatttataaaaaatgaatttcatttcaaaataaatattcaattattaattttcaaaattatatttaatgaataaaagagtattttattataaaaaaattttaaattaaaatgcaatcgatttttataaaaacttttcattatttatttaattttaaaccatgttgtacctcttctaatcacttttgtacctcttctaatcacttttgtatcttttatcacttttgtacctctttaaatcacatttgtatctcttctaatcactgttcttcctcttttaatcactgttgtgcctcttctcatcacttttgtacctcttcaatcactgttcttcctcttttaatcactattgtacctcttttaatcacagttgtacctcttctaatcactgttcttgctcttttaatcactattgtacctcttttaatcacagttgtacctcttttaatcactgttgtacctcttctcacactgttgtacctcttctcatcactgttcttcctcttttaatcactgtttacctctactggacactgttgtacctcttctcatcactgtgtacctct

SEQ ID NO: 25693 - DNA, 282 bp, Heterodera glycines
cggtgtcatctatgttactagatcggggatcgatcccctttaagggcgctcgagcaggacctgcagaagctagcttgatggggatcagattgtcgtttcccgccttcagtttaaactatcaagagagggaggagagggttggagaaggaaaggaaaaaaaaaaatgaaggaggagaaaagggtggggggagtatgagtatgatggtcaatatggagaaaaagaaagagtaattaccaattttttttcaattcaaaaatgtagatgtccgcagcgttattata

SEQ ID NO: 25694 - DNA, 1212 bp, Heterodera glycines
ttagtgctgtcgaattctatcaagaattaataatttggcgattttgagctaagttataaataatttttaatcaaatcataatgatggttttttaataacgactccgccccaatttattgaatcacatgaatgaaagaatttgtccaaaaataaccaagtattgtggttattcatacagcaacgtattaaattactaaaatagaaaattaatatccgttcatttgcgtaaaacgcaatttttaaaatggatcctcctacccattaatattttccgacattagttccataaatgtcattttgatgacattagaaagttctcgtattcttcaaatttacataaaaaattaaactacgaaggatggatgtgagaatgactggtggcattgagagggatgtatcggaagcagggatgggctttcgtgtttcgctttcgcatcgctttttcgatactttcctttcgcgattttctcatttttcgttctaattagggctttttgagtcctaagtcccattttcaggccataaaataattgaaattttttttagaaaatttcgaattttacgttccggttattttattggccaaatgtttatcataatgatcaggatagttcttccattacaacacaaaaaaggtttaagcataattctctttttctgtgttccatctctgtccaatcacttcactcaaaaattggtcggcggtggtgcccctcctcctcctcctccgttggcatttccgccgtgcccattgccaaaagtgccaacacttgcggatgggccgaacccggcttgccgtttgccgtaccatccgccgtagggataggcatatgcgtagccaccccacttaacgaaatacaaatttaaaatttaaattattttaaaatttctcacataagcttgggactgttcaatggccaagccaatgcaaaggacaagcagaaaaagggaaaagcttaaaaattaaatttaaaattggaaaatgagtgacaaattacattttgatggttgaagaagaagccatttccaatgataagcagcgaatgattgactttttgcagaatgaatattttatgaatgtgcgaaaacgttttggagccctttaaatactttcactttgtggccatccaaatatttgctttttatgtgccataacgagtggcaaaatcagtcccaaattacgtcctattttcgagatttcttcgacaataa

SEQ ID NO: 25695 - DNA, 1640 bp, Heterodera glycines
agatttttgccgaaaattgtatccatttttcgcaaaaccagactattttagccatctgggggtccatttttcaaaagtatggtaaaatggcttctggtggtgccgtaaggcgccgctggaaaaattattggaaattttacactaatacaaattgttaaatcttcgcattgttttcagttgaaacacataatgcccggcgttgtttcgatggcaaattgcggtccaaacacaaacaattcgcaattctttatttgcactgaaaaggctgaatggctcgacggaaagcatggcaagtgaaacaaatgagtagggatgagaattaaagatacgaaaaatcccaaaaaaaatcggcaaaaatgcgttgctgaaatttcagttgtttttggtcatgtggttgagggaatgaacattgtacgacaagtcgaacagcaggggacaccgtcagggaaaccgaccatgcaggtgagtggcggacttggggattgccaatttaggcaatgtttttcaggtttacatctccgaatgtggccaaataacgagctgaagaatctcatccaacatttattttttctttatttatttttgaataaaatttgttgctgctctattgagcttgtcaagttcatttatgtcctctgtcgatggattgtgggcaattgtgtagattgtggtcccgaagaaaaattaacttataatttttttttttaatttttcctgtggtgaaaaaatgcgctgattacgaaattgattttgtctataacgttccatcaagtatttaagaatattagttgtataaaaaattataagcaaagtgttgtagaactgaaaaagggctctcgaataagctactgaatgcccggagaatctctacacaattgtcagattgtgtgattcgccctgaatttccactcgtacagcaaaaattgggaaaggatggattcttttctggtgccattggttcgattgaattgcttaactccattccataagcgaccagcataaatggagtttcggccaaaaaaatggtaaaattaatcgatgggatggggttgcgcccatacgataaccaaaagggtgcaccccaaaattttgccgcaaaatttaaaaaaaaatttggaaaatttaaagagaaaaaatcgaaatataactatggtttccaattaacacatcattttatttgtgaaatcatctccgcctctttgtccatcgattcgttccttttcatttatgccgcctcttccgtcgcgacttccaccaccggcgccccccaaaaaggccctttcgtgcaatagtcgcgcagcatttccatctgtccgtcgttcagcgcggacggcgcgtcctcaaccaagcgacaaatgagcgcgtatttgagctgcatcgcgtcggcgtcgaaattgacggaacggtcgaccagcaaattgacgaaactgaaaagaaatggagggaaaaggggtttgaaattggcaacagaaacattttgaaaagcgatagttaaaaaatttataattgcgaatagatcaaagccctaactttgtcttaaaaatggccaaaatttggcgaaaatggctaataatttcccgttttgccatcgacaccaaaaatttaggaaattacacaaaacaaaaaatctttttctggtt

SEQ ID NO: 25696 - DNA, 1325 bp, Heterodera glycines
tattagggccgcgacttttagtgacgaaaaatcccgaaatagttaactaaaatagtgtcgaaaaagtgccaaaaaagtgacaaaatagtgaacaaagtccgaaatagtgacgaatagtgacataatttttagccaaaaattgagcaaaaaataatttttattcactgattgcagttgcaaatgagctacatttcctttaaaaaatgctcttagcaaatattgacatttttaaatcaaaaattttgtcaagaaaaaaaatttgggggaagaatttttgaaaaaattttccaattcttagtggtgtattttaaaaaaaatttttggtcgattcttagaggtgtatttttttgaaatttttttagatgaattcttaggggtgtattttttgattttattgcatttttgttaaggaattttccaaaaaatgttgaaatagtgaaaaaatagtgacaaaacgccaaaaaagtgaattttcactattttaagtgacaaaacagcaaaatagtgatttctagtgacgaaaaatgacgtccaaatgaaagaaatgcgtttttgagctcctttcttcaatacaattgagcaaaaaaaaaaaagttttttcactagaaatcggggcacaaattattatatgtctttgaagtaaaattgggtcaaagtgccgttatgtttatgtagtgacgcgattttgatgatgtaaaatacggatttagaacaagctaatttttttagcttaatataattttttcagatgaatttaaaaaaatcgagactctcttcattttaaatttttcctcgtacattttttttttgtaaaaatccgtatgtttataacatttatgttacaagatggaattagctagtgttcttaaaatttttgtgcttctaaattttcgtcaatttttttcgggtccttaggcttggaaaaatgagtttttttttgaggatccatttgtatatttaaattctaattttataatttattttttattttttaaagatttgaattggaccggtgggagacgattcgccaatacaacagctgcggaccaatcaacattgaatatccggaatatttgacaaaaatcccagcatttgcgccaggctaccttgaaggcaatgttgtgcgctttgattgtgcccaatcgcattggatcaaaggcgattcggaatataaatgtgggttttattttgccgaatttatttactagcatattttggttgtgccaggatgaccaagagtaccgtatttatagagaccgaacaaggggttcggtccgcttttcgataagatcgaaaaaatgtcagcaaaaaaaaatttcagaata

SEQ ID NO: 25697 - DNA, 1348 bp, Heterodera glycines
  unsure (1)..(1348): unsure at all n locations
tgccgcgaactgctccaaaacagcgaggcacgcttgaagcggtgcccgtacccgtaccggtgaagctttttcgccggtttcggcacgttgtntaatgctttgatcagttcttcagattgtttctctgtaagcagcacatcgtgttggaaggtgccgtcgtttacgggttgaacctgaggcaaagaaatcgactttcatttggcattttgttcaattcgttttccaatttggcgttttgtctcctttctctctgttctcttcttcttcccttacgtgttcgtcaaggcctgccacttcgagcatcttttgcttcagtttctgcaccatttccactctcttttgtaccatttcgcctgattggtacggtcgcacttttctcatgaagtccatttcgtgctgcgaatggcaattgaccaatgtttgtttattttgaaacctgtaaaaccatcgtccgcttttgaatcattccgaagggctgcgctttgcagtcgactgcaccgctgaggcaatttttctgaaaacaattaccaattaattaatttccctcccccgccccgaattagttttttttaatcccccccccccaatatcactaattactgacgagcatcgcttcccgcgcttcctcggacaaaaaaccgaaagaaaccgatgggtcctccggtttgacatctgaacagcacggtctttgtaaaagtgagcagcactcgcctttgtccatctgtgcggcatgcatgtccacgtttgctgttggcgttgggcggcgttcgtcggttgcatttggggaaatagcgaaagagggccgaaagttatgaaatgacgggggccgtcggttgtagtccccggcggaagagctccacgcgctaaaatcgccgttgggcgatgcggtcgaatgccacggcgtttgttgagtagtgtcagtcctgaaaaagtgccgtgccattggccactgttccgtccccggccccttccgcctgtctcacccctcttccgttccgccattgcattttgaatgctccggatgacgagcacaaaagcgttccatcagtccgcctccttctgcaaaagaactttcgcttcgcttttggcaccgtcttacctccgttttcacttccggggactttctcagtccctccgctgttcccccggcatttcgcactgtccgggtgccgggcacagaacctttgaaggagtcctaaaaagcgttgcgtcacttcctctctctctccgttctgcgcaccttcgcgtctcttctgaccaccgcctccctccgcgctgtccttgaaagtgttttcagttacacaaccagcacttgcccaacttccgttgtccccgtgtcctcctcatt

SEQ ID NO: 25698 - DNA, 1243 bp, Heterodera glycines
agttggacgtgttggcggaatttctgcctcgattttcttctgactagtgtttggcttttttgtcggatttattcttggtgtgtttgttctttttaaaccaatagtttttccatcttctctttttcctctctggctggtatttgaattttcgactttaccaatttcgtaaataaatacattattgtccatttttaatgcctctctaggcactccaaacaccttattttttctttcctggtccctactgattgcgaacgtgtactgtaattcgtgaacggcaatagcttgcccgggccatgtctccgttatgaccggtccgatagaaaaatgagtatcccaaaattcccccgaaggtatacgccacattaaaagttcgactgccccgggaaggcgaacccaattctcttttcccgtaattaattgttcgatttttagggaatctccccacgaagtgaccattttttctccatccaagattcctcccgttccttcttcgataatcgtttgaatgttgttaaagcaatttaccccgtaccatccatattctttccttattggcatgagactttcccatcttgtttcactaattcggttcattggtcgaagattcagagattcttggcagtcttttagcgatgcttctgactcaaacttctttgggggatgatcgagagtaacgacgcgcaagaacgactcagtacacgtgaccgttgttatattccagcatttgaacaccggaaaagaccgtggaattcgaattgggatataaagaattgctttggttttaattggttgttggcctgcgcctgccggaagagaacaattttgttcttctgggaatccaattgttactgatatctccgctgttggttttgttggacaaatttggtattgccccgctgttggaacgatcattaatgaacaaatgattgttactatgcagatatatggaaaattgacttcgtttactcgccagccggtccgatttcctcccgaattatcattcactcttccgcggatttgtccgtttcctcctctgcctcggtttgtattccaactttgattttggaattgttggtaattataattatttgaggggtaaaatcggttgcccaatggggttgaatttgaatttcgattattcataccgcctcgaaagccctgaaatctctggaatcgtcctctgaatcctctcggattaaaaccgcctctcgccatgaaagggtttcctggtggctgattt

SEQ ID NO: 25699 - DNA, 913 bp, Heterodera glycines
  unsure (1)..(913): unsure at all n locations
cagagcgtgccgtgccagctgatcccattcnacgctctattattctcactcttttgcgcaaattctctacatccatccgccgtaattcccgcttctgattgatctgccaaagccttctctccctgtcagatgttgggggattttcttcctcttcagtttcagacgacgaaattttgaattagagttaaatttaggaaataaaatttatttatttttgtttaaagttggatttgaagaaaaaaaaaattgggtttagagaatatttgccgaataataggttgatgaaataagtagcttcgcagaaatatttgatgattttgttggagagaattaatgtgatgaatgttggtgttgatgagaacatttaatcagcgggcatcggccaatatcttctgatcagtttagccgtcacgagtgttcgtttctttggcctggtttttgattggctgtcggctcttttggcaactgtcactttttccaccgtttttattttgattgtctttcctttttcccctctcacaattctcggacttcgatcccttatttttctccgaactgttacttaatgggcgtccccaatgagtgtcccttttgttttatttagtgtttatcttaagacttatcccaattcctatccccgtgattaattaagttaatgagcgctctaatgatcaccacttctcgggaatggggcccggcccgagggtggggtggggtggtgtcttgggatttgggacaaatgaacaattgttggagttcgggaaatgaaaggaaaatagttgcgtaattgtgcgggggtgtgactggaaaaactgtgaacaaatgctttgaaaagtggaggagggaaaagaagggtgtgagagagaaaggaaagagggagagtgcgagagaaagagaatttaatatttaatta

SEQ ID NO: 25700 - DNA, 1153 bp, Heterodera glycines
  unsure (1)..(1153): unsure at all n locations
ctttttgtatgatanctggtagatattgggagtaaaaaaaagtttttttgtgactatttacaataaaaatntatgcagcatttctaaaaaggatctaaaaataatttctgcgtaaatattttttacatatgtgnntgaagaatttgaggctgcttctgatgcgatgaaaaattttcnagcttttctgaaaaagttttttcccagaatttatacagcttccccgacaaattgttangataattattctagacgatttttttatatctcagtgcttaactattgcctttttgtatgataactggtagatattgggagtgaaaaaaagtttgtttgtgactatttacaataaaaatttatgcagcatttctaaaaagaatgtaaaaataatttcttgcgtaatattttttacattatgttgttgaagaatttgagtctgcttctgatgcaattggaaaatttttcagcttttctcgaaaagttttttcccagaaaacggatgggtcaaataaaaaactaaacatctcacatgaccaatttaaattcacttacattttgggtttactttattatgctggcccataaaaaaatggagtttttccggtgccaaatttttgtgaattttctttcggcccgtcataagcggattgtttgggggcaaatgaaaacaaattttgtgttattcgaatgcgctagccgagctctacattttcaaatgtatcaacaaagggtctatctccactctctggcgagttatgtccagccaaagcagagtgggccataaacacgaattttttaatctttggtatttcctctattttgagcctgctctacatttatgtattgtgccaatatgcctattgcaactgaaatttattcaactttcccgacaaattgttgagataattattctagacgatttttttatatctcaaagcttaactattgcctttttgtatgataactggtagatattgggagtaaaaaaaagtttttttgtgactatttacaataaaaatttatgcagcatttctaaaaaggatctaaaaataatttcttgcgtaatattttttacattatgttgttgaagaatttgaggctgcttctgatgcgattgaaaatttttcagcttttcttgaaaagttttttcccagaa

SEQ ID NO: 25701 - DNA, 1915 bp, Heterodera glycines
  unsure (1)..(1915): unsure at all n locations
aagaacagctcgagctttacaagaagatatggaaagcattatcgacatttctgggactttttcagaaatcatgtttaattccccaatggggccccattttggttcctcagccacagccccatgcttctcccaattttaagtcttggatttgtcaaataaattaacgatttcgaattaataataaaaaattctattataaattttttttgtagaggggaaaattctgaaccaaactactatttgaaaacccaatcaaaactgggaaaaatttgaagtcaaaaaattattcgaatttctccaattttgtttccataatttccgaatgttattcggtatcataatgccaaaccaaaacgaattcgttttaaaatattcttttctggacttgacttggtttctcaatatcgaagcttttttctccgcaatttctaaaacgcttataccaaaccctagatttttggttccgatgggtttcagaaaaaatcccgtgtggtgaaaacatatttcacatttcacttcataactttttgagttctgcacggatcgagaccgggataagaccattggaaagagcagctcgagctctacaagaagctatggaaagaaaaaatcgacatttcagggactttttcagaaatcatatttaattccccaatggggccccattttgggtccccagccacagccccatgcttctcccaattgtggcgaaaacaatatttcacatttcacttcataactttttgagttcggcagggatcgagaccgggataagaccattggaaagaacagctcgagctttacaagaagatatggaaagaaaaaatcgacatttctgggactttttcagaaatcatgtttaattccccaatggggccccattttggttcctcagccacagccccatgcttctcccaattttaagtcttggatttgtcaaataaattaacgatttcgaattaataataaaaaattctattataaattttttttgtagaggggaaaattctgaaccaaactactatttgaaaacccaatcaaaactgggaaaaatttgaagtcaaaaaattattcgaatttctccaattttgtttccataatttccgaatgttattcggtatcataatgccaaaccaaaacgaattcgttttaaaatattcttttctggacttgacttggtttctcaatatcgaagcttttttctccgcaatttctaaaacgcttataccaaaccctagatttttggttccgatgggtttcagaaaaaatcccgtgtggtgaaaacatatttcacatttcacttcataactttttgagttctgcacggatcgagaccgggataagaccattggaaagagcagctcgagctctacaagaagctatggaaagaaaaaatcgacatttcagggactttttcagaaatcatatttaattccccaatggggccccattttgggtccccagccacagacccatgcttctcccaattgtggcgaaaacaatatttcacatttcacttcataactttttgagttcggcagggatcgagacagggataagaccattggaaagaacagctcgagctttacaagaagctatggaaagaaaaaatcgacatttcagggactttttcagaaatcatgtttaattccccaatggggccccattttgggtcctcatccacagccccatgcttctcccaattttaagtcttggatttgtcaaataaattaacgatttcgaattaataataaaaaattctattataaattttttttgtagaggggaaaattctgaaaccagactactatttgaaaacccaatcaaaactgggaaaaatttgaagtcaaaaattattcgaatttctcaattntgtttccataatttcccgaatgttatgcggtatcataatgcc

SEQ ID NO: 25702 - DNA, 1032 bp, Heterodera glycines
gacaagggtggaggtgaggacattgggcggagtcggggagggcacggacagaacggggaaaaggggaggggaaggggcgggaccagcagcagaagcaacccttagctgttgttgaggcaatgggagggcggcgacggaagcgggggacggcgaggggaaaaaagtgggctaaaggggggggggggattagggaataatcggacggaatggccaaggcaagccctgacaggggacaaacatggccaaaaacagggaagaaaccccaaggagtggcagaatattttgtgggcttttgatactgagtttcccttgcctcgtgccatgacattggccaaggagtgcccgcccctccgatcacttggcccttttgcagtttgatcagcgactgtctgccgcgcttccgctgccttcctctcgtcgtctgcagctgttgcagatcgtcctctctctcgtcctcccctctttctctgtcttcgttgtgccccttttttgttgttgttgcctttgccttctgctgcagtttgcgcttcggtgctttcagtgccggcagataaacaatttcaaaccgatcgtcctccgcttcttctctctccgtgtcttcctccgtccgccgtctcttcgtctctcttcccttttcccttttatctgtttctctctcctcctccgtcccttcgctgtacactttttctcccttttcttcttccctttcttcttccgtctcttcctcctcttctgtttccccttcggcacttctccccttttgcggtgcctttgtcttcgtcgtcctttttctgctgattatgtttggcatcttttggcctgccattgttcgaagttcggaggaatgcaaatgttttcgcctgagcaaattgatcagttaataatgcaccattttccccattaattccgacaatggcaccatcgtcgcgtcccttcccgccgtgccgttaggggtgttctccacgccaaaaagtttggcataatcgcggcggggggttcgtgcgttaatcgccggcggagagccgtacagaa

SEQ ID NO: 25703 - DNA, 1198 bp, Heterodera glycines
  unsure (1)..(1198): unsure at all n locations
gactccaaacgcgcgggtccttcagaacaaacaaaaaactcattaaaacatttgaaatataaaaataaaccgccctgccaccctaatattttttttcttggtattggcctaggtcgtaagcggatagcaaaaaaaaaaaatcggaaaggaattccgactctttaaaaatgccaagaattccggcattccggatgggttagaccccagttaattgcccttgtgtttccagcaatgtcttaaaattgcgcccgacaacctcatcgtccgggtccggtgacatgtccggccaccgaacgcacgcgtacaaaatgcggaaacgcagtgcaagggcatgaatctataaaaacagtctgaaacaaaaaatgccaaattgaattgcaccgattttgccccgctcgtcaaatagcgccaacagtagaagaacagcggacgaacacatgggtagggccaaactgtcgggttggacttggccgtctggtggaagaagtgcagggaacattttgggttggtgccgccctggcgagccaaacgcttcagaaacctttaaaaccaaaacacaaaattaaatgatcgtagtagatagaatttaaaaatgatatttttttattaaatttccaaaaaaccgctgggaaaattttttaattttttgagaaaattggtccggttaaattttacaaaattatccaaatttatcaaacaaaaaaaacatttaaatttatgaatttttcctaaaaacttattttcattcatttaccatttgggcagtttcaaaatgctccgtttgcctgccccacttttgaagtcattcggttgggggaagggaaacggctttttctcgccgaacacttcgttcgtcctcagtggttcacttttgacgtacagtggcggctttgccttcacaacaccgcgggttcgatgggcatctgccggatagggttttagaaaaacaaattttttaggcaaatgtaagtttttgccgaaattttttccatgttttcatccaccatttatatttaaattcattattagattggcaaaatatacaaaaatcggcattttttgaatggaaggtcccaaaaattcttanaaccctcacatttcatccaatttcggcgatgcgcttggcagctgggactgtagcagggccatggcaccggcgcggagaaggaggagccaaacgacggcacagcagcggtag

SEQ ID NO: 25704 - DNA, 1895 bp, Heterodera glycines
  unsure (1)..(1895): unsure at all n locations
gtcacgcgagcgagaacgactgaaaaaagagagggctttgatttttaaaaaagtgaccaaaatttagcaccaccgtcgacccgaaaatcccncaaattttgcccaaaaattattggttttttttcacccaatccacccgaagcggattatcaacagcttctaaacatagagagagagctttccaatgatattaaacttataaaattttgtcaacaaagaaaaaagttttgatgttttaaacttggttcacaatcagacgcaattgcctcctaccgcaatcctgagagaaacttggaagccttttcgctttttttggcgctttcctcgtgccacacattttgctttggtattgaattgaacagttttgatcggcagatttgtgagactttgatcaattgattgattgatattgtgaatgatcagttggccaattgattgtttgatctgattgctttgccaccaattgagaagcccgacagcacacaacaataacattgtgagaaattgaggtttgacaatttgaaattttgtgagattctttctatgtattgattgctaagtgtgtttgattgtgagagcaaagttctcccttaaaatgtcaagaaaatcatttgggaaccaaaaatttaaaaaaaaatttgaatcgtaaaaatgaaaaaatttgacaaaccttcgagcgcggccgcgcttcggcgagatttcacggcgtggtgacgggctgaaaatttcaggtgtgaaaaattgtttgactatatccaccgagatggtggtggtacatccttttctgaggatatttttagtttacaattaaagggccgatcataaagcatagggagacccaattatttgctttttttatattgattaaaaacaatgatttgttcaaagcacatgtttctgatcagctacccacgaactattaaaaattgaaaaaaaaatcccacaattctaagacatccattctcggataatccaaatccggttttcaaagctaggtcagaaaaaagatcacccaaaattagacaaaaaaaaaaattaaacacaaattgttgggtaatttagggattttaatatttgtcccccctatttgtcgaaaaaaattcattaaaacaagctaaaaaagtattacccaatttatgagtaattttcagtaaacaatttttttgaacctgtaagtgtgggaccgagaccgcgctgggcttacacttcggttcttctccctctttgttctctttctgctaccgctggacgattcatcggccatcggactttgctcctaaaaaaggctaattttataagactgccccacaccttttttgaaaaaaaaaatttcaaaatatttatgacataaaaacatgttttaggggggtttcgggaccgctgatcacgaatcttacatccattttggtacttatacaggttgaggatcttaataaatgtgcgtgaaatgtacactggtttccttcctcctaatttgttcttccattccatttacaattttttcgagttttatacgatggccaccgaacaaatgcttttgtgcgccattttagaaacaatacattgcgcttcttcagcactcgattttgtactcgaaacttttggtctgtccgctgcggatcggggatgaatggtttgcactggaaattcccactaatggatcaccgtgagactgaactcacagggaatgtgggaaatgcgaaaatttaacaatattttatgtagagtttatatttctacatagttattaaatgcctagcgcttgaagatgatgacatgatgacagagggcacgagtttgacgttggcaatgtatatatggacgctagattagaccgaaattttaaatgtgctcacttagcataatattttaaaaattgaataagtctgaaaatg

SEQ ID NO: 25705 - DNA, 1508 bp, Heterodera glycines
  unsure (1)..(1508): unsure at all n locations
aaaaaaaaactttcccggggggaaaaagggggttttgaaaatttttttggaaaaaaaatttttaacaattaatccccggggggagaggggaggggaaaacatgtttaaaaatttttaatttttttttttttaatttcccaaaaagcgtttaaaatttaaaaaaaaatccctttcggggggaaaaaagggggttaaaaaatttttttggaaaaaaaaatttttacaaaaaaatcccccggggaaggggggggggaaaacaatttttaaaattttcaattttttttttttttaattttcaaaacgggttcagaaatcaaaaaaaaaacaattccgcggggaaaaaaaggggtatgaaaaatttttttggaaaaaaaaactttacaaaaaaaaacccctgggggaagggagtgggaaacatgatttcaaaattttcaattttttttagtctaatctactcaaaccggttcagaattcaataaaaataacattcacggtgcgaaaaatggggtttgaaaagtttattgggaaaaaaagactttacaaaataatacccctgggagaagggagtgggaaacatgatttcaaaattttcaattttttctagtctaatctactcaaaacggttcagaattcaataaaaataacattcacggtgcgaaaaatggggtttgaaaagtttattggggaaaaaaagactttacaaaataatacccctgggagaagggagtgggaaacatgatttcaaaattttcaattttttctagtctaatctactcaaaacggttcagaattcaataaaaataacattcacggtgcgaaaaatggggtttgaaaagtttattggggaaaaaaagactttacaaaataatacccctgggagaagggagtgggaaacatgatttcaaaattttcaattttttctagtctaatctactcaaaacggttcagaattcaataaaaataacattcacggtgcaaaaaatggggtttgacaagtttattggggaaaaaaagactttacaaaataatacccctgggagaagggagtgggaaacatgatttcaaaattttcaattttttctagtctaatctactcaaaacggttcagaattcaataaaaataacattcacggtgcgaaaaatggggtttgaaaagtttattttgaaaaaaagactttacaaaataatacccctgggagaagggagtgggaaacatgatttcaaaattttcaatgttttctagtctaatctactcaaaacggttcagaattcaataaaaataacattcacggtgcgaaaaatggggtttgacaagtttattggggaaaaaaagactttacaaaataatacccctgggagaagggagtgggaaacatgatttcaaaattttcaattttttctagtctaatctactcaaaacggttcagaattcaataaaaataacattcacggtgcgaaaaatggggtttgacaagtttattggnggaaaaaaagactttacaaaataa

SEQ ID NO: 25706 - DNA, 1120 bp, Heterodera glycines
ttgctggggatttattttcccttttttccgatttgtccacacttgtcgagggatttacttttccctattttcaattcgaggccacgtccaattgtttttgtccactgctgattcaccggtgccaggagcgccaagtcgtaaaaaaacagatatgattgttgtcagggggcttttaataatgttgttgcactgcccacggcaaaagacaacagcccaaagcaaacacaaaacaatacagcccaatgccgaagatgattatcgtttaattccaaataaaattagggcgaggacaatcaataggaaaactgcgacagcataaactaacaaccaacacttcacaaaaatcacaacaaaaatgaaacaaattaaataacaaaacgccaaatatattttaaaatcacaatattagcacagtttttttgacaatatcattcataaatctgaaaattcattaaaattaacagacactgtccgcccgaacgtgcgacacttttgacgatgcctacggcggtggctcatcatcaattgacggacattcggtgggagggaaggggaaaatattgccgtaatggcacagggggacagagcggtggtccactaacaaataaggaggaacgcacacaaatttggccgtgttttgttgacttggttagaacaaatggaaaaattgaaagcgcaatttttggaaattggcacggattttattccattaaaaattcccaaattttcccccagcggcgcttctattagcatcaccggaatctgaatttggggtggtcaaaagctgcgaacttttagtgggaacactcactgtccattcaaagggttaaaatttgccattgtaaaaaataacgaacgaccaaaacggcacagatgaccacggtgcactcgtcgtcaaatcggcactttgtcaccgccagcgttccaccggtgtctatcgtggtcaatttgtcctcctgctgcaattgcatggccaacaattgctgtcgctgcaacaacagcaacgagttcaagcagttaccgccccctctggcggagggcggcggcggtgagcaattattggtcaaatgatgcgccggtgccgacagagcgaaacaatctcgtcaacattttgtccatt

SEQ ID NO: 25707 - DNA, 1361 bp, Heterodera glycines
cccgggggaagaacggaccccaacacgccaggagggagcgatggcgagcaaggcaatgaaatttgagcaagaaaccgcacaaaaatagcagtgcgtggaaagtgaagtcacctggtggtggcgggatgtgccgagttaaaaaagggccccgccgtggcgaattgcgcaccgtttgggagaaatgacgacaccggaggacgaggaggagggggagggggaggaggagggccgggggggagcgaagcaccgcgttgttgttgctgattgtggtgggaggcagcaaatgaagccatcaactgggagagagggtccatgggggcacagaggggggaagaggaggcggaagagcacggcacagccgcggggagggtgggcatcatctgatcaacataaagtaaatggaggaggaaaagcaagggaaatggaaatggaagaggaatgaatgatttggtaaaagaatggatgcaaaataccaaacatgggctgaccaatggtccctttttgctgtccaatgattaatcccaatttggatggtcatttggtgttaattaatccgactgcccatcttaacagttccctgccgtcctcaccttctcccgcgtcttcccctgctgttgctgttccgtgttcgtttcccgctccctttttatgtcggcattttccttttgctcttttggtctgccgatcaattgaattgcccttcgaaatgaatttttaaattgttgttggtgcttctgattttgatgctgatcattccccgcgattggagacgaagaaggcgaagaagaggggggagaagaagcgaagggcggaggaggaggggcgaaagggggcgacgcggaggcattggccaaatcggcggcggaaaaggcggaaaaagcgccactcatcggagaatgggaggaaaagcaatctgagaaaaggggggagggagcaatgattggcaaaggaattataagcaaaatgaaaatgaacaaaggaagggaagggaatgaaaatgtaaaagcaatggcacaaacggacggaagggcggagggacgagcgaagagacaagcgacgagcgacgagcgacgagcgatgtgtgtgttgggggtaccgtagggggggggggggacgggcggagccaattgctacacgggagaatttgtaggagagttgtcggacatgggcagcgggtggggggggggagggggagaccacgcccattcccattttcactcgcagcggcgcaccctccgcaccgctcgcttcccctgcccccctttgcccccttttctctgccatttccatcactccaaatacaccaaatgctctttcaaagaaaaggattggttgcatcggtttccatttcttctgaccaa

SEQ ID NO: 25708 - DNA, 1320 bp, Heterodera glycines
  unsure (1)..(1320): unsure at all n locations
cctcatgcggcgcctgttcaatcaagattaaaattccataaaagcaaaaacagcanaaaaaanaaagaaaacnnaccccgnagancaanccancggccnganaanggcngancagcccnnggaccacaaagncgaccncgncgacaagnaagnnnaaccnngcacggagnngggcacgnncggccgggcgcngcngggaanncannnnnggnnngcagggnaaaggaagggngaaaaaaaagagggcgacnnncccaggggcccnnnngnangaggcgggancggggccancggngnagcgaagggccgacgcnncggggaccgangcgaacggggncaaanncaaanaacaaggggangngcggcannncngcancggcacaaaagagaaacnaaggcancaggccgcnaccggcgangcgcnggncacannnacgggggnanncaaacaccaaaggggannaaagaaannnanaaggannaanannnaaannnannangaaanganganncaaanacangaacaannnngcaaaanngannaaagnnngngancaanccanccnnccggcanggnngaacannngcccacnnncannagcanngnngnaggggnngcnnnggnnattcccagcatcaaagttcgtgcgattgtttccgaaattgccaaaagttgaaccattattattagtgaagctgcttctaaagcgattgttgttgttgtaatcgttgtttttatttgcacaattcatgtcgctcagcctcatattaagcgaaacacacccactgcacatgtgaaattgcacttttacccctcctaagggatcgaactcgaaagcataattaccgccgctgttgttgttttttgtcgaattgaacaatgtttgtgagcagcaatgacaaagattgaaagttagaatatacttttttcgtaaaagtttccataactgagcattagtattgttgacgctgttattgttgctggtgttgttgttgttgttgttagattcttccggcatgttttgctgaacattattaaaagtattcatttttattttgcaaaaaaaatcttgtgattaaaatgaagttttgcgtcatatttcgggcttttatatagcgaaaaggtacagtgctgcgcgctacgtgaaagacgaagttacggtgctcctacgcacatataaaagcgcttgaatgtgcacaaaatctcacttgcgcgcaatgcatttgcttatagcattctcgcgcattttgggctgttcccctgacgaagtgggcgcgcgaatttgtgctagtgttgcggatcgagaaaaatttgttgaa

SEQ ID NO: 25709 - DNA, 2360 bp, Heterodera glycines
ccgataaatttgtgtctcttccttaagtcgacagctgttcctccccctttaaagccgcactctttccccccccccccccccgccatttgtcccttatttattccctttttgtgactattccctttacacatttcttccgtcttctcagtgtttctttttgccgatcatttccctttcgcttctctcagttggccctctcttcttgcctttgtcctcctccgatgtccaattgtcctttgcctttttgcctcgcgctctcttcgccctcctctcttttccttttcatcgccacccttctcccaattgctcaattcgcccatcttttggtgggggccgccgcatcgcaattttcttccccccaaaaatccaacaacattttgccacgtgcccgtggtccggcagtagtgtcaattccggtcggttgcccgccttttcggtccctctgacgagtgcttttcgtcctcacaacagataaagcatggccgtgccggtccccatggactgcttcagacttcggacccgttgctgctgtggtgccatgcggtggacgtccgacttttgtccggcagagaatcgcgcagagagtcagcgttggacacagaagaaatttgtaattaaagccgtaaaaataaatgggcgccattcgattgcatagattttacacacgacggagaaaattacccagccaatctcagcaccgacggcactttcaacggaacattgagcttttaccaagtgaaacattcgctgcatttgctttttcgtgattggaagtgtctcttaaggtttacgcgtcttacgccggcaattggacgtgtcacattcgaaccaaacactttggcaatgtaagcggagagatcgccgttaaccgtaggttttagaataatttgatggccaaattaaatgaacgaataaaacaaacaaattatttgcctttcaaatttcgaaaacattatgtttacatctaacaaagctaattcttacaaaaatacatctattcacagtccgtcctgtcgtactcagcaatgcttcgctgcgcatcgatgagaaggacgcctttcattttgaagcggacggaatcaatgccaaacgcggggaggacacgcggttggagtgcccagtgtacggacatccgaagccggaagtgacgtggcgaaggggcgcccttgaggcacggatggacaaacgtgggggcggggcagggaaggtcccggtatttcggtcgtcttggtcggagactagccaccatctttaatagttttaacaaaaaaaaattttgaacctcgtttttgacaacttttttttcaatatgacagaaaacatgtttccggagattttcagtggctgaatattttttttttggtagagattttcatttgtttattttgggataaaaccgagattaaaaggcagggaaatcgattgccagggtgttttttagtgttttaacgccttttttttcttcagttgcgttccaatgatcgaattgaattgctaaatgatggagccctattaatacgcaacgtcacttttgaagatggggacatttactcatgcagaccaaagaactcagcgaacagaagggacaaaaagagcggcataataattgaaaggaaattgcgcgtgaaaagtgagacgcgaggatgggcggacgaaggaaacgattcgttttggccaattcatttttacctcgttaaattttttgggtcgaaaagaacgaaaaacgaagtcgaaacgatattttaacttagtaatgctttttatttcgattttagtgattttgaatagtttgagacacaaattagtaaaattcgaaattagtttaaaaaacccgaatatattttttcgaaacatcatatttaccaaaataactagaaaaattattctaaccaacttaaaagcagtcctgagtttaggctaaaaagtattggccaaaaatgactcatccttttgccgggtgggcggggagataaaagaacaatgttaataatgggatggttagcagaatgtaatgcgttaattttctgagcttttctaaaggcgaattggcttggctgcttccgctctgcattattttttcgataattgtgcttctcttcatcatcattttgctgtgcgaaatcataaaacgaaatgagaacaaaagactcactacagatgaagacgatgagtaaatgatgcgtcttttgttaatattttcaagacgtaaagaaacgatatttatcaggaaattgtcagaattcgttagaaccattggaaaatattattcgtaggtcccagactcaaaatcacataaacatacagacctcgaggagtcgattgatgtataatttatatacatttacaatccccgcagcttt

SEQ ID NO: 25710 - DNA, 1934 bp, Heterodera glycines
tgttacaaaggaccggaaaaaaattttttaaaatttcaattttttttttttttgccccattttcccctccccgaaaatcttttccgcgccgtgggtgtttttttttttcagatatatctgttgccgaccaaaatccgcgatccccacccatttcgctaaaattctggtattttaatctccccaccttccaacaaaaatcgcatttttcatttacaccatgtacccctgcttcttatgtttatgtacctacatgtttcccctatgcgcatctgtcggcccttcaaattcgatccattgttcgccccagccgggggccggcttttcctctcttctctcggcttttcctctcttctctcggctttcctctcctcccttcgatccccccttctcggcttttccctctattttctcggcttttcctcccctcatttgggtccctcttttcccggcttttcctcctttcccatggattccccccttctcggcttttcctttttttgaccacacctttgccttttatcccgggaccattttcggcttttgctacccccttccttttggcatcccttttcaaatttgtaaggtccatctctaggcatttctcatccttccatttggccatttcttggcttatcggcttctcctccccttggaccacctctcggattcccgccccccgcgcccccccccaccgattcttgcgcattgttcggcgcggaagttgttgacggagaatgaatgaattatgatgagtgctttactacgtatgcttcatcttcgttcttctcccggttctgtccccgcttattttcttgctttttctcctattattattattacaatgcttttcatcataaattttgccctttgtgccctgccagggggtgggcgggggagagatttcggtgccgtcaattcagttgccgcatattttattgaatcgcatgccatagtactggatctgacatatcttacatcctcgtaaaaatccaaattcagtgccatctcttgtgatctctctctcttccgcatcccatccctccactaattaagataatccatatcgcttggcattttttccgccatcatttgggtattcgagactctcggggtcgatttgcatgttcattttcaccgttttgcgaaagcatcacggatcgcgcacaaaaagcgcatggatttgatggaacccataaaataatatttggcgtatggcactgcgcgagtattcgatcgaccgttggaattgggcggggaagggcacacaatcacccaaacgccgcccccacccgcgccagcggggatttaacaaataatttgggacgcgcgggaggggccaatgcggcgcgggcgagaaaattggtcgcaaattgcgcgacagcagcccaaaattgggtgatgatgctgatgcagattgtttgagtgtatattttacgattgattttttaactctttgatcactttttttaaactttttatgggcattgattttgcgccttatttggcttaatgtgatcaccgctgatcagagcttatgcgagagtctctcggttctggacttggggctcagttttgagggatagcgcctctcgagtttaaaaaatcattggatttattgagaaaaattcttggttttaattgaaattttacaaaaaaaaaaaaagatacgaactgctatgcccactgttttctgcccatcccctgctttggctgctatgcttttccaaaaagcccataaaaatcgtcgagtatatgcatttttacctgtcattttccccgtccgttcaccgacggggtcattccgagccgagggatgagctttgggtaatgtacaagataaaacagaaacttttacaccatatgttgacccccccccccccccccccctcttttaacgacttttgtgccatcagccaaaagcgggacgacgacaa

SEQ ID NO: 25711 - DNA, 1533 bp, Heterodera glycines
ccaaaagttgggatccccaaatggtcgggatccccaacagttgggtccccaaatgtcgggatccccaaaagtcgggtccccaaatgtccggatccccaaaagtcgggtccccaaatgtccggatccccaaaagtcgagtccccaaatgtagggatccccaaaagtcgggtccccaaatgttgggatccccaaaagtcgggtccccaaatgtcgggatccccaaaagtcggatccccaaatgtcgggatccccaaaagtcgggtccccaaatgtctggatccccaaaagtcgggtcccaaaatgtcgggtccacaagttgcaaatccccaaaagtcgggtagccccgttctcttccgttgctaatgtttgtcctaatatatatttttatttatgcgaccgaatagtagaatgagcgaggaataaaaagtttttcattgaattaatttgaacattttttaaaatggtcatttcaatatacatttattttaatattgtttttattccattttttggtttttatttttaatttgttcgttaaattaaactctttccaaagtttctttaatttttcttttttcaaatctcatttttaattaaatactcgtaacatcaaaagaattattatatttttggcgatttttaagaatggagagtccataatcgaaatttaatttttcgctttaaaataggcttctgctgtggattttcaatggtcatgttcacgaatttgaatcttttttaataaaaaggcaaaaaaaaagtcaaaacaattatttttttttaaattattttctaaaaataccttaatatttattgaaaaaattaattaattatatttatcttttattaaaatttatttgttgtttctgtagtttgttataaataagaattaaagttctaacaatttaatatataaaattcattatataattatgctataagattcaatggatattcttaattttttttgaattaaaaattttatatttgatacaaataatgttctttttattttggttattagtgcattaagcctggatatacaaattaatttttatatttttacttgtatctctcgaggaggtgataaataagagcgttgattgcttctttgatgatttaataatttttgtatattctttgttaatatccctgaattttgggcttgttttatatactcataagattggttttatttttatttattaaattcacataatatttaagatttttgaataattttttacacttttttaatttatgttaattaagacactctcaatttctttccggttgtagagtacattgtaaatattcaaatttacgccattttcggattactgtaatttcactctatttcctttctctcgctttcataaatacccatctcttttcactcatcgacagacttcactttttcattattcaagtcccttctcatcgcttgtcttctactccgactttttatttatttacttctgacaaataaacttatttaattttaagttgtgtccacttttggacataacattt

SEQ ID NO: 25712 - DNA, 1774 bp, Heterodera glycines
tgaggcatccaataccggccaaggaactcagtcagagtccagtcaacccgggcgtgtctgaggtcggcgtggatctcttggacatttagccgagtcagagatgagtggcggtcgagaaggacgggagaggcgagagtgggcggaccgttcgcgtgcaggagccgggtttgaggcacaaaaggccatcctcattgaaaacagtggggtgtttgtcgtagccgtcgagcgagcttcgttggtcttgtcggatgaggaaagtcctggctgctctgaacgaatcgcccgtcggagggccactccgtgggattgatgaaatgccgcttctgagccattttggtcgacgacgcccgatgaattggaggacgagaatggtcgttccgagaagggtcagcatagtgctgaaacgagccggatcaatgaggggagggggcagcggactttgtttggccatgagggtcttggtctccgattcttcaaacgggagatcggcggaaggggagtcggctggcgttgcgaacgttaactcgtcgggccattccgtttccggactcgtgagccactcaggccctttccaccaaatgtggcgagttcggagctccgcaggtgtgcagcctctcgtggctacgtcggcgggattttggtaggttctgacgaaatggaagatggtgggcggcccttgtcggatctcgacgagccttcgttgttcgaactgggctttgggttcgtcggacttcacccatgagagggcaatttgggagtcggaccataagtgccgctcgtcgatcggacgtcggagctctttctcggcgaagcgcatggcgcgaattccgacgagaatggcgaggagttcgagtcgagggatggtgaagcgctggttcgcggttcgtggccggaggcggtttttggcgaagattaggttcgcttcagagccatcggcagtctcgcttcgaatgtagacggcggcggcgaatgtgtgttccgacgcgtcgcaaaacacgtggagttgcaggcggctttgcttgccgagaatggaatgccgcgggaccacaatcgtttggttttgccatagggacagggtttgattccaagtttccgcctcggtctcggggaggggtgtctcccaagcggttccctctccccacaggcgttggaagagccgtttggcgggcagaagacatggcccgactagtccaagagggtcgaacgtgctggcgatgatgcgcaagactgaacgccgtgtagcagtgatgtctgtgtcttttgggagactgaaggtgatgcagtcgctgggggtgtcccaggtcagtcccagaactttggccggcgttttgtcgagtcggtcgtcctcggggatttgtcccatgacgtttggggagtggctgaggaactcccggaggttcatgtcggcgtctttgaggatttgtttggcgatggacgacttgtcgatggcctcctcttccgtctcacactcgatgaggagattgtcgacgtacatattcgcggccaacgcttgggcgaatgggtgctcgtgcttgtcgaagtgttggaggagaacagcggcaaggataaagggggagcacgtcgcgccgaacactagccgtttgtagcgatagatcaagagattgtagcctgagacaggacgggcagggtttttcagccaaagcattttgcaaaagcgcctgtcctcgggttcgacttcgatggcatgaaaggcgccctgaacgtcggccaacacaggaattgtcgctgaacggaagcggaggagaatcccgca

SEQ ID NO: 25713 - DNA, 1346 bp, Heterodera glycines
  unsure (1)..(1346): unsure at all n locations
tatgaccagggctaatatttatagttttttcactattttttcctgagctctccgtggcctaaaacgtacgaaaaacatggtttttcggttgttgttaagctacttttcgaattattagcaactttctagttttttatttttagtaactaaaaaactataaaatttttgaaaaaaactatttcaactaaaacatttctcaaaaattcatctccgaatttatttgatgagattttttgattttaaaaattgtttatctcaatactgatttggtttaatttcgttacttttttggataaaatttgtcattttacatccctaaatttgaaagtttttagcaactatttaccaatttttagcaactattttggaggttttttgaaactcgaaacttattattttggcagtttttagcaactaaaacataagccctaatttgaccactcccatgggcagaaccttcaaattttctgcatcaaagcgtcgcgcaaaaaaacaatctttgaacgccgaccgaacattgcctaaccgccggtgggcagcggaacgattagcgaaaagaacagagttaagacgaacatcggaacaacgcaatttgatacctgaaaaaggaagcaaatggtaaggaagcgcaaatgtttggaacgacgggcgatgaattcatcgtttaattaattaccctttgtgtacgcatcaatcgcccaccgataatttctcttctcaaagtgccgatttccctcctctttgtacgcattggcacattccgttgggttgtcctcgtcgtatttcattgcctgaaattgctttcctttttcactcaaataatatattttcttctcccccccccaattgttccctttttgttcacttgtattgcttgcatttccattgaatattgtccgtcttcggtcggtttcaaatcgcgtgcaaatgcaggatgtttatcaatttcttcgcaccatttttcaaagtcaaattttttttcactgttggaggaacgaacattctaaaggaaagaaaaaagggtggataaataacacaaattcttggccaaatccgtttttttttttttgcttcaaagacggattaaaagtgggcaatgatccaaaaaattaacaccacgcccacctttcccctctccgccaatgcctccataaatcggtcaatgtcctcctcccatttttgtgcttcagcagcaaatcccttttgcttttcatattttgttcgctccatactntaaaaattaaatgaatggnngaaagtaaatttaaattgaaaaacggaaagccaaaactatctaaataaataccttacaaaatgatcgaattaaaagcacagtaaatttcccc

SEQ ID NO: 25714 - DNA, 1937 bp, Heterodera glycines
  unsure (1)..(1937): unsure at all n locations
tttctgattttcagaaagcgaaagcctgaaaaataaataaataaataatcaaaaaactattaacaccttggtgccaaagacaaagcgctccccggattgtttcgccacgttggaattgaacaggctcacagttttcttcatcatcgcttgcagcgacgtccaaatcattcctggttgaagtgtcttccatttgttgttctgcgtctgtcctctcagcattcagtacgctgtcttcatttgttggaattcggggtcttttaattggcttttgcagactctcaagtatttcgcgtacagttggcatttcttgctagaatctgaattacgctagaaacgaaattataaaaaagtgaaaggaattcttaagctttgattgatccaaaaatggttggaatgaacaaatatgaaaaaagttagtacataagaaatgatgatggtcactgattggacgtgtaaactggaatagggctgtatttgatattaacacagcatttttttactctttttactttttttctttaatttttttatgaatgtttttggttgagttggcgaaatgaatgtttttggctgagttggcgaaatgtcagttggcgagatgtcagttggcgagatgtcaagttggcgagatgtcagttggcgagatgtcaagttggcgaaatgtcggtacaccctttgaaccgactcaataaaagtttatttgtagaacaaataaattaagcaatttaaataaatatgcgaagtcggaagcggaataaataaattggaggagaacaaatatttaggcgaagtgaaataagtgcataaaaagcaactgaatgaatgaggggaaaggacatgcaatggacataataaatcaatagggtcgtacataaaaaaaggaagacacactaattagagagtgnggaaaatggagaggaaaagaaatagacacatgcaaagggagaatgaatgcatttgtgtacttttatctctcggggttgaccacccaaacacctccccttttaaatgatctcaacggggcgagtatcgcacaggtggttgctgtcggcgatcagggtagcggcgttgtggcgtcggctatcaagcttggggcgtcggcgattggacagcttgaatgacgtcctgctgctcttctctgatcggcggttcctccacttgatcttcagcattgatcgggtcaggcctattctctaggacctgcccattttgatgtccatttgccattggtgccatttgaattggcaaattgaattcctcattcaaaatgcttaatgggtcctcgacaatttgagtcgtctttcggagcctcagctgattcgcatgatagcgaccgctggatccatcctcaaatatcacattgtaaatgacacctgaacatccgcagatcgttccggccttccaaaaattaaaaaattaacataaataaatgcaaatattaataaagaaatgcattataaaattcaaatttaaatctgagtaactaaatataaaataaaataataccaaaatttcaatttttgtaaattcattaaaaccaatttaaattataatacttttatgaaaataataatagtaacaaaaaataatcttgaacaatttataaatttaattttttttttaacatataataaaataactcagtttttattagcatttattatggctaaatgccttattatgggagtcagaaaatgctacaccaaacttagaattttaataaattttttgttttttgttttattgtttttttttcttagtaataatttgaaaagcaagaatcggctgtgcatggataataaatttttttatttttttattaaaagatttaatacattanattcgctatatttanaatattttaggttgatactttaatatttgtttanattaattagtaaaattattctgtttcatacatatgtatcgtcattctt

SEQ ID NO: 25715 - DNA, 1072 bp, Heterodera glycines
ctaaaaataacatcccgaggtcattacaataaatttaacaagaaaattttttatattttaattatacaataaagaatttttttgtaattttcaactaattcattaattttgatatttatgtattttgtttttttaatattatttatttgcttattttataatatactttacgcaataatcaatctcattccattaaaatatttttgttaattttcaaagcgaattttgttcttctttttttgattgttataaatattaatttatttgatagacttgcatatgaatttaatattggctctgctttatctttcgttcgtggtcagtccaaacgttttacggatgaaatttgaagcgccttcttgtcaagatattttatgcgtaaattttttaaatacaaaattaactagcaatatttacttataatttgtatttttcacattaattttattctttttagctattttgatataatatatgatagattgcattttattttacataaaaaggtcgacttttattgaaaattaaatttatttctatttataattagttattcactatatgtattaaaattgaatttttaacaagtaattttctataaagaatcttgagatgatgcacagtgtcatatttgtaatgtaatgaaacaaatatttttttttaccaattaattataaaaaatgaatcaaaaacaaaaatagtataaagaggaatgaaaatataataatctactcaaatatttcaaataaacaattaatatttgtttagaaaatattattatataaaaagaataatattgaaccaaaaattgctaaattgtataaaattaaatgaaagagatacggtgattaaatattaatatgaaaatttccagaaagatatacaattcatgaataagtaatgccatctaaatctattccagtgaatgaacttgcgagcggaaactccgattaaatatttgaatgaataaaagatactctttgccattaagttggcgttttccaggaaagaaagaatatatatggcacctgatgaaaaaaaagcaaaaaattaaaaaaaagataattttaca

SEQ ID NO: 25716 - DNA, 1149 bp, Heterodera glycines
  unsure (1)..(1149): unsure at all n locations
agggaaacgcatcgagcaaaagttcatcgcaaacacggctaaagcaataaaaaaactctgatcaattaagcatttaaccacggatcaaattaattagtaaggtcaaattaatcaagcatttattcattgtttagcnccactttacatttttttatgaaaattttgctgtacacgggggtgatcagacatttgtgatagaaatagcaaaaataaaaaaatttctgaataatttgaaaatatttattcgagatgtggaattaatttgccaaatcacttccaaatacatggaaaattgaatcctttttatatacaataatttttttatacgcatgattaaaccgtggaattgttgcacaaaatagcgatggaaatcacaattctagataaataaataaaaaatgcccataatttaccaaaaaaatatattaaaaaagacacctttaataattgcctttaactaaaaaaaatcggctaaaaacctaatttttaagatcaattaaaatcctaaacataaaaaactatcactcgaaaccaaaaaaatattcaaatcaaaacaaaaaaaccactgatcaaacttattgtttattaaattaattttgaaatatttgaaacaaattcattaatgttctaaattagagtttttttacagtttttcattttttgcgtgccccgaacggcttctgacaaaatcggacattttcggtctgatatttcggggccggaaattgcgactaaaatttgggtaaattttggtaccagaaaaagcggatacatattaaaacttaatcatttttgcattctgatttcaggtatttcgcatttctgagaatttttaagaaattttagaaatccctaaaaatacgaaatttcgcaattttttcgtacatattttcattttttgaatatattttaaggttttgagtatttatagaaacttcttatgaaaaattgaaaaagaatttttttttaccgaaattttgtacactttttgtaatatttcttacatattcgggattttttttaatgtaaatattgtgatttttcttgtaaatctaaaacaaagaattttttatcaatgagtttgtttaaggctcccagaaaaataaatggcttaggaagtaagcagcccaaattattggagtttgtcaa

SEQ ID NO: 25717 - DNA, 2042 bp, Heterodera glycines
aattaatttttaatttcataataatttaaaaaaaaatctttttacatgtcttatgtatgatgcgagaggggataggtaaactcttaactctccctctgagggcattcctaccaatattaaatatttaatttttttaccgaaaaaaacacataataattgtaaatgatcagtggtgttttctgcttgaacattgatggttctcattcggcgcttttcttttgctttggcggcgccaataagtctgtcgctcgggcgtttttcagtgtgcactctgcacacagttcaaagttgacggcgaagcgtccatcctcagtgcgcaccacttttgcgttgttgttgtaaagtctgttccaatcatctgaattttttaaaatttctaaaataaaaaataaaagttttataacctgagcagaggtagaagcccaacatgtactttcccttggcgagtttccatagttcgcggtcctcgacttttcgcactttcgtcggcggctgctccccattatttcccgcactgttcaattggtgcttacgattggggagttttagggaattcggtgtgaggacagcggctttaacattggtctcatttttggcgtcggagctctttgacggagaaaatttgatcggggaggacattttgttggaaattttttgatttttttttgcaaatgaatcgtgattttggacggatgaactttacgaactgaaaagtgggcggagcctaaccgattgaaaagtataaaattggcccgtttttgaaattccaccccatttggcgaatcattctaaatttttctcgacaaaaaaaatggccatcaacatgaacgacaagaagggattgctcaagcagatcctcggcgagtccgacatcaccgtaacaacgtctggcctgacgatcagcgggccgcgtctcaccaacccgcgttttctgccgtttgaggagagcggtcgctgccgttcatgcaaggctaccgaggtggaggttgatacgatggtcaccaaagagggcataaccctttggtgtacgcgaattgacaaagtgcagttcgtgccgtttgatgtggtctacgatttgccgggccactgctttttccgagtgaagaacaaggcgagagtcttcaacattccgtacggcgacctgctctcggacaacacctgtgatcaaattcaactcacgcttcacgctgatgaagaacggcgtctcaagcgaaaggcgaaagctgcgctcgacttggttgagcagggtcttatggaagatgcaatgcatgatggggccagctggaagaaagccaagactgccatcggggtgctgaacaaactcctgctcgtaggaacacatggcgacaacgaaaacaaagaaacggctgctttgacaacgtcggaaaaccagcaacaagaacagcaaccgccgacggcacctccgtcggaagaaatcgtttccatcgtgccatctgatgttggatctcaagtactgtccagcggtgaagtgaagctggaagaggagaagcaggcagatctcggtgacattgataagacacttgacgaattttttgcaagtctcaaggcgtcaaccaccagcatgtaaagatatttaaatcccaaaattttttaaagttccctcacatggtaaaaatgttgaattcacaagcattttcaaataaagatatttgttttaaacttccatgcggtataatcatttctggtccctcttcatccggtaaaacccagtttcttctgaaattcattgctgagtccagcgagttaattacaccgaacccagtctccattctttattgctttggggaaatgaactcagcggtaccggtgctacaaaaagcgggagttgatgtttatgcgggagtcccatcggaagagctgctcaaacgcatgccaaagccccttttgttgatacaggatgacctcatgttgtccattgatgagcgatacctgtcggagttgttcgccaaaaagtcccaccatcaccaatttgcggtagtgtaatgacacaaaatttgttcgagaaaaggatcaaagttgcg

SEQ ID NO: 25718 - DNA, 1307 bp, Heterodera glycines
ccgattcctttatctccggcatgagcctttttagtgatggttcatatccttctcttgaaacaaattgtctttaaaaaaaacacgttttctgaatattaacaacaaaaatttttagacactttctaaagaggaaggaaaaaaatttttcatttgcctaatatttatttatactgttgaactgttggaaatgcagctgatgccgtcggaaaagctccgattttttggggaagtttttttctttcagattcaccactgattgttgaggcaatttttttcgccaatttcttttgtctacaaacattatttattgcgtttcatcctgtagtgtgtaaaaaattttcagtaaaaaaaacttgttatctgaatatttacaagcaaaatttaagaccatttccaaagaggaaggaacaaaaatttttgcctaaattttatattatattgttgaattgtttgaaatgcatctgttgtctgccgttttgaaatttttcaacttttcgcgaaaagatttcccagaaaatgcatgggacaaataaaaattaaacttctattatgatcaatttaaatttcctatcagtttcgggtttgctttaaacacgctggcctatgaaaaaatggagttttatggatgtcaaattttgggacttttcttcgacgtggccatcagcgggttgtttcgtgacaaaaacaaaccagtttgatgttattcgaatgagctagacgcgctctacattttcaaatgtatcaacaaagggtctaccgccactccctggcgagatatggcctgtcaaagcagaacggggccaataaatttgaatttttgttaatcttcggcagttgcctttatttcgagcctactctacttgtgcatcttttcccaatatggcactgcttccgaattattgaactgtttcacgactgattgttgagataatttttttttccgattcctttatctccaagcatgagccttataagtgattgttcatatccttctcttgaaaaaaattgtcactaaaaaaaacacgttttctgaatattaacaacaaaaatttttagacagtttctaaagaggaaggaaaaaaatttttcatttgcctaatatttatttatactgttgaactgttggaaatgcagctgatgccgtcggaaaagctccgattttttggggaagtttttttctttcagtttcaccactgattgttgaggcaattttttcgccaatttcttttgtctacaaacattatttattgcgtttcatcctgtagtagtaaaaaattttcagtaaaaaaaacttgttatctgaatat

SEQ ID NO: 25719 - DNA, 1762 bp, Heterodera glycines
cccccccccgagaatgaaaatttttaaaaattttccagcaaataatggaaatttttttcgaattcccccccccccaaacgaaaatttaaaaagtttaataggcaaatttcgtaacaagtagcactcaaatttccaaaaattttttccggcggcgcctatcggcaccgccggacctacattttccactatttttacaagttttttgccttaaaacggccaaaatttggtcatttttagtgaaaaagtgcagtagttacccagcagtggaaaaaaagttattggttaaatagcaaaaaaaaaaaaggtcttcaggtcgggtcccccccccccgaaaaatgtttctagatacgcccctgtgtatacggtagccccggttttcgggaatttctaatctaaaattcaatacaggtgacgataggagccggcagaaaaattttagacacttttggtcatttttccaagagttgaacaaaaccaataaatttggatggggatgggttgtctcttttcagaaatggatcaaacacaattatctgtcggcttgtcagcacctgtttcaaaacgaattcgcaaacactttaataaataaacaaaacaaaataatttacgacgataaattttaaaccgcaacaataataattaaaaagacgagaccacaacaatcaattgagaagaagtcagcatcaaaagaaattcaaaacaattccagagaagacaagacaaaaaaaaccaaaaacagaaccgaacagtaaagtaaaaagactcactaatattttaaggtccataaaaaaaagaaaacaaaacgccaataaataattataattcaaaacataaaagaagtcaaaaggtcaattaagtaccacagcggccggaggaaaaattaagaattttgatcatatttttagcatattttcattaaaaaaattcataattttgtgaattttcggaaaagaattggttattttctagtttttatgaaatatttaacaaaaaaccacaaaaaatctcaaaatttctcaaaaaaccacaaaaagcctcaaagcctcattttaaaaatttagcctcattgacctatcaaaaaaccacaaaatgaggctaaagcctcagatctggcagccttgtacatagtaaatacctttaaaattttagtaatgaatgtcaattttaagaaacaaattaacaaaaattatttgttttttttcattttcatttttaattccttttttcacctgtaactgtgtatttcaatatcatgcaaatagcaaaacgtgctctgactttggcattgattggttccggcagagcaaatgttagattatcagatgtgagattacaataagcagttaatttggctatatgcttgtccgcttcaatactcgagaacagcaaagtctcactgatgaggatgaagacgaggccgaagatggagaggagcattttcaataaagagaattgggcaaattgctagaaatgatttttgtgaatttgattttttgtgataattccctcgttattcaattggcatttataatgatggcaccgcacgcacacctaagcatttgccaacaatgcaatacgtacgcttaagattttatgaataatgcacattttaagctatgcccactttataagttatgaatataaattttctatgcatctggcttctcatatgtatatattttataaatatatgttagacacgtttttaggcacatgctatattgtatgcataggtatatttatttaatatgcacattttatg

SEQ ID NO: 25720 - DNA, 1099 bp, Heterodera glycines
tagagatcggaattttgagaaaatacggataagggtaagggttacgggcttgacatctatacgggttacgggcttacgggctaaaaacccgtaaaacccttaacccgtaaaaacccgtattcagaaattatacgggttacggttacgggcccgtaaaaacccgtatacgggtccggcccgtatccgatctctaatattaaattcagcaccagtcatacaaaagcatttttgatgaagaagaataaagaaaaatttaatcacaagagagtgttatgggaagagatataagacagagagtgaatagagaacatatggaggaatctgcgtctattaccaaaagaatcagtgaagaatggaagtgaattctcttcccattgcactctctatataattattttctctactctccttcataaaaatggtttgtatgacagagagtgaaacaacatatattacctatttttgcgttatctctctcactaaaattattaccccttgaaatatttaaacaattatcgcaattttaaaattacgttgatatttacgttgatggcataacattgtttggtttaaataaatttcgcaaaaaaccaataaaaagggttgatttgccattctctacttggaattttaaattatatgctattatgtgatttaaaatatgctttggcgttttgttgtttgatttttagtaatttttgtttgtgatttttgtaagttgttagttcagtaaattttatgcggtcgtcaacttcatattgataaaaaagaaatattttttgaaaaattaaaaaaaaaaactaacttcttagaggggaactgatgtaactaaaaaatacggaacagagccaagagcacaacgaactggataacgcatttgtgaaaagaaatgaaacaaaatttaccgagaccgaaaacccgagaccataaaacacccgagacttttctctagtcgagattcgagaccgagagcccgagcatcacgcgcgcaagtgcaacgccgcaaatgcgcatcaccggcagaaacattcataaatatgccagagcttaaaaatggttgcgttcttttgttaatttagtgcttgaaagaaaaatttca

SEQ ID NO: 25721 - DNA, 1250 bp, Heterodera glycines
  unsure (1)..(1250): unsure at all n locations
cttcccccaaaagcatttaaatgacatcaatttaatagagttattttatttttttaaagtttacaaaaattaattttaaaaaaggatatacccataaaaacgaaaaaaatgaactaaaaagccaaaaatattcatgaaaaaaccgaaattaagcaccataaaggcaaataatatgcataaaatgcaaaaaaaaatcaaaaaaatttgccaagaattgcattatacataaatcacttgacatccttatttactaatttttaaaataattattttaaaattataacggattaagcaaaatttatttgttaaaatgtttggaatcagaaacagcaaacagcggaaattaatcgatgatcaattggaggatgacgacttcgagatggagcagttcagcccggattggcaactgatcggtaattgtaaattaagattcattttaatcaatgtctaggccctcaaattgcctttttcccaatataataccttaatttatgtaaatctggcatttttatgtaaacttagtaaattttgtctaaaaaacaaaaaaaaaatatttaaaattatttaaattttttgggtatatttgggatttacatatttgccatttttaatatttagcgatttttcttctaaccccaactttgaaaattaatagatatataaaaatggtaaaagtgataaataacaactataattttcaaaactgggtttagatgaaattagcattaaactgttggagaatggcatcggcacttttgagacattgcaacgcgcgttaccatccgttgtattggcacaaattgaacgaattgtaagcgttttcttttaattcataacttaattaataattaattattcgtttgatttgtgagctaacagattaaaaattgctactttttggtcaaattttgaaaattttagtggtggggaacggcggtgccggttggtgccgccgggaaatttttttttttgtaatttttatttaatttgttaattaattagcaaatgaggatttatatttttttaaatttttgccatggaaccaaattcgcttagctttaattaatccctccaatatttgccattgtttgaggtgcccgacggtgaggaaaatttgccagaaattggcggtgcctgtagcgctgcccatctgctcaaactgttccggctggcacagctacaaattgactacctgctgaagagccaacaaagtctcgtggagcggntgnccctttggagaaccgtgccag

SEQ ID NO: 25722 - DNA, 1613 bp, Heterodera glycines
gtggcgcaattagaagttaagccacctgtgaattagttggtggcagaccacgaagtgatgaacaactgaaaagtccaagattgtcgtcaagaatttcgaacgcatcaattgattccatgttgatgccgccaccttcctcattggctccccgaagaagctcacgcgttcgacgcacaccgtcaacattaagccaccaaagtttatcgatgacgccatcgcacactcctataacaaaacagtgtgcaaacatcgcacaaacaacacattttggatacggatgtgcagcaaggtcttcaaatcatctgccaaaatattacaacactcttgtaaaggtattaagaatttttatataacatatttataatttatattaataaaaggatgcgtcaaaatgtccgcattgctctgccttgctcttcgagagagaagcaacaggccatgctgctttttcaaaatgttgtgcaaaaggccgtgtctctttgaccgcaaaatacgacggattacaagaaaggcccgaatacctcgaagccttatttacaaacaaagacttggaaactttgaggcgacaaaaacatctgatggaaaatgtcctgcgctacaataacagtctgtcgtttggccatgtcattacgcagagaagcgaagaggaatacttcagaattgtcaagtgtaacaacttgatccagtatgtcctttgggactacaatcccccggacgggtctctgccgcttcttcatggacaattatttaccatcccgagtgaacaagctgaaacccgcttaggagaaattgctgagcaatttgaattaaatgtaaaagtttaaagcaattttaaatataatcttacaattaaaggctgttttgttgtgcaagctgcatgagatgcttcgcaaattacacccgatggcaacactctacgaaactgcagcagagactttcaatcaacttccgccagatgagcgagtcaacttgcgaatgctcgtagttgggacaaaccgacaaggcaaagagcgaacactcactgaagatgaagcccagcccattgatgttcaacttccgcacgacagtttgctgaagcagatccatccgggtcggctccaagttgaaacagaagcaggcagtcaccttgtggcccaggttgatttaatgtatgtaaattattttaataaataatttatagttatttatggactctggtcagaatgtcatgccgaacatgaactatgaagttgttctacttgggcgtaaaggcacgggagcgcaacatctgaaatggtggcgcagggaaattgatcctgcaacatttccgctgatttttccaaaaggacaatttggatttggtaaaattttattaaaaactttaaaaaatttattacatttaagaggatggactgccgctcaagctcaaggagggagaaaaattcgacacaaagcaaaacgccataacaaacaagaacaacgacaagccattggacgacaacgaagaccttggcgaagcggaagaatttttgggagcgtttgaacgcgtcttcaggccacgtgatcgcgtctcacgcaaccagttcttccgctatatggcccaaattcgagaaaacactggcgcgtacatcact

SEQ ID NO: 25723 - DNA, 1957 bp, Heterodera glycines
  unsure (1)..(1957): unsure at all n locations
tttcaattcgtccatttgttcttcaattttttttgtcagcgtcacttattttctttaatttatgcttttgtctgttttatattagcttcccttaatctttctgctccaaatgtcaaaggttctcgtttccggcattcagcccaccgngcaanttgcacatcggaaattacctggtccgattttggattactttttaattttcatttatttttcctcttaagggcttcatcaaatccttcgttgcctttcaaaatgtgagagaatggattctccgttcctttctcacagaccccgtcttgctttaggatatgtccatcgcccgtagggttttgttggtcgctgaccttcactccatttcgacaggccgacatgaacctgcccaagtgactgctgacaatgggggggggggggggtcaattgctcattcccattggtgcgctgtttcagttgcggttgaactgctttcgcacattggccacactgctcgcttgtggggtaagcattggtcgttgagtcaaccaatccctcagaatgttcaatttgtcggtcgattcggagaagactttgctggtccaacagagtcgtttgcccgaacacaccgaactgatgtggattttgggttcaactacgactgtggttggtctgtcgatgctcaccagtcaaatgatcaaatgttaagacgagtttgacctcgatgtcgcaatttaaagacaaattcagagggtaaatccgttgttttgtggtcaattggtgatgagtcattcatccgccgctttttgaaggtttccccaaggcgctgcccccctcggcttgcttgcctatccgttgttacaagcggccgacgttttgacgtacagagccacccatgtgccggtgggcgaagatcaaacgcagcacatggagcttgttggtgcccacgccaaacggcagattcctttggtccctttaattcagactcgtcatttggctaacaaattcaattcgcgattccattgcaatttctttcccgtgccggaaaaagttctatttgcgaggcgattcgccatatatttcattttcaggtttcaagtgtttgcactcgtcttcgaagtttgaggaatccgacagtcaaaatgagcaaatcggacacagatgcgaagtcgcggattgaattgacggacaatgcggagacgacggccatcaaaataagaaaggcagtcacagactcaacttctaacattacgttcgacccggtgcagaggcccggggtcagcaacctcgtgagtggattggcataatgaataatcattgctgcatgccccctttttgacgtttttttttgcttaatgcaggtcacgttgttcagtttgttctctgacctgactgttgatcaggtggtcacccaaagcattggaattgacactttgggcttcaaagggaaattagccgaactgatcaagtcagttcagtccattgcatttgttgtttcattgctttgattgatacattcagtgatcgattgggaccgatcagggaacgttttacaaattttttggacaacgaaaaagaattgaaacggatactggaagatggggaagagaaaggccgcccaattgccattgagacactgaaagaagtgaagagaattgttgggatgagatgacagacaaatagagggatgggtggagtgatcagttaccgatcaatcgatgactgctcacatcggatcgattgaactttcttttgtcgaatatacaaattttatctgttaaaattgctacggacagcgaaagtgaatgaaattgcaaatattaggatattacgaagataagtttaacaatttaaatattaattaattaaatgaatttgaaaaaatgggaagccaaaaaattaaaaaagaaagttttttgaggtatgtataggaaattgttatgtgtgagaaaaagcgtgtgatgagaagtgagatggaacggaagag

SEQ ID NO: 25724 - DNA, 2278 bp, Heterodera glycines
acttttattttaatgttgtcgttgtgtgcaaatttattaaaacaaagaaataaaacaaataattttttttaatttttaataaaaaaataaatattttaaaatattattttatatctaataaaatatatttcctttctatttttcaattttcgctttttaataaatgtagtgataaatgtattttaaatgttgccagcttgtgtcggtagaatgaaaaattttgacattggaaatgtcagaaactattataaaccgattttatttagtcgttataacattgttatgatcttacttttgtttattggtaaattacgatttgcagtatatattcgtgttcagcaacttaaattaggtcataaaaatgagtcggggtcgttttggcgcccacgttttggcgccgacgttttggcgcccacgttttggcgccaaggtcgttttggcgccgacgttttggcgcccacgttttggcgccagggtcaggtttttaaattttgtctatgtttgaataaatgaaaatatgtattcgtcagttttctgagtagctaatcacgaatattgtattcattttgacaattgcgaagcccggacttgatttaaatgaaatacaatttttgaacatattagatcaggccttctatctgttttgttttatcaaatgttttaatatggtgggtccaaatctgagaaaatgatttaccagattctgatttagggatagtgactattatttattaaatataccgttaaggttatgtttataatcactaactcttttgaaatttcaaccgaaaaaatttaagagtttaaaaatattcaaaatgttttgacattttttgaagcatagcgaagagaaaaatttgaaaaagttcttgctaagtcaatttttcatgttgaccaacaaaatgttcacagcaagttgatcatatcactccttcatgttgatctacactagagatcaacattttgaaaaaaccgtagttctacctgtttcaaaaaatggcctgtacctattttttcctgtacataagtacaggaaaataaatgtacaggaaaaatccaggttgccgaaaaatggcctgtgcctgtacctggatccaggaaaaatacagggctggatccaggtacatgttgatctctaatctacacccataaaacacagtcaaaattgggaagtttcaaaaaaaattctagggggttgtgaattttttgaaaatttgaaaaacccattggaaggtaaaagtttttcactttttttgtaaaatttttgatcaaatttttaccttttttaatttttggcttcgcgccaaaacgtgggcgccaaaacgaccctggcgccaaaacgtgggcgccaaaacgtgggcgccaaatcgtcggaaaaaaccattgcttggaaaaaggtttcctcatcgtgatctttctaaaatccagtatgcaatttggttggcaaaaaccttcaaaaataattttcatttgttaatttttgatttggacaaaaaaaatacattaatgtcgtggagcggactcgaacctccactgagcaattatgaagaatgggggatttctattttgtttattttcgagttaaaaccagtttttgggcgatttctggttgccgccaaatgtaaaagtattgaaatcctagcgatcaacagttcctaattgtgatacagaaaaaattgacagacgaaacaaatgagctgtttctaaatttaaaaaatgcgtagcattatgttttttaatagattctttacacagcgtccgggaaatgagctcctgtaccagaaaagatttgcatgtgtggctcagtggtttttgtaagatagtaaagggacaaagggtggtggttcgagtccgatgtgcaacatgaatattttcatttatttttgtccaaaataataaaaaatcacgatatttggtaattatttttgaaggtttttgccaaccaaattggataatcttggtatcttttgaaagctcttaataatgagaagctttttctaagcaaatgctaagcgatttggtgtaccagagaaaagttatgaggctttaaaattttgtttttcttataacttttgaaatagagcattaacaaaaataaattcagcattaatcgatgcagattttttttctctaacgatatgcaaaatttcctgtggatctaacatatagaaaagaagctaaacatagcgaagtaaatgttgtttttcctaataataaaaatattagatagtacgccaaaaggagacaaaaaattagagaaaaaaagataatgtttttc

SEQ ID NO: 25725 - DNA, 1401 bp, Heterodera glycines
aaatccaattatgcttgcaatgaatccctaaatatacaaacaaaagcgtgattttcaattgtatataaaaattgcataaaatataattggagatttacctcgaagactcatgatgtcgtacacaatgtccaggaagcgttgcatttgcgtaaaaatgaggacacgatggccctttttgtgcaaataggccaacagtctgtccagaatcaatgcctttccgcttaattttggccattcctttcgtcagttttgtactccttcactacctgtcgttgaccaaatgttctccctcctcaaatggttccttttcgattcctcgaaacaaataaggatggtcacagcacttacaaagttgcaccaaagttgacatcagagactgtcgcgcctgtttctctgtgcgcatgtttttggcaaagaaagctgttgaaaaaggcagcattttaaaatctcccgaattgaggcatattcgttttgaaaaatatctcgaaaatataaaaatttaattgatgacgaaaatgtatagaatattgaaaaaagcattttcaaatgcatacatggacaagggggggggggtcagaaacttgcctttacaaaatacctcccacccccctccccccctttcagaggccaaaattgttaacagattttgtggaaaaacgaccgaattttgccatttttagccgatttcatgcatttttattaacaaaattcactaaaaattgtataatttcgtaaaaatttacgaaatagataatgaaattcaatttcgtaaaaatattaacgatatgcaattcaaaatcgtaaaaatttgagttttaggcacaaaattttgattttttttcccaatttcgtaaaattttcacgtctttaccagtgtttttgattttggccaaaaattttacgaaattgcctcggacccccgtacgatttacgaaatttcccccccccttgtccacctatgttcaaatgtaatgttagacagttttcgagctaaaaaatgcaatgaatgataagataatagacgtacaccgattgctgctcagaatggccctgtacatgtcgtattggagcttgcttaggccatggtaaagaatcacttccgaacagagtggcacgtcattgagaatctttttattgcgacgcagacaatatttgtcaaagattttgcgaaaccgttgagacactaacaaatgaaaatattaatttttataatcatttggtttaacacaaaactaaataatgtccccataaagtgcattatagaaaattagaagagattattctcaccttcttcgtcatcccccagttttgcaaaacgcatgatgaaactctgctgtccgtttggtttgaattggtcaggggagggctaactttagcaaggcgtacagctcgaccaagtcg

SEQ ID NO: 25726 - DNA, 1449 bp, Heterodera glycines
ttggcaaccgaccgatttgggcacaattgacgaatatggaaaaccgaatgctaaagcttattaatattttttcgattatattttctattttcttactgattttaattgccaacggatttgatttaaaaaaaaaagaaattccatgtaaaattttatcataataaatagtttaatgaacattttataaggtgaaattttgaaatattattgaaatatgtattttttggcataaaccatctctattcaaaaggtcaccaaaatcatacatatttgacttaacggtcggtcgtcttggcacaatgccaaattctcaatttttgttattatttgagaccgcaaaaaaaggcaaaaagaatcgcgaaaaaggcactataataggcaccaaaaaattgaaaataaaggtttgaaaaaaggcatttaaattttttttattaatgatttttagtgaacaaaaacgtaaaagttaatcaaaaaacttactctgttcatttaaatgagttgaaatattttatatttttttcgaataaggaaaattttaaacgtaaaattttttatcaagaaaaaataaataaattttttggcaatcaatttttgaaaaatttttcaattcttaagggtctattttcgctattttattgctttttatggttttttttcaaaaaggcagcaaaactgcaaaatgacaaaaagggcatttacacgaaaaccccgaaaaaggcaacagctctaaaatggccaaatatgaaccaaaatatggaatcaaaactgccgaaatatataagtttttattgtcgtccattgtataaaaaatacttccaagttttactaaaatttcgaaaaaaattctcatttaaaaaaagaaagttcgcaagccaaaataaccgacgaaaattcaaatttttcgtattttagggggtataatttttaaaaattttcaaaaagtctatcttaggggtgcctttttcgctttttttctaaaaatttgccaaaaatggccgaaatattgactaaaaaggcaaaaaatggtgaaatatagatttattcccgaaaaccccaaaatatggatttatatggactaaaaacttttatcaaatcaaaaaattttaacgcagaaatgctatttttgagcccctttcttcatagcatatgcgcagaaaaaatatataaatccatataatttcgagccctaataataaaagtcaacgtagaagcctcaaaccaagtggaaaatgcgtttttttatgcttaatatatcggaaataacgcagaaaaaaggcatatgccctcaaaagtcggtattagttattatattttattgcattttacaattaagaattttgttgattaaaataaatgcattttttgtggggtacaatgcatattttctgcatacgttactgctgtggggagtgtgaaaaataaccgcgttatcaggacttaaaaactctt

SEQ ID NO: 25727 - DNA, 1921 bp, Heterodera glycines
agcaagaaattttttctcgttgtgaaagggcagaatccttgaaaaatattttgtgtccgtatttcggaattttggaaccatatatttttgctcatatttacgattttatatcaatgctgcatttaaataaacaaaattttatctcatatcatttgaaaattttaattttgtacaaattttgaatgaatttaccattttaaggcttggtctgtgtgattctgggcaattttgcgtccggttttgccggcgtttacgtggagaaaatgttgaagagtcggagttcggtgtccatttggatccaaaatgtgcagttggccgcgttggcaatgccaatttcgttggcaatggtcgcatttcaagattggcacaaagtttggcacaacggcggactcaaccagggatttgacttggtcgtgtggggagtggtggcaactcaaagtaaaacaccaatagtaaattttattcaatattattgcttttttagccatgagcggcctttgcattgcggtaaatttaattaattaactcattcatataagcaatagtcccatttggatgagtgttttttttttgttattttaaaggcttttgttgtgcttttaaaaaaacaaataaacgcaaaaaaatctattaaaattttacataattttatgcaaaaattagccattttcatttctatattttctttgctttaggtggtgatcaaatatgcagacaacattttaaagacgtttgccaattccttctccatcattgtgataagcatcgcctcaatttgggtgtttgccagcatgccgaagccgttgttcattgttggcgctgcgttgatcatcaccgccgcgctgatctatgccaaattcccgtatcgggccaagcccaaggctgatcagcgatcgaacagcaactcagcaacggacagcggcagtgctgactcggacagcagcaacatgagcaattgtggcacggcaccacccaccggccgaggaggcgacagaatgccaaaggaggaggacaaagtgtcacggctgaccaaactgttcaggatgggcagatcgccaaccatggccaaactgacgccgggccaattggacgccaatggagacggaaatggcgtgcagaaattttagagagagaaatattttatcaataattattattaattaatttttatttttgtgcattttatatcaaattttgctcctctcttctctgtgtacagctttttaataagtgtgaagagcatttgacaaaaagttatcatcaatcaatgggtcattttttgttaagtgataacttcgattttgaccatttgtgcgatcgatgtgccatcattttgatggtgacaaataaatccatgtgttttgagtggagaataaaattttattgcatttttgatttttaatggttactttcggacatttcgggacagaagacattcgtgtaaaattgaaacggggaaggaaaaatgaggaaaaaataaaacaaatattctatcttaaattaaaaaatttcgtcattaaaaaaaatcctatataataaagttgagtgtccgtatgtatgtgtccgtgtttgaatttgtgtggcgatttgttttgtttttgcgttaaaaatgaatttgaaaaaagtagagcgagggaaaggtgggaaaatagtgcactgtctgattgtctgtctacgcgggcagcggcgtgtgagaggggcatacagtgaacagacgcgtgctgctgtgcagcagcagtctgttggacgcgtgcgtgtgtgtgggagaaggagggagtgggaaaaaaagagagtaaattgcaatggaaaagaaaagagagtaaaagaaaggaaagggagagataatgggaaatttgtctcgcatcccttccttatttaaggaagatcttttattatataaaataattaataaaataatgag

SEQ ID NO: 25728 - DNA, 1336 bp, Heterodera glycines
tgacggacgatcaaaaaatttttatattaaaatgtaagcaaaaaaattggtcggacgccgaaattgcagaaggaattgaaggaccaacaatgactggtcaaaaacaaaaaattttttcaaatttttttttgttaattttagccaagcagattaagtcggaacatacgaagcttacggactatgtggcaaggagaggagaaaagattgtgatttggaaactctggaaatacgtaagtcacttttttgttttggccaatgaaatttttcttaattttcccactccccactttacagtttccggtgatgacaaatggaccgaagcaaaagccgaggacaaacagcgcaaaagggccagttgtgtgcccaacgtggtcatcgaagcaatgggaggtgattgattttgaaaaaaatatttttgtaaaacatttcgtttgttaaggcggccaaaatgcaaaaaagtggtcaatgctaagcagggcagtgccagcaaaggaaaagtaaattttttgaaaattttgaaaaaattctttttatttttcataggaaaacgaatgcccagccaaagacgaggaaagtggacaaaaggcggacaaagcggaagaaatggtcgggaaggggggggggtaaaaaaatttttgaacaatttttctgggttgtaggcggacgatgaaacactgggcgacggcaaagacattgctgatcttgaaaatgaggagaaggaggacggagaagaggcggtagggaagggtcaaaaaaacattttcttatgaaaaaattttatgattttgtaggcggacgaacagccggtgccagagccaatgaagaaaaagaaaaaaacaaaaacggcgcaatcaaacgctcccgtcggaacttcaagaagcagcaaaaatgatgggaaaaatgatttaacaaattttcaatgatctttaacaattttgaaaaaactttttttttgctaattttcactaatttctcactttgttttttttgtaaaataaatttataaaattgtcttaaaaattggatattattttgaataataattaggaaattatatagttggggtggggcgaaagagaacaaagagagagagagtgtaggataagtggagaacagcagcagacgaaaagagcaatgcgagaggggtgaaagagaaagagagagagagtgtaggataagtggagaacagcagcagacgaaaagagcaaagcgagagagtgtggggtgagagattttctctaccctctattgttccccatccttttttctctcgtccattcgcacattatccctccttctcaccaactcattggtcttcgtgaccattatgctgccc

SEQ ID NO: 25729 - DNA, 2235 bp, Heterodera glycines
atattagggggcggggggggggggggggtggcggccaaaaaggtgcgaatttttgtggccataaaagtgcgaaatttcccaaatttttaatttttctgttggaaatgttaaacaaatttacattttctgttccactgtttctgctactgttcactgtccttttctcaaccgatattgtggaagaacatttggatggtataattttcagagtttttttatttttggcatttttgtctgcttctaggggggggggggcaaaacgtcgccgcaaaattttttatttttattttagaaaaaatcaagaaaaatacgtattttttagttatataacctatttttgtttcaataacaccttggttaaaaaataaacaatttttaattttgaaaaaattaaaaaaaaaagattttttgcggcgacgtttcgaccggcaactttttggaatgttcccggcttctaattttcctgttttctttaaaaaaccttttttttattttttttttgatttggaaaatttttttttttcaaaactgctactttttgactccaaattccggttttttgtcggccatttatatcccaaaaaccgagctggcacccattcgtgcccgtccgtgattttttgccgctttttttttactgtccatgagagttttgtaaaatttgtttcttggaataaattgtgaaaagtatgcgaaagcgtgtgggccgttatgcaaatcaataccaaaacaaacatgtgacacagtcaagatcaacgtgaatacaaaagatggcacttcacgccatacgacacgttgttactgtaaatgggatgagggatactgtgttcctaaagatccaccgtcggaggatgtggcaacaacatcaacaaccaactcggaaaccgttattgtagaaacaacaatgatggacaaccgtatgttgtataaccatcaggggtattgtttttttagcaatttttaaaatatgtaataaaatcaaaaactgaaaaatagttttaaattttgaaaattcttcaaaaaaaatttcggactttttcgatgacatgacaactccgtacaaaaggcaattcgtacaattgcccaggttaggcctaggcttaggcatatgctttaggctgggcctggcttcggcctaagttttaggatgggcctaggcttaggcatatgctttaggctgggcctggcttcggcctaagttttaggatgggcctaggcttaggcatatgctttaggctgggcctggcttcggcctaagttttaggatgggcctaggcttaggcatatgctttaggctgggcctggcttcggcctaagttttaggatgggcctaggcttaggcatatgctttaggctgggcctggcttcggcctaagttttaggatgggcctaggcttaggcatatgctttaggctgggcctggcttcggcctaagttttaggatgggcctaggcttaggcatatactttaggctgggcctggcttcggcctaagttttaggatgggcctaggcttaggcatatgctttaggctgggcctggcttcggcctaagttttaggatgggcctaggcttaggcatatgctttaggctgggcctggcttcggcctaagttttaggatgggcctaggcttaggcatatgctttaggctgggcctggcttcggcctaagttttaggatgggcctaggcttaggcatatgctttaggctggacctactgcctattgtaccatctattgtttttgaatttagaaattgatggcacttcgcgccctaacacactttattactgtaaatggcacaaaaatgaggggggtaaattatgtaactgattaagccaagtcgaagtcgaatgatgtggcaacaacaacaacaacaacagccaactcggaaacctattttgtagaaacaaaaccgatggacaaaagtaccgtacaattaatcatcaggagcatagttttttagcattttttttttgtcaggctttatttcggaaaacctttttttgcacgagttttcccctgtcttggaattaaaaaaaaattttcttaacaaaatgcgataaaaggagaaaaacaaataatatttgtaggagtcatggcatttcgcagtattttttttttttggttgaaaaatctaattttttgaaaaattttcaaatattcattaagaaaaattgaatattaaccaatttttataaccagaaaatgaaaatcatgaattttttttttggtc

SEQ ID NO: 25730 - DNA, 1290 bp, Heterodera glycines
gattcgactgaatggactccgttggtggcggtgacttttcatcttctgctggtaatcagggcaagaaaaatgactgaaaatatctaaaacattaaattccgtgtgccgatactcactcaatcattttctgtgtccattgaatgtaacggtccatttgctggagcgtaaaatcccaaaatttgtcagccaacggcggaagaaagacagccgaagaaaagagagcatccaatttggagagaagacaattggagaaggacgaaaggcactcatttttggagtcgtcgttgtcaaagggaatctaaattgggaataaagcatttattaattgatattttaggattcaaacgggaatagaaaaactcacttgaattttgaaagattccggcgccgaaataattcgcagagggccgaacagcggctgagaagcgagtttgaaatagacgaccaaattgaacttttcatgaatggaacggaacatggcacgttggacacttccccgggagggccaattgaggacgaaatcggaaatgtgtcgaaaacagcggtgaaaaaggcgagcatcggacggagttaacactgacgaaaaacgctgaaaggcgcaaaatgcaaagcagtaatggaatcattaaattattccattcaatttctttccagttaattagttgaaaagaaaacggccgcgccgcctccgttgcgcgacaaggcaaaaacgaacatgacttttaatatgcttttttaatatccgttcttttgttttgttcattcatttatacggaaaaattgacaacattagtataaaaaactctcatttcacacaattaaagattcacacatattattaaagacatagctcctcattttgttttccctaattgggtggaatgaatccgaaccaaaatgaaatggtttatttgattgttaaacaattgttaattgtatttagtctttctacaaagacacaaaaactgttgaattgtacttttacatgacaataaaagtatctttgtgtctctttagtgtgctcatattccatgccgaccatttgtaatgtaattgacaacttattgaagaattaattgccttatgactgcgcttttgatattctgccacttttaacgattattttctaaatttgcaggtggttattatacgaactctgcgttttctcaaaattgtcatataaacggctaacactactcctgacttttttttcttaaaatattttaattactttcttttttatttgggtacgcgtatatttttaagggaaaatatagtataatactttaa

SEQ ID NO: 25731 - DNA, 1725 bp, Heterodera glycines
aaattataggtatatatatttttattatttataacgttggcaagcaactgacataaacattttttaataataaatatatttgttttgcagtttttaagaaacgcccacttggcagtttttaagaaacgcccatagtggcagtttttaagaaacgcccatagtggcagtttttaagaaacgcccatagtggcagtttttaagaaaacgaccctaaggcccctgcttgagttactttaatggccataatgaaattgagcccgattcgtcacttctgtccgactgattcctccaatttaaatgagtgccaaaatttgttgtgtcaacagggatgcgtcggaatgccgatttccgattgccaaaatttttgagaacattggcacacatccctggtgccaaccaaatgaatgaatgaatttccgttccccactgatcacaggtggcacggaggagcaaaaggttgccgagatggagatcaatgttgaagcacacatgaaaatgcgattaaacagcaaaatggtgaagccacgcgttgcgctggacacaattaaattagtcagtgccgtttatttttaattttggtgtaaaatattcaccaacagaaaacactttcgcccggcattttggcccaagaagagttggaccggtcggtgctgttggcacgcgaagtgctgcaacggatggtcaacgacattctgaaggcgggcattccaatcccggcacatccgctgatgcaactgcacaaacccaaggcattcttcaattcgtttgggtgcctttgtccagtcgagagtgttgagagagaatggagagagagagaggagagagaaagagagaggggggggggggaggaacagaaaactgatcaaatccattgtcaattgccatagagaatttctttcgtttcattggccattaggaaagtaagcaaagagagaaaaagagagagagaagagagagagagagaaagagagagagaagagagagagagagaaagagagagagaagagagagagagagagaaaaaaagaaagagagagagagaagagagagagagagaaaaagaaagagagagagagaagagagagagaagagagagagagagagagagaaagagagagagaagagagagaaagaaaaagaaagagagagcgacgtgtgattgacggaacggagaaagaaaaggcaggccacggcatttgttgaaaacaattaaacaaaaaaagagcaattaaaatcagtcgatggatcaaacgattgaagctaaagaatggacagacactgtagaagagacgaacgaactgatcagacagacaggggaacgaacatctcaaactgcgagtgccctaatcgagttctaacatcgatttgctattgtttatacactccgtaacatgagtagtgatatggtcgagaccgaattctcccgagacttaaatatccattaaaactttctataaattaaaaaacaatttgtggggctttctctagcaatttatttttcaattctaattcaattatataattatcacgaaggtggggggggggggttagccctcttcaaccaaacattttagcacctattttagggggattttgggatttgagcacctctctaggcacttttttagcatttattgtatttaggtacaatttgatttgaagaaaaagcaccctcagttctctgttgatcatgttcttcgattttttctccattatcattcattt

SEQ ID NO: 25732 - DNA, 1255 bp, Heterodera glycines
tttttgtgccgctttccaaccataaaagtttcattcattgtcatcaattttcccatcttttaggcttttaccgatgcttcttccgccgtcaatttcatttttgtcgtacgatttccaccgtcttttgccaagtccgtcgtgccatttgtgctgaccaataatttgactagcgaacaattgacattgaaaagcacttcaaatagtcgtctttttgtgttcgtccgttctccaattgtacgaaatgcgagcgaatggacaaaatgggaaaatgaggcgattggctgggattttgttgatcaaccgaatcgaattgacgtgtatatgtatcgtgaggatcaaactggggacgggtgagcgaattgattattaaattcaaattgataattgatttccaattttttagacttcttaacaaattgaccggtccaattaatcggaagaagaagaagtgaatgaagggtgatccgatcaatttgaaagatggatttgggaattgacatgctcataaaaattgtcctttttttcattggattgatcaaccttggattatgttacaccattattttatttgtcgttttctgaaatgaaaaaaaaattgttcacaaaaacaccacattaaagagttgtcgggtaatactgacttttactggtcccataaaaaaaggaaataaaaagacggctttttacgattattcgttctattcgagggttatcgaggccgctgatcacgaatatgatatcagaattgtcatatgacatcatctaatctttttcggggaaaaccccgatcccaaaccccgacgctgcctaccccgacaaccccgaaatacacacccctaagaatggcatttttgtgggagaaaagtcaaaaagttaattcaaattttgaatttatttgtttgccaaatttttattaaataaagtaattttttttatgtatattgtttggtatagtggttagtacttcaacaataacagtacttttcttacagttcgataccggtcgacgttttctttttaatttatttttatgtgataaataggattttttaaaccaaaaatacccatgaaaatcaatcatccttgacataatttattgacgtatttaacccaatttcctttagctgaaattaaaaatacaattttttgactaaatcatcaaaatttagtatatttcaaaataataaaaaaaaataaataaattatcagaaattcataaatattttggtgaaaatctgttacaaaatagagctta

SEQ ID NO: 25733 - DNA, 1766 bp, Heterodera glycines
aaaccccttaataatgttttattttaatttataaatcttccataggttgttcgaatttgggttcggggttcggaattcttcaaaataaaggtcatattcgtgatcagcgccaaaaagaccatagaaaaattatttaaaatgtcttttgagtgctttttatagtgcggtcacttgagtcccagctgagtttggcactccaattccggcactttttcagcctaaaaaagggcaagcgcgcccctaattctatttttccaacccatttcgaacctttttacatcgattctgaccgttttaaagcatttttgagtttggggcctatgatcaatatttacctttgttttttttagcataggtatttttgttaagctagttttcaagttattagtcaaatggttttttatttttcgtcataatgaattttttctaattgttgacatttgaataaaattttgtcattttgcacccataattgaagtttatttaaaacaattttccaattttagcacctatttggggctttttagaacctaaaaagtaaaagatttttggcatttttagcacctaaaaattgtatccctaataatggttgtttttttgtctatttgttttatcaataaaatatgattaatttttattccaattgttttcaactttttccaatcgatggaaaacttcaaaaaatttttttcttgaattctctctcttattaaaaattttctaatttttatttaaattttttcgcggggggagggagagaagcgcacccgtagcagggctggacgtaattacgggttacggaaattacggcctttttggagttacggattacgggttacggctttttgggattattccgtaattttgatccgtaactggctttttggctttttaagattattttcaagtcggtttcttgtaagattattttttataaaatgaattttttacgatttttaattaacatacataaaaagggggtggggcggtaggctaacgaagggaaaaagaggaaaggcctaaataatttggctattttttaacaaaattcgttaaaaattctaaaaatttttctcggcggcgcttatcggcaccgcccgcgccaaaaagtcctgattatttttaaatattagctcccaaattagtcatttagacaaaaaatttgaaattttcgaccacagctctgattcttccatttgcccctcttttactattttctcccgatttcggcccatattttgggatttttcgcctcaaaaataaaccgccttaattacggatttccgtaattgagaatcagttacgtccagccctgacccgcagggacgaccaaaccgtagaacggagatgaaatgaatttgaacattttaataaatagaaaaaaaaattaaaaaaatattttatgaagccataattttaatttcataatcaaattcaattagttttataccaaaagcttttaaaagctctagttggtagctgaaactcatattgatttattaaaataaaataactataaatgaaaatataaaatgacatttttgcagttttaaattaaaaattttttttttgcactgcttatctctttgaaaagcatcaatgttttagaaaccctcgttaaagtttgctataacgcagttggcccaaagcaattaaacccttacggtgaccaaaaaagttaactaggattaggaaaaaataaataacatttaaataatttcctgtgggggataatttttttatcaatttatagcatctattcctct

SEQ ID NO: 25734 - DNA, 549 bp, Heterodera glycines
aggccgcgaagcggccgaatgtcccccaaaaaattaaaaaaccgtcctggaggggcgcgaagcgcccgaatatcccacaaaaaattaaaaaacggacgcgaatcgcccgtcctgaggccgcgaagcggccgaatgtcccccaaaaaattaaaaaacgggcgcgaagcgcctgtcctgaggccgcgaagcggccgaatgtccctaaaaaattaaaaaacgggcgcaaagcgcccgtcctgaggccgcgaagcggccgaatgtcccccaaaaaattaaaaaacgggcgcgaagcgcccgtcctgaggccgcgaagcggccgaatgttcccaacaaaattaaaaaacgggcgcgaagcgcccgtcctgaaaccgcgaagcgggcgaatgtcccccaaaaaattaaaaaacgggcgcgaagcgcccgtcctgaggccgcgaagcggtcgaatgttccccacaaaattaaaaaacgggcgcgaaaggcccgccctgaggccgcaagacgttctaatgtcccccaaaaaatttaaaaacgggcgcgaagtgcctg

SEQ ID NO: 25735 - DNA, 716 bp, Heterodera glycines
acagccggggaatttgcgggggggggggaagatagaagttaatttgtcgagggaatggcccctcggggaattttggctttgagaaaggggcggagagcggcgcaggcaaagccatttgaaattattaactcaatgatggatgcttttggcacaacaaatgattgcgagtgatttccttttttgattttggagagggaaatttggcggatgattttacaattaaaaagggaggggggggggggggcggggggaaggaaaatttgaaatggaaaagttggaaaggaaaacgaacttttgaattctttcaatttacccaaatgcgtacagacaaagtttgaccagcagccgaacgaatgaatgagcacagatcagcggagaatgtgcgaacgaaaagtgaccactcaaattcgactgactttttgccgagaatgcaaataaaggcaacagagaaaagatgagggaaagggggggagaggggaagagggggagaaagagagagttcaggggggagagagtgatagggagggggagagttgagggggagagagagaggggaagaggagatagagagagagttgagggaggagaggtgtatgggagagagagagagagggagcgggagtgaggaagggagagggaaagagagagggaaagagagagggggtgggttggatgtgtttaatgctcggcaacatttttgaattcgatgtatgttt

SEQ ID NO: 25736 - DNA, 1567 bp, Heterodera glycines
ggggacctcagagtctgcatgtaaaaatgctgttttgagcttttcatgcaagcatttgcgcaaaaaaatatgtaaaacaacaactaccacccaacaatcaaagaaatatttattttatgtaattattttgtattttccaatttttttttttgttcaattttaaaaattttattcaaaattaatttttgaataaatatttttatacgcccgttggccagaaaattgaagcaattctggcatagattcgtacgtttacttttttaggcggctttattgcaaaataaaatgcacgccaacaaataaggactgaaattttcgaaaaattttcaaaaagacaggctattaattcaaaaaaatggattttttctggcgctaaaattactcaaattacaaattaaaccgccgacttttgcatgaattttaatccaaaatatattaaatttggatattaacaagcatacactatttgtttttttctcttgccattttcgcccatttttaggtgctcttataagtcatgaaccgcaaatttattatttcattaaaatacatatttcaaacaataaaaaaaaatttgcggtgtccaattttctggccactattttgatgatcaccaacagcagcaccgattgatgacgacgacaccacggcggcactgtgccgcacaaattgacccaaacagaacacatctgcagaattgcctatttatgcaaatttattcaaatgaaaaccactttccaacttatgcttaaatcagtgtattgggattggtgctatgtcattacttaaaaaccatcataatgggcgttacttaaaaaaccatcataatgaaaatttttgcttataactttgctctaaaaagaccaaatttttaatccttgctatcattcgatagatctaaatgttctttatgagcctttaaaatttcaaaaaattttattaagtttaaaaaaagttatggccaaaaatgttcgaaaatcaaggtttcagcaccttgggattgtccgatccaagtacagaaatccatttcaagtacataacggggaaaatcttgtaaaaccaaattggcatcaataatttggggattttaattaaattttgaagatttcaaagagggacggactgagtccgatgattacgataggcgccgaagtgaaaattttttaaaatttcatgagattttttgcaaatttttctattaataaattttgcaatgtaaaaaaaaatagaaatacaaaacttttcgaatttacataaaattctccctttttacccttttacgaatccaaaatcctggctttaagcacttacttttaatgtgaatttcccctcttaccctgctgctcaccaatagctggcataaaaccgaaagatttcgagtcgaatggatctgccattttatttccaataaaaattaatctgaacatatagttaatgtttattttaagataaacaaaaaaatctaattgtttttgctgattttattttaattatttaccaaaaaacaaaaatcaattgttttgcctatttaattaatttgtttttttacgatatttaaataatgatg

SEQ ID NO: 25737 - DNA, 746 bp, Heterodera glycines
cccaccacgaggccgcgaagaggccgagtgagtaccttcggtgcaggaaaattattaaattttaaaaattttttaattgctttttaaatatgccaaaaaatgtaggcttaacttttttagtgaaaattcgatcactcatattttttgctaattgagcagaagcgtaccaaactttgcagggatactccccggtaaaggactaacttacactgaaatgagcgccgagctagttgaaaaaaacgatttttttgttttcggggcagtccccccgaaccgatgcgcccagatttatggggagaccgaatccttccggaatagcttccctatagcctgtactttaattctgcgttggatttttgctccccataattgtttgagtaccccaaacggacacttgaaaaaatcgatttttttgttttcggggcagtccccccgaaccgatgcgcccagatttatggggagaccgaatccttcgggaatagcttccctatagcctgtactttaattctgcgttggatttttgctccccataattgtttgagtaccccaaacggacacttgaaaaaatcgatttttttgttttcggggcagtccccccgaaccgatgcgcccagatttatggggagaccgaatccttcgggaatagcttccctatagcctgtactttaattctgcgttggatttttgctccccataattgtttgagtaccccaaacggacacttgaaaaaatcgatttttttgttt

SEQ ID NO: 25738 - DNA, 1764 bp, Heterodera glycines
aaaactcaaacaattttgaatattctttttttcacattctcataaaaaatatttaaactatttctaatttaattttttattttatttttcttcaaatttcaaaaattcgcattatttttcttttttcctttgtcatcgatcaagggaccatctccgaaaagagaatgttagcgcgcacccccatacgcgagcggatttttatttcaaataaatctctattttttgtaataaattatatcttccattctcacatcttttttttattgaactaatcaaataaaaattgtttagtatttgtggttataattttctaaatatatattctggtgaaacttcctgcctctgctgagccgctgctgacaatgagccaaaagggtcaaaacaaataaagtttctaccaaattttaattgtgattaatttttctctcaaatttatatatatattgtgtccttatttttcgatactattagatttgtccttaatttcaattattttttgtcatttatttctcatcttttaattttccaatcaatttcctttgccatcgattaaagggaccgtctccgaaaaggcgatggcagcaaaccacctcccccctatccgtgcggcttttatttaaattcaattttaagtacattcaattggtattttccaataataatttggtatatgtataacgtactaaaagggagagattctagaaatttttaattaacataaattcttttaaaaattgacttgaaactttttcggaattttttattttgtataccttaataatttttatagcaaataaacaacaattacaatcctcaagaagtacaataagtcattattttttcactcattttcattgaaaaactatctctctctgcactaaaacattaccgtaggacaaaagagaacaggaaagaaggggttattttaaccaaatcagtttcctaaattaatttatttttttaattcataatttatatgatacattaaaattcacgatcgataatttccgttgatatcgattaattgagggaactacaaaaaaagggctgaacacttgagcagtggtgctaaatatacccgagaatagcaaatgggctggggtttttacacaaaaaatagtggcgggctctctttacatttaaatcgtttttctttgttttggtgattactctttttctctaattctctcttctctcctatggtgaatgcgcgtctctctacccagggggggggggggacaagatttctgtcccaatactactcaggggtattattttgaaaaagttttttttccccaataaacttttcatacctcatttttcgcaccgtgaatgttatttttattgaattctgaaccgttttgagtagattagagtacaaataattaaaaattttgaaatcatgtttcccactcccttctcccaggggtattattttgaaaaagtctttttttccccaataaacttttcatacctcatttttcgcaccgtgaatgttatttttattgaattctgaaccgttttgagtagattagagtacaaataattaaaaattttgaaatcatgtttcccactcccttctcccaggggtattattttgaaaaagttttttttccccaataaacttttcatacctcatttttcgcgccgtgaatgttatttttattgaattctgaaccgttttgagtagattagactacaaataattaaaaattttgaaatcatgtttcccactcccttctcccaggggtattatttgaaaaa

SEQ ID NO: 25739 - DNA, 1395 bp, Heterodera glycines
cagagggaaaatgaaaagcaaaaaaatgggagggagggaatttgaggaaaatgggggacaaaacaatcggaggtttattaaagatttaaccatttaaaaactccaaaatatttcaaaaacgcaaaaattaaaaaatagacaaaattagcatgaattcatcagaaaagacttagacttgtcattttgaattcttaaaatgaaaataataacttagcaaatttaaaagttagaaatcttaaaatttttctaacttaaatcaaactcaaaattggttaagctcttacataaaactgatcagaaagaatgtgtctgatcacttttgtcaataatattgaattttattgtctgatcactcttgcatttcaaatatttaattcatcattcttccaacacgatttaattaattacatttttgtgaattttggaaaacaccacttcactttatttgttagagggattaggtatatgaaaaatgtagcatttgattgaaatgtatagataaatatgtgtatgaatggggaggggggggggggggggcgtttcggccacggggaacggaaaaagcaaattaaaaagtatttgcattcgtggcacggatcattcatccccactcaaatccatatccattcataattcatccaacgcgatgcgggtccgatgggggcttgtttcggtttatcttcctttctatttttccccgtatcgattttacccccgtttcggtttaatccaaattcgattttaccccgtcagtgccgtcgtccgcacgtcgcacgcggcgccgccgccaatgcatcggtgcccaggcgacgcacggctcagcgcagcaccgccgtaccctgaggaaccatggtgttaattttaagagcattaagtgataattaaaatacactaattatatttgtttgaggggggggggggtggagtcatttaggacatgtggaatggaaaaaagaacggaaaaataaaaacttagtatataatttgagtttccagtagatgcgaattctaaactcttctgggcacgtgttttaaaaaaacgcatttcggaaatgtaaatttgcatttccgctaattaaaaaggcgagataaaagccgtacgattagcctaattattcctaattttcacggaaataaaaaaaataccttaagaaggaaaaacaatcaatttttaggggggggggcaaatgattattaaatgaattattaaactaaaaaacaaattaaaatattttcaaaaagagaaaaaaaaattaggcaaagtgagttaatcagggaaagacttcgattgatcattttggcaaaaatacgatttttacaattaaaccatttgttttaattaaatgtcaaattctttaaattaaaaccgatatttaaaaattcaaaagttcaatc

SEQ ID NO: 25740 - DNA, 1028 bp, Heterodera glycines
  unsure (1)..(1028): unsure at all n locations
ctttccattccatcatatantttgttaaaaagtcattctattggacttaggaattagttttttgcaattggcgcggtgaatgctgacaaacgatgacgcataaaacgtaattcttttttgcttttttttatttgtttgtgttcctttgcgatttgtgcgccacactcaaaaattcggaaaaggatcaatgtaatgaacaaacattggtatataaaaagcataaacggacgatgactcgtcaaaagccaatggcaaagaaatgcttttgctttacgggagaggatgggacgatcaataaaattaaaaatttaaattgaattgataaaattataattgatttcttttttaaaaatagggacggcgcggaattatgatttccaacatttttggggttgcaaaatttcttcaaatttattggttgaaattgcatatgagatacatttccaaattttttgactcggtaaggcgctttgacaaagacggctttcgttttgcaattagtcggtcaacattcggaaattggtctcgaattttttcggcaattacgtgcaatcattttaaaagaaaaaaaacacaaaagctaaaatttattaatttttttagcgcaaaatcaacaacaaaagcgaaattttcgcttttttgcttatttttgacataatttattaatttttaagaaaatttaaatttattcaatattctcgagaaattttggcgaaaaaatgattttttatttttcggggtttgggctcaaaaaggctaatttagctgctgagggccgttctaatagaggtttttttgaaaaatgccaaaatatggacataaaatatggatcaaaatgccaaaatatggaaaaatatggaaatatggacataaatcgcgaaatatggaaaaatatggaaaatacggatatagaaatccttcctagaagcttcaaaccaagctaaaaacatgtttttcgtgcgtttcaggcctcccacagtccaggaaaaaaatatggatttccatgtaattctactccctagtgatca

SEQ ID NO: 25741 - DNA, 1681 bp, Heterodera glycines
taagcaaattgaaagcgctttttgtttttcagtttttcgaaaatcaatcacttttggagttgcattacataaaagcattttccaccgatgattcagcagagcatgaagcacttaagctggctgttgatcttttcatttgggtgatgtggttcgaaaaagaaattctccagctggacaatgagcatgccaagacggcaccacggcttaccatggcatggaagcaaaaccggtggtattacgaaatgacgtacgacaaactgtttgacattgaaaaggaaaatgagcgggaagaattggcaaaaattcggcaagaaattggcattttgctgcaagagtcaaaaaattttgctgaacaaaaacggcaaatgattgatgcgaatctgaaaattgagttgcgcagcaaacggcttcaacgccttcagaagcccagcagaacggcaccgcctttcggcactttggacagggaattgtacgacattcgacgaaaagccatggcacgggacgaccaagttgagccggagtttaagaaatggcttcagcaaacacattttaatcgccttagtgattatgttagccaatgcaatgagttcaatgccaaatttgtaaaaggtgctttttttgtctgcgtaactcctaaactgtcaattgttatcttcttcgttttacagcccatgtttattcccatttttaatttttgtaaatttttaaacaatgctttaaatattttaaatgacggattttcgcgccaataattgttaatatccttggcattccattaaaaaataattaaggaacatcaaaagaaacattaaaacgagtggcggaatttgtgggcgaagaaaatgccgatgaaattaaccgaaaggcaaacgattgttttgggaaattgtcaaattttgaagaatatttagcggcggatggcacacatattcatggcatttatatgaatccaagtgaaattttggaggatattcgtaaaagtgaggaaattgataaggaaaaggaggcgaaggaggcggaggagaagccgttcgatttggatgcaacgatggcatttttgaattttgggggcacagacaaaaaggggaaaatggcaaaaaaggacgctaaagatggcacaaaaagtagtgatcggagaaaaaaaggagacaggaagaagcaattggaaggagagttaactgacgatccttacaaaacgccaacagagtcatcgataatgcctaaatcggatgaaatttgcatggaaaaatcgaaaacaaaaaaatcaaaaagcgacagtaaccaaaaggtaaagaaaaacaaagtggaaaaaccaaaacataaaaaagaaaaacctgcaagcattaagccaaaagagaatgaaaaaggcagtcgaacaccaaaaaataaaaaaattgacaaaatgccaaatgacgataatgcatccaaaacatcaaaaacgaaaaaagaaaaaactgtcattacgccaaatgataaatcagaaaaagaaattgagcaaaaaattaacgataatgtcatcactgatcagaaaaatgaaattaaagaaacaaaaaagaaagaggaaaagaaagccaaaacattaaaaaagagaaacaaaaatgatggagatgcacagaaagaatttgaaagcatcgggataattggtaataataaaattattaaataatttttaaaatataat

SEQ ID NO: 25742 - DNA, 2011 bp, Heterodera glycines
  unsure (1)..(2011): unsure at all n locations
tcggaaggtcacttattgttagtgctgaacctgttgtgtttccaccgttactcgatatgcgtcttcgattttgcgcgacgtccgttccaaacgttcggtgtttgtaatgagtttgtccatctgttggaaatggaggatgacatttttgacattttccatggcgacaaacattcatcttccctgcaatttgttctttttttatttcttacctggtcaccgctcactgatccgtcgccgcattggaaaagttcgtcgcgttcggcgtttgatttcgccctttcaattgccttaaatttcatcggtgcattcgttcgttcgtttcgctaacctttctcagttcggcgtccaattggcgtttgtcattgcgataacttttcactcgcgtttcgtattttgagcgttccgaactaacgaaacaaataaatataataattagacaatttcccacctgctcgaaggaatttcgcgcgcgctcagttccatctgctcgagcagttcctccacgtcggccaacaaatggcgcacttctttggccagctgtgcgaattcggaaggtcccaaatgatggagttggccaattttggcagttatatctgaacagaaatcaaattgcaccccaaggggtgaaatggaaccgaccagcagtactgacggagtattggtgctcgaattgggtaagcaatgcaactgtcgtggaggaagcagcggaatttaggggggaagccatcaaaaaagaaagaaacaaagtaacaaataaattaatatttaaaaggaaatggaaggaaaagcgaccaaaaaataaataaataaaataaaaacggatcaaatttagaccaaatcacaaaacaaagaaaaacagtcagaatttcttcatgctcgagtaacttctgttctgctcgcacattttgtgcagctcctgcttcgcctgaatggtcagtccttcgttttccatcgcggcgagcaattcggacgcgagcacatcctttgggaggaatttcagataaagggcaaacgaatgcatgaaaaagtgccttaaagtgcgggtagtgcggccttttctcattgcgcttctttcccgcctttagccggcaaatgtcgcgcattgttttcatcgctttgaaaatggcgaccttttcgctgattggcattggcactaagtaaagggtgccggctaaagaaacatttccattcattggtttcaactttcggcatttgtttgtcgattagtcatttgtacctttgatcgtcttttccaacttcatcaaaggacgacaattgagaatggcgcggttcgcaacttcgatggggtccaaaatgatttcggcacgtcttttctcgtctttttcattaagccattttctgaaaattaaactctctctccaaaaaccttttcctcacttttactcgtattgcgttcgtttgacaatttccagtgccgaaagaacatttacgcgtgacaattcctttttgccctccatcaaaaatacgcgcaccattttgtccacaatttcatcccttacaattagagagaatattcaaatttagttttcagtttctacctgtagaaaacaggagtttggtcaaataacattggtttcagatacatataattgcgcttgtcatttggcggaagtggtttattcaactaaaacaaataataacgaagaacagagtgaattcagatttgatggcacctcctcagtagaaacgatgggctcggtgaaaattcgagggtcaaacactgtgagggcaaagaccgaagtggaaattgtcttttgctgatgaaaaggcaaatggacaacgaaagaaagcgcatttgaaaggagcggaagagaagggcacggacgaagaagcatcggaaaagcaaagcaaagaattctctctctatgacaataagccaagtttcgttttttatggttgttgtttttcggataggccacaatttccgtaacgtttaatattcattnaaatatggcggtaattaagattcaaaataaataaatttaaaaaa

SEQ ID NO: 25743 - DNA, 1588 bp, Heterodera glycines
acgctttccctgggctgagtggtcagcatcagaaagaagtgaatgaataattaattggtgcaaagtgtttgtggtcccgaaatgttgtactattattatatgttgaacgtattttactctgctttctcacaaattcgtccatttcaattgtgtaattggtgtgaaggctttgataaatgattgccccaaaacggaaaagtaccaacctccattttcgactcatttcttttcacattggtgaaaaacaagaaaaacaacaacaatcgctcggttcacttgtgccgtcatcattacggatggaaatttatgccatgaaaaatcccgaaaatcgtcaaaaagtcatgaaaaccctataaatacgctaaacagtcataaaaaatgcaaaaatttcgaatcccggacccgaattcgaacaaaaagtcgaaaactcggaaattttctaaattcacttttatcttcgtttctgtgaatgatcattggtaatactatagatgtaccccccccccctttttgacgaaaaatttttttgttctgaaaagtcttggaaacatgtttatggtgggttttcgaggtcgctgattacgaatatggcatccatttcaaccaattcgggatcccggacccgaattcgaaaaaaagtcgaaaactcaaaattttgaaaattcacttttatgttcgtagctgtatagaatgaccattctttgatattccaatggtttgtgactaaatttagcatgttttaatcaatttaggaactaaagtgagaattttttaaattttgagttttagactttttgttgaattcgggtccggtattcgaaattggtccaatgaaggtcatattcgtgatcagcgaccctgaaaccccccataaacatgtttgggggggggggggggggtaccatctatagtattacccccaattactttgtaaacttcagaatttgcatacgccttcatcggatcgaacaaaatgaactgtttgcggattggattaaacagcaccaatgaccaatgagaaccgcttgaaaaatagataaaataaaaaggagaatcattataaaaaggtcgatgagagtaaaaaaccaccttaacacaacattcggttcggtgctgtcgttgtacaaaaaaagcagccatttgtcaggggaagcgccgaccgactcgatcagtgcgtccatttgttggccttctgtcggagtgtatttgatcagctcacagatagtggcatagatcacagagaccttttagtggataaattaacagaaaatacattaaataggtaattactttttctcgaaattgcggattcaattcagcactttgattgaacaaataactgactgcgaaattcaccacattatccgttagccaatttgtattttccagagaattagctagaaaaatgatacattcatttttaaaaaagcacaaattgcacaccatcactttcgaacagcacaaattcctcgtaagaaaagaggcgtcggtcagcaccaatcatagataataaagaaatatcaacaaaataaaaataaaatattagaaaaaagtcgaaatattttaaaaaagtcaaaacaattgctct

SEQ ID NO: 25744 - DNA, 1131 bp, Heterodera glycines
tttgggggcaaatgaaaacaaattttgtgttattcgaatgcgctagccgagctctacattttcaaatgtatcaacaaagggtctatctccactctctggcgagttatgtccagccaaagcagagtgggccataaacacgaattttttaatctttggtatttcctctattttgagcctgctctacatttatgtattgtgccaatatgcctattgcaactgaaatttattcaactttcccgacaaattgttgagataattattctagacgatttttttatatctcaaagcttaactattgcctttttgtatgataactggtagatattgggagtaaaaaaaagtttttttgtgactatttacaataaaaatttatgcagcatttctaaaaaggatctaaaaataatttcttgcgtaatattttttacattatgttgttgaagaatttgaggctgcttctgatgcgattgaaattggagaagtgccccaaatcggaaatattcccaaaattcaaagaatttaatgcggattgtttgggggcaaatgaaaacaaattttgtgttattcgaatgcgctagccgagctctacattttcaaatgtatcaacaaagggtctatctccactctctggcgagttatgtccagccaaagcagagtgggccataaacacgaattttttaatctttggtatttcctctattttgagcctgctctacatttatgtattgtgccaatatgcctattgcaactgaaatttattcaactttcccgacaaattgttgagataattattctagacgatttttttatatctcaaagcttaactattgcctttttgtatgataactggtagatattgggagtaaaaaaaagtttttttgtgactatttacaataaaaatttatgcagcatttctaaaaaggatctaaaaataatttcttgcgtaatattttttacattatgttgttgaagaatttgaggctgcttctgatgcgattgaaaatttttcagcttttcttgaaaagttttttccctagaatttatacagctttcccgacaaattgtttagataattattctagacgatttgggtatatctcagtgcttaactattgcctttttgtatgataactg

SEQ ID NO: 25745 - DNA, 2087 bp, Heterodera glycines
gtgtgttgcctgagggaattcccctcgtactgccgcaatagcagactgttcaaagtctgacatgatggagacggcagcccaacccgggatggtatttttgatggccgcaaacacctaaaagtatatggaaaaaataactaaaattaatttttacgcttcgataatgctgtgccgttttggaattgagtaaagcatatgcacatgggaccgcagcaaaatcaataatgaccgaaacgttataaagctgcgaaaacggagtagaggccacctatttttgaaaaacatggaccaaatttttaaatcgggataaccactttaaacgtgccatcaatcgataagtactgcccataatgttgtaccatgtatcggccaaattccgacataaacacaattaccctctggccctcaacatatccatcaaaaattgtcattggttgaaaaatttggccaatgacaattgcgtcgggatcctgcgcatccaacaaattgtcacctgcgtctgcccgttgcctagcaacttcacgacgataggaccgccccattgcggaagaagatggcgcaagcgcagctcgtaccccttctggtatgcttgctctggtattgtcaacagtttgacgcgttgccatcggatttgctgcttcagccgatgtcctcaaagtcatttgtgccactcgaacagtttcatgagaagccggatgattgtgattgccattttttacaattccaattttgtatggtcgtccagcggcattatgatgtacagccccacgtacatgtatacgcccaggacagtagggatttcggtgtacacagcgataaatctcaatccctaagccaaaattgccagaaaagccaaagaatctcaccatccgccattcgactatcggctttaaagttgtactcaaagccgtccgccaaaagaacaactcggtgctgtgttgtttcagcaacaaaaaacattttttcatttggttgaaggttcgggagggggtcatgggcttgtggatttggatgaaattcttgaactgggggatttggctgtggatgctcgtgaatttcgccttcttcggaagatgaggaatacattttttgagggaataaatgaaaattttcgaaggaaaaggaagtgttaatttgtgcagtgcacgagaatggtcatttttacttgcaagtaatttggcaaacatttttatcatcgcattttcacatcatttacattttctaggtcattcgcaaaaaataattaatttatttgcctattttccttttttttcttgatatggcaaaatcggtccctttcggcgaccggcattttcttatctatttgtatatttgactgtcggattgtccactgtccgattgtccacctctgtccgattgtcctcactgtccgataattaattaatagaattttatattatcagtagggattagcttttaagcacaaaaatcgcaaaataggcataaaataggggaataaaattgtttatgaacgctttttaggtagcaaaggaaataaaaactaatcaaaaacttatttaagtgttatattcaaatttattagaattttttttcgaataagaacaatttttgtaccaaaaatttttatcaagaaaaaaaatttaaattttggggaccaatttgaagaaaaatttttcatcctttgtggcgtattttctgaaatttttcagatcatttctcaagggtatatttttcgttttattgcatttttaaggcttttttagaaaagcctcaaaataagcgccaaaatggtgaaattaggaacaaattaggcgtctaggcattaagaataaaaaccccccgaaataggcaaagaaaggcattataataaaataggtcctagaaacctcataccaaaacgcgtttttcatgcttattggagcgtagttttaggcatttgcctaaaaacaaatccctagtgataataatttgcaattgaaagtagtaaaaaaaatcaaaacccctggatttgtcctttgtcattttagtcgtttttaatcacatttcggccttcatttcctttggccgtttgctttgaaaaggaaaatagggctaaagttcgaaaa

SEQ ID NO: 25746 - DNA, 1193 bp, Heterodera glycines
cctctgcagcatgacactaattaaaagtgacagctgaccagtggaggggggctaattagctaattgattgacagctggtcaaagggaaaagtgacagatggggggaattaaaatcaaaacctatgggagggttttcgggtgactaattggggggggggggtggtcaattaattaattaattatttgggtggggaaaaagccaaaacatatgagagtggtagggatttaatatgtccaatatttaaaggttccaaaatgaaatggtatgggaaaatttgattgagaattaaacagacacttgatgtaaaagtaaatttataaatttttctcaattaatttgaatatgcgggtggtcccttaatcgatgaacggcaacgaagggaaaatgacgccgtcactaatcctttcccatccctcttcgcttgaccccctccccctcccaaaatgtaagagaggcacgccatgccattgattccttcataaaattaatacaataacctcaccattatttgtcatttatttttggttttttttcaaattcttttttaaatttaattaatttataaattctttaatttttattatagcattcatttctcatttcatcaattcgattgcgactttttgtcatcaccaattacagtgaataataattaaaaaatattttaattaattttcgataattttgcaaatttatttcaggtttgtcttgttccaacaattctttgtgttcttcaacggactgtgacttagacgaacaatttgccaattcattgatcgccggctttctgttcccgctgtcacttcggaattcgtcaattttatcacaaaatcgtccaacaaagcggcattgaagtcacttttcggcaatggacaatcaatttcaattggtggcttattccgatgacgagagcgaactcagcaacaccgtgccaccaaaacacggatcaaaatgtgtataggggttggcagtcgacccatttaggtacttttaatttaaaattgattttaaattttaaaattatcctattagttttgcaaatgaagggtttgagtccagtgagattgtaccggtggaaaatgcgtcagttcaggggggggggggctttaccggtaaatattataatttttctttatttagtgcaattcagcagttgtcattagtggtacctaacaatgaggcagtggaaatg

SEQ ID NO: 25747 - DNA, 1211 bp, Heterodera glycines
aaagagagaaacggcgaaatgggaaaaagtgtcgtggacagatggcggagagacgagcaaaacccctcgggggggggggggcaattggacattgctccccattaggacatggccgagggcggtgccaattgtaagtgacgaagtgatttaagcaattaattgtctagggttgcattggcactttcattttcctttttgtcactttttcactctcttcctctccactcctctctctctctctctctgtctctctctccttctctcctcttttgtttcccgtttgtcatttcaatttcgcacaagaaaatctcaaattttcttcctttttcatttcttcagcagccatttccttcccgtttttcgggaattgattgactagagaaaagatgcacaacgaaaaagggacaatggagggaagaaaaagacgggagggaaaaaaagagcggaagggaaggaggacagaggaagaaaagagcggaagggaaggaggcgcagaggaagaaaagagcggaagggaaggaggacagaggaagaaaagagcggaagggaagggggcagaggaagggaagagaacgagggaagagccagcaaaaatcacatgctgttcatttgagggaaaaacaaaaaccgcgagaacacaccaccaccgtcagctgctgaacagtcaatgttgagggtcggtcacaaattcaaatttgcatttttggctttctctccgtccgccgatggattgccccttcggcacaatcggtcggtcggccatccattcattcgttctttcatccctcctcaattcgtatgtacggagcaacgaacaatcccacaatttttcggacggctgcttctacgaaaaccccgggccaattccattcccccctcccccgcccattccattgacagtccgccaaatgctacaaaatcaatgaacggaaagaaagaaaacggcggacgaacgaacgaagacaaagggagagaaagaaacagcagaaacaaacaatgcattagcagttaataatagctaattggattgattattaaaatggaacaactgcaaaatgaccaccaccgaatggccttcctttgactttccgcttcattaattagtcatttaataattggtgcaatttccatccgcaccgatgcaaaatatgattgataagtgaatctaacaaaaaggggagggtttattcccccccccccccccccccccc

SEQ ID NO: 25748 - DNA, 1438 bp, Heterodera glycines
aattaatcaatgattggttaattgattgataatcatagccctttgatcttcccgccgtttacttgttggtccttggccgcataaatgaccgccactttgtgcacttcacggcactgggccaagttgaggtgccgaatttcacggtgaaagttgctgggcgcgtgccgaagtcgagccaataggccgaaactcgcagcaaaacggcaccaacctcgccgttcaacagcgtcagccgacgtgccggcatcagcgtcgccaaagtgttcatcattaccaatgttggtgccgttgcggatgtttttgttacgacatttctccgccagatgccgttcatctgaaactgtttgataagatgagatcagtaaaagtaagcgccatcgctctcaattccccgaaaatttttaaaatttaatctaaaatagccaattttcggtgaaatctgtcaaaaattccaatattcccccaagggtttttttaaagagaatctcaaaaagtttactcatataatagaaactggtttgtttttttcaaaatttatccctacataaatctccaaaaatggtcatttaccttgccaaatcagtcgttcgtcgggacacggttgctgctgtggaccaactgcaacatttcgggctcgatgatgtcgaaatggggcagcatttgttgctgctggtgattattggcacaaaaggaaaccgaccgcatggatggacggggccttaaaacatttttagatagaactgaaaaaagccaaaactgttttatagtatttaaaagaatttttattgaccatgtgtaaaatcttaggctaattacccgcctaattactaaaatattacaacaattatcaatttaatttgctataatgtacaattttcgacacgttccatattccccgcgtccctctcgtccgaatacgtctcggtcagctgctacctgaaacgggtcaatcggggcaccgaaggaggacgacttttgccgaacgctggccgccttcgcttgttgaagcgacggaatggcaccgtcattctgttgggggttggccaacgaattgaaccattcttcgctgcaaaatatttaagttttataaaaaaaataataaaagtttattgacaaatttcattcaaaaaattcttcagaggtacctacaaatactcacgaatttttaataaggaagaaaaattttcagtaaaacattagttttccttaaaaatttcgagtgtgaatgggtgttttttcctctgaccccactggtttcggagcaggtgtcgtcgcccccacccccttaaaattaaaaaaaaatcagcaaatttcatttcatgaaaaaaatttggtatgttttcagcgcttttttcagtgcaccccattgaaattcgtccgtaaggagttggttcggccccctacaatttcacctattcactggcgattccgtctcctc

SEQ ID NO: 25749 - DNA, 1751 bp, Heterodera glycines
cttctatatattttcaattgccctcttttacagtctctctttccccctaagaaacaaaattaagcattttatcatagtaattttcaatgcaattttgtttgttcctcctccactgttgctctaatgatgcttttcctctgttgtttcgtcttgttttgtgtaaacatttttacgtgctaatcagaaaatgaactgcacaaccaaacacaaaaatgcacagcagcgaaatccgagacgatcgcattttcgctttgtcacttcttcggtccgccgcgttccgtcggctcttttccgccccccccaccgccatatcagtgcttttcatcggtcggtaaatgcgccccgctttcttcccccccccaaaaaaaaaactcccacccacccattttccgcgccaaacatttcattgcttcttctccctccgcctccttttcctcttttgtattcttcgctttgtgtgcagcacggcgccgaggttggctagcagtaaaatcgggcgcaaaagaggggaaaagcaccggcagaagccgagaacggctggcagcagcagctgaagaatgaactggaggaggaagaggacagccgcgagagagataaagcggctggaagcagccgagcaaagagataaaaatccgtccgctgtccgttgtgtcgtcgtgttgtgcttcttccataaaatgggtgttgctgttgtgtgttgtttgttgtactgctgctccctcccctccccccaatcatccaatctaaaatccgggatttccatgcgttgggtcgcgctgttctcgtcggtcggtcggtcggtcggtcagtcgcgccccgtcgttgtcgccttatctgcccaccaaaatcttttcaccacgcacccctcagcgtggtgcccttcccccggctttcctttcttttgtgcaaacccagcaaaacgacgacgacgacaaaatgtgagcctcggcagtgccccgccgccactttcacccattttcgctgatcactcccctacgcaatgacaaaacaaaaaaccattgctttcattcattcattccttttcctctgcttcttcttcttcgtcttgcactgctggaaaagccttccttctcatccccatttttgtacataattaggcgctaatttgcttttgtcttctccaaataatccaatactttaattaatcactatgattttattatatataatcccctaaatgaatcgcattttccttcccttccgcccactcattttcattcgacattttttttattccccaaaacactaattcattctcaaaataatttttctgagacgatgctttaaaaagtttggaattgtgtataataatgaatggatgtgtgctgctgctgttggctgtttgtggattggatccgccgtccccccccccccccgccacaacagtcactttgggtggggggggggggtcagacggaaataaatatgtaaaaagagcgaatgcccccgggggagcggacattcccaaaaattggtttcctttcgctttttgggcgtgtggcggcggtgcatccctttttcgggggctcgtttttgtggcatcatcggcagaaattgttccatccgcgagagtttatttaatagaaattaaaaaaagataaatcaattataatgattattgcgaattttgtcgaaccctaaaagtctgaaatttggcgattgtcggagtgagaaaagttgggagattgcgatgggtaacgcccccaatatgccagggtagaggtatcagt

SEQ ID NO: 25750 - DNA, 1678 bp, Heterodera glycines
aggactgaacccaccagcatttcaatcactggggactcaatccaccaacattccaatcactgggactgcattccaatcaccaggacagaacccaccagcatttcaatcactgggactcaattctcctgcatttcaatcactggcactcaaatcaccagcatttcaatcactgggactcaattctcctgcatttcaatcactggcactcaaaccaccagcatttcaatcactggcactcaactcaccagcatttcaatcactgggactcaacccaccagcatttcaatcactgggactcaattctcctgcatttcaatcactgagactcaacccaccagcattccaatcactgggacttaacccaccagcattccaatcactgggactcaacccaccagcattccaatcactgggactcaacccaccagcatttcaatcactggcactcaacccaccaacatttcaatcactgggactcaacccaccagcattccaatcactgggactcaacccaccagcattccaatcactgggactcaacccaccagcattccaatcactgggactcaacccaacagcatttcaatcactgggactcaacccaccagcattccaatcactgggactcaacccaacagcatttcaatcactgggactcaacccaccagcattccaatcagtgggactcaattctactgcatttcaatcactgggactcaacccaacagcatttcaatcaatgggactcaaccgtacgggggcctttcggccccactcaccaaatttttgcgccaaaggtactcactcggccgcttcgcggcctcgtaactggggccttcggctccattccagtcaccaaaattaaatctcaccaattcttaaaacccaataaccggaaatgaatgataaaaccgacagcggctcgaccacttagcggcctcgtactcttcttttggcattttcttatggcataacagttcttccttgtttcttgactttttcttacgcacaacatttttcttctatacaaatttttcaaacaaattctcattcattcatttaaaatttcattaccatttacataagcaaaacaatatctttcatatcaaaaccaaatcaatttataacacacacaacaaagaaagaaaaagaaacattttaagactgttttttatacaaaatgacaaaagaaaaaaatgtaaaacaaatacatttcatttttcaaagcatttatacaacacaacacaatgttaatattataggattttcttagtgaacaaactaaggagtgtcctctttcttttgttaaatattttatacaataaaaaatgggttataaataaggaagggatgcgagagaaatttcccattatctctccctttcctttcttttactctcttttcttttccattgcaatttactctctttttttcccactccctccttctcccacacacacgcacgcgtccaacagactgctgctgcacagcagcacgcgtctgttcactgtatgcccctctcacccgccgctgcccgcgtagacagacaatcagacagtgcactattttcccacctttccctcgctctacatttttcaaattcatttttaacgcaaaactcaaacaaaacgccacaccaattcaaaccacggacacatacatacatacatacaaacac

SEQ ID NO: 25751 - DNA, 1683 bp, Heterodera glycines
aaaaacttattttaaattttaataacaatttagtttttttatgaaatatgatcatcactaaagctgtgatttgtcttctcacccgcaatcgaaatatttttttaaataataaaaattaatgataaatttaattcataatttttgatgctttttgtgggatatttacaattaaaatatttctaataaatataaataataaattttatttaataagttattttggtccgaaatttaattgttttttattttaatttttaattaatttttgttttttaacaaaaacatattttactttttaataatttcaacatcaatcttatacattgttattttcattaataaattggcaattacttttaattttatataaattttgttttcatcttataggctaaattatcttttttaactaatagtaaaataaaattcaatatttatatttttcttagtagctcatctttaagccaataccattatgcgaattttattttaaatttgtctttaataaattcttggttttgcattttcgcttatgtgcattttcatttcagattaggtaagatgtaagatttttttcaaataatttttttttattattataattatattaaaattttcatagattgcaagtatattttttatccatgtgttctgtgtgcacgtcgttgttggcacgactacaaatatttttatttttttgtaaaatgaaaaagttttaattttattttgattaattcttttttctataataataaaaggattacaacaattttcaattaaaaatttattaatttaattttttatttaatttaaattcgaatactaattatttcaacaatttaagagttaaatcaaatgataattgaaggatatttcttcgaaatgctcacagtaattaaaatgtatatttataatgaatagctttaaatatagtgaaggtgctgatgtccagcccagaatatgaggaagggacgagggaaattggggattggatttgggggaaaaaggaataagccaaaatccgggccctggataaatgacctccccaaatttgtaatcccatgggcgcctattagctaatacgcgtgcggggatgggcgagaagcagtaaaataataatataaatattggccaattacattaataataattccgccgcgttctgctctcggctctcgctcgccgattaactgcccgctcaactgaccccttatcgagagaatgctcccgattaaatagttggacttatggaacggaataaaggtggggaaaagcggggataaatggtgtgagaaagagattgaacggatgtgataaattgcgccttacaatatatatatatatatataatataatatatttatatatttcacatgaaataattattattcaccacatcaagctgttataaataaaaaacggactttaaaattttcgtttattatatggatacaaaatataaggttttaaaaatctatttttattgcgttttgattctgatgcaaagtaaagcgaatagacattaaaactgaatagaatattaatttgttaaaaattaagataaaaattatttgatttcaagaaaagacaaactaatgattatacttaatttcacatatgctatatatgtgcaaaaagtaagttatcaaattatgatacaactaaaatttgaaaagtaattaa

SEQ ID NO: 25752 - DNA, 2362 bp, Heterodera glycines
  unsure (1)..(2362): unsure at all n locations
ttctttcatttgtccgttttctctttgctctttcatcgcttcctccctttagcagctctatttgagccaattggccggtctcggtgcttccgatgcttctggtgctgctcctccgcccgattcgtcctcttccaccggtgctgtcaatcccttccagcacttttcgtcgtccgctgatcttccgacgagttccgcggcggtgtgtcatgcgtccgactcggccaccaccaccacgagttcggaatcttgcacttcctcagaaacggaggggaaggcgcgaggagccgccgaagcctcgtgagaggaaaggacaatgacgaaacttcggtgtattccggaggagtgatggcctgacaaatgaatgatggaagaaagagataacatgattaaggggggatgtaagactacggaagaagggatgaaacggaaagagcggatgattggagtggaaataacgggtgacgggcttgcttccccggtttgggtaccgtacagggcgtacccgcagaacaatgcggatgttattatgcaggagattaataagttggggcagagcggggacggagatgaaaataagaaaacgcttttgttgtcggagcctattatgatgaaaattacttgcgtcacactgcccagtggagacgggccgaggaatgtacataaatttgatttcggatttaaggaacaccaacggataaggtaagttttttgagaaaaaaaaaagaaaaaaaggaaaatagaaaaaaaagaaaaaattataattatttattaaggatttcgaatgtggataaattttgtttgttttacgcactggcgtcgtcgatgaattatttaattatggaccgttttgcatttaatcgatttatgaacaatattatgagacagagggacgcagctactgagcttttacgtaattgtggaattgatattaacgaatatagctatggagtggagcacttatcgagggttcagaattatttggtgggttctaaaattttggaaaaagtgataaattaatggattttcaggatgagatttaccccggaaagtaccgagtggtggcatttgaaaagtcagctgatccacggaaatcaatccgtggttttgtggaagggccctatgggacgtgaaaatgtagtgccgatatttttggagaatggtcactgggatggtctgaagaattacgtctgtttttttaatcgtgggaggaaattttgcgttgattgcgaatgtttttattcgcgggatgtttttcatacgttggagtgccgggcgagatgttattattgcaacagagtgggcggagtgccctgtggaaaggagagtggagtgaagattgaatgcccgaagtgccatcgttacttttacaactgggaatgctacaactatcatcaaggacatacttgcaaattatggaaacgttgtgtgatttgtgacaaaacttatcagttcaacccgaagaaggaccatgaatgtggagagacttattgccagctttgtagtgtgagccacgaccccaaacgtggatgttatattatgccgatcgaagaaaaagaagacaaggacgtgtacagaattgtcgtttgggtgagattaagctaaaaaatatatacaaaatatgtcttaatttttaggattcggaaacatcgcaggattcgatttacaagggggaccagaaggagcatgtgattaattatatttcggtgagagtgacgtgtacggaatgctgtgatgataaaaatagggcgaattgcaaaatatgcggggaggagaggaccaaggattggagcgaggctgagggacatgagccgacgaaggattttgtggaatggattttaacggcatttacaaattatgatacgtacatttttgcgcataacgccggacgatttgacggtaaattatcgtttaaaaatgttttttattttgaaaatttcaggacattttgtatttaattatctctgccgtaccgggaagaacccgataccgcttatcaatggactcaaaatttatgaattcaaagtgcagaattcgaggaaacattcaatgctgatatggagagactcatgcttattgatgccagtgaaactcgagtcgctgaaggcgacatttaatttgggctgtgaggacaaaccctttttcccctactactacaataaganagaaaattatggaatacgattggaacatctaccaccgatggaggactattcgccgggatctatgaacaagngataatttatanaattcgaaaaatggtaagaaaacatgaaaaaacaacaatnnaaataaattttgttttcaggtaccacgaaaacaggagacacccttttatttgaatgacgaattgcgaaattattgc

SEQ ID NO: 25753 - DNA, 2154 bp, Heterodera glycines
  unsure (1)..(2154): unsure at all n locations
aaaccagggatggnccgaggtttcgcatttcgcctttcgcattattcgcatttcgcttttcgcatttcgctttttggcgagaaatgcgaaatttccacccctaagaaatgaatatatttgaaaatttaatttttaaaacgaatgctttcagtttattatttctgttaacatattacactcaaaattgcataatggaaaaattcttcgaatttctccccacaaacgagaatttaaaaattttatgggtacatttttgaatataggcaatttttcgtaacaaagtgcacactcaaattttcaaattttttttcaaaaaatttcatttgggaaaattcccggttggtcccagtcccggacgaaaatcgaggtcccggtcccgacatttctggtcccggtaagtcccggtcccggtttttgtcaaaattcccggtcccgtgcaactctaatattaccttttttgctaacttgctatagcctaatacgcacgaaaacgagtttttaacttcgtttgaagcttttatcttgaactttttggtgcatttttttgccttttttgcgatttatttttttgaaaaacagtaaattttttgaaaattttgcaacttttcctaccatattttattacaatttccaaaaaattttccggcggcgattatcggcaccgccggaccttcattttaccttaatttttgaaattttaaccacaaaatgggtagaatttgtcattttttatctgagaaaaaagatcgaaccggaaaatgcagatttttttttgcatcacaacctcaaaagctattggtaaatttaaaaaaaaaattcgcttttcgcatttcgctttttcgcatttcgcatcgcaaatttcgcatttcgcttaaatttatatatttaaaaatgaaacaatcttgaataggataattggagcagcagtgcgctgaaattttatccaacaaggcgtggtgaccaattatatcttatggcaatttattaaatgctaacaaaataaaattcaaaataaatatttatcaaaaaattaactaattattaaatattaaaattttaaaacatattctaaaataaaaaaaaatttcaagaaaaaagaaatttaaaaagaccaacaaataaattaggaattttttaattttcacaagcgaggagagataatgaaacaaattaagacgaattgttatttaaaaacaaaattccttaacaaactttataaaaattgattcttacgcaaaaaaaataactaaaataatttacaaaaaataaccgtcaacctcaattgagaattcatacgatcctataccactttgaaaaaaatattgttatgaggaaaacaaaaatgattttattgttccaaactaataaaaagtaaaaagataattatgaaaacaataacaaacaaaaagacactaaatattaaatataaatttaaaaaatcaaaaaaaaattcaagaaaaaatgcattaaaaaaatcgacaaatataattatatttcaaataaaaatatagagacagcaaatcagacaaatatgaaaaataatttaatgaaaatagtttttatgttttttgtaaaattaataaacaaatttaatctaaaaaaaagatttatttgcggttaaaaaaagtttttaaaaacattcatttattagaaggacagacttattttataaacttgtgttctattcctttgaattaaagaaaatacaataaaaaaaaattctattcatttctctcaatttaaaaatgatttttaagaataaatgaaaaaaaattacaaaaatataaaaatagtaattaatataaaccgtttcgagacagaatttaatttaatttaaaactcattaaatgggaaaaaattaatattataatttaaaagctaatatatcatatgaaaatatttaaaaagacattacaaattcattcgcattagatagactcaaccaaaaaataataataatatttaaataaataaataatttaaaatgcaatgaaatttaaataataataatttaaataatattataatataattgattgaataatagtgaatgaaaatatcagatattttatatgaactaaatattctatgatatcataaaaaaatatttaataaataaaattaagatttgaataaaaacaaatttatttatta

SEQ ID NO: 25754 - DNA, 1856 bp, Heterodera glycines
agaaatagtgaattgaaaataaagaaaatacaaagatttgaaagtaaattaaaatttatatactaaatgtgtgacattgaaaacaatcctcgttacacaacgcgcgtcaacgatttttgaatgataataatcaaaagttaaaaagttgttattatttcaaaataataaaaacatattgaaaataaatgaaaaataataaaaatatgcaacaaaagatttttatttatttagaggcatttattgaaaaataagacagcctaaatcagatttcatatttttccattgcataaataaaatgtattaaaatttttaattttacacttttaaacataacgtgcaattgagaaaaatgctaatggaaacagacaagagtttttaaaaacatatttttttataataaaaattagaaaccttgtcagtaatttattataaaaaataattaatattctattgggataatacgaaattcttatttattcattaaacataataaaaataattgctacaacacatgaatatgcaatcgttgaattgtttctttttctaatatagtacaggatagtagagcttcctacattactttttgagctaaattatgatatattatttaaccaataaaatttaaattattaattaaatttaaatatttcaattattgatacgtttgccacttgggctcactacggttttataaatcatcattcaaatgcttgaaaataaacaattttctgagcattattacataaccctactaatattccaacttattaatgaaaattcaattttaattttaaacaacatatttttaaatacaaaaacaataaattgtcaacttattaatgaaaattcaattttaatttaaaacatttttttacatttttaaatattaatttctttacacattttaataaacattaaatatttgaaaggcaagaaaaaaagtaatacccaacaaattaattatgataattataaaaagtaagaagaaacttaatataatcaatcaaaagtatggttttcaaaaatggcctttaaactaagaaagagcacaaaaattatgtaataataattaaataaaaattgttttacataaaattaatacagattatttaaagtaaaagaccgtaatacatcaaattaattatcttagtgaagaaatgatagcattaaaatatttttaattgcttctgtatcctagggttcagccccgaccccgagccccccggcccccgacccgggacgttttttggatctattccccgacccgacctaaaatcgggattgagctgagtcgggatttcatcgggacgtcgagacgggatgagacaaattatctgataaaaattaatacaaataataaaaaattattaatttagatattttggtacacattttagggtttgtatattcttatatatttcgaatttaattttttttatgtatttcgcatccctatatttacgaattaatgtttttctatattgaacttcaaataaaatattcctgtttagaatttattttcaaacaaataataaaatataaaagaaaaaatgcgtttaaacaattataaataaatttctactaagtattaagataatttttatagaattgatcatgccggtagttgctgataacttaatgagttaatatttttcgttatcttttttcactttttcaaaattatgttaataaaaacaatccaaaaaaatttcggcggtgcctttcggtactgtttggcacccaaattatttatctatctaacgaacaataaaaattaagaaatttaaacagaaaaacaaaaaaatatatatgtttaggtaaaaaccatcctggtctgattgcaagaaattctttat

SEQ ID NO: 25755 - DNA, 1093 bp, Heterodera glycines
aaaaaaattcttgccgaaaaaatggctatctctttttctcttggggatttgaccgcaaacttggtaccaacatttgccttctctagtctgggctctaccaaacactcacacgatatttgaaatgctaacgaaaaaaattcttgccgaaaaaatggctgtctcttttttctcttggggatttgaccgcaaacttggtaccaacatttgccttctctagtctggctctaccaaacactcacacgatatttgaaatgctaacgaaaaaaattcttgccgaaaaaatggctatctcttttttctcctggggatttgaccgcaaacttggtaccaacattttccttctctagtctggctctaccaaacactcacacgatatttgaaatgctaacgaaaaaaattcttgcccaaaaaatggctatctcttttttctcctggggatttgaccgcaaacttggtaccaacatttgccttctctagtctggctctaccaaacactcacacgatatttgaaatgctaacgaaaaaaattcttgccgaaaaaatggctatctcttttttctcttggggatttgaccgcaaacttggtaccaacatttgccttctctagtctggctctaccaaacactcacacgatatttgaaatgctaacgaaaaaaattcttgccgaaaaaatggctgtctcttttttctcttggggatttgaccgcaaacttggtaccaacattttccttctctagtctggctctaccaaacactcacacgatatttgaaatgctaacgaaaaaaattcttgcccaaaaaatggctatctcttttttctcctggggatttgaccgcaaacttggtaccaacatttgccttctctagtctggctctaccaaacactcacacgatatttgaaatgctaacgaaaaaaattcttgccgaaaaaatggctatctcttttttctcttggggatttgaccgcaaacttggtaccaacatttgccttctctagtctggctctaccaaacactcacacgatatttgaaatgctaacgaaaaaaaatcttgcccgaaaaaatggctatctcttttttctcttggggatttg

SEQ ID NO: 25756 - DNA, 1853 bp, Heterodera glycines
gttccgtctggggtcagttccgtctggccagttccgtctggccagttccgtcctggggccggttccgtcttgggccagttccgtctggccagttcagtctggccagttccgtctggggccggttccgtcttgggtcagttccgtctggccagttccgtctggccagttccgtctcgccagttccgtcttagtactcaaagggccggttccgtctcaaatatttttggactcaaattttttaaaatcaataactaatttagaaaaaaaagtaaaaattcttttactacgcagcctaccgcagcctaaatatacctggttttttaaaagttgtggttaattaaaagtatattcgaaaataaaaattttttgaaatgaatttaacattgcaaatgtccagtaattctgctcgggattctcagtcttggtcatcgtgtcgggaaatttagcagccttaatgtgtccagcactttgtttgcagcgaatccggcacccattttggaccccgaacccgaatataaagattaatttacataaatttcgtctaattttcaaaaatacacccctgagaaatgaaaaatttcctcaaaaattttgttattttatacccctaaattgaaactttaacacctattttgaggtttttagaaccgaaaacctaaatattttggcagtttttagttttgaacacccaaaaatattaggcatattaaatatcagggctgccaaaaacatgcaaatgtattttttccctgccttttccatgctataaataataggaaaaacacgttctttttttgtgtttgcgtagaaaaatcggtatttttatttgcatatttcgagatttttgtgcatatgcatattttggctacttttcgtgcatatttttggcagcactgttaattatatctcaactttctgttcacattctgaaatttaaaaaaatttgggtccaaaaatatttgagacggaaccggctcttttactactaagacggaaccggccccagatttatttagcatagagtataacaatacagatcaggcagaatttctaaccactcaatttatattgtatttttagtggttttttaaatttttttgccaaattttctggcactgaattgtcaatttttcaacgtacactgaatcttcgtcactgaatcgtcgtcactgaatcgtcgtcactgaatcgtcttaacactgaatcggcgtcactgaatcgtcggcactgaatcgtcggcactgaatcgtcggcactgaatcgatgcgaaatgcgaaaagcgaaatttgcaaaactgaaaaatgcgaaatgaaaaaaaagcgaaatgcgaaaagccaaaatatgcgaaaatgcgaaatgcgaaaagcgaaattttttctacaaatttttaatagttaaaatcataaagcaaaaataattttttaaaattttattccaaatttaaaaatcaataaaacgctttattgaggcgcgctttttccaaaaaaactttttgggaagagggggcaggcgccgccgggaaaatttttgaaaatttgattaaaatttgttgacagattttcaccaaaaaatcatcaaattttgtgatttttgtatcatttttctaatgagaaataagagttttggcgcgccgctgagaacagtttttcatcaaattaccaaattttgcgattttgggccattttctaagaaaaaataggagttttgggggcgcggcggtgccgataggcgccgccggggaaaaaaattggaaattttgatcattaataaacagtttttcactgaaaattagccaatttataggtaaaatttagagaaattttatgggaatttaatccaattcttaggggtgt

SEQ ID NO: 25757 - DNA, 1033 bp, Heterodera glycines
aaaaaaaataaaataataggagactcagaattttgaaaattttttataaaaactgatgacaagctaatgtgataaaacaggttaattcttttcctttcagtatccctgcaaagtttggggcgcttctgataagtttctgaaaaaaaagttaagcctaaactttttggcctgtttaaaaaggaattaaaaatttttaaaaatttattcatctccctttttgatagaaaaagcatcagagtgcctaaactagcatgtaaataaaatttggtgcgtttcagagcattttctgaaaaaaatatttatgaattaattatgcaaaaaataataaacagttataaaaatttgatcgtctaaaaaaatttaaaaccaattacaattgttatttttgcagggttagttagtcctgtaccggggagtatgcctataaaatttggtacgattttattgcttattgaaagagctagagccgaagaaaatttttttaatttaagcctaaactttttggcatgtttaaaaagcaattaaaaattttattcatctccctttttgatagaaaaagcatcagagtgcctaaactagcatgtaaataaaatttggtgcgtttcagagctgtttctgtaaaaatatttatgaattaattttgcaaaaaataataaacagttaaaaactcagaatttctaaaaaaatttaaaaccaattacaattgttattttttcaggttagttagtcctgtaccggggagtatgcctataaaatttggtacgattttattgcttattgaaagagctagagccgaagaaaatttttttaatttaagcctaaactttttggcatgtttaaaaagcaattaaaaattttattcatctccctttttgatagaaaaagcatcagagtgcctaaactagcatgtaaataaaatttggtgcgtttcagagcagtttctgtaaaaatacttatgaattaattttgtaaaaaaataaataaataatgaaccctcctccttaataattttcctgcgcccaaggtactcact

SEQ ID NO: 25758 - DNA, 1165 bp, Heterodera glycines
ttgatgggactcataaaatacctttggactcattaagtgcattacagccaaaatttttaataccgatcctgcccggactcttacaaaaaaccagacaaatgaccggtcaataaatccatgagatctcgttaaaaaaagagaaaaccttttgatcaaatggtcaaatgcatgacggaaattgctgggcccactggtcatcgaacgggcgacatggaaacgagcaaactaaaaaaagtggaaattaaaatttgaaattattgaaattatgccaatcagacaacctccgatttaggcggtgacacgcaacagttgaacaacaatggcgaatttcgaggaatacgaagccccaacatttggtgaggatgaagaaaattgacgagaaaaatgcccaatcaaatcagcaccaattgaataactcgggactttttgcctaaaaatttttgagcaaataaaaataaagcgagaaaggcgggcacaaaatatttggtatgctgaaaaatttttccatatgaacagattttcttgaaattatgcgtaggcccatattttgacatcctcaagtttttgcaagttttggcgttctgctttattaaataaaaaattcgaattatttgcattgggaggcccaaaattgattcgctgtgttaagtgggggtaggaaacgtacgacttgtctccgtgtacaatagccatagcgtaaagaaacgagtacattattcatttatttccctataattttttacaagaaatttttttctaataatacatactaatgatttggatcatttgtaacatatatcgatcagcagtcctcttcatttgttgtcatcctccagcttccaccacactgtggcgtcggaatcgccatagattgggtagccaactaaaaggccaaagaatccaaaaaacacaatggcgccccatttgtccggcagaagggcgtcagctttcctgttgttgtaagtgtattttggcatggcaccgctggcgtagtggcgccgctgctggctgaagcataaattggaattattggaaatttcaaatttaaagccaaaacaaaaaagaagcatttgggaagggcaaaattcgaaaacggaatattgggattgacgggtcgccgatatccacaaattaatatagtccacattttgactctaatgcgctt

SEQ ID NO: 25759 - DNA, 1534 bp, Heterodera glycines
  unsure (1)..(1534): unsure at all n locations
tatttagttggtgctatgtcatataaaaaattcatcaaccatgaaattttgcatgctaataaaggncataggngctattaccttgaaaaataataatttctaactaaaattttaaacaaaaataaacttatgtttaaaattttcattaacattgcttcaatacatagttttaatttttctatgttttttctatctttgaatataattcataaaataataattttaatataatttgataaatcaatttcaggtttaattgaagttgtgcattttttgtagatattagtttatataaattaaatatttcataataactaatataatttaatttaactaatctttgtttttctcgtgtttttttataatgtaaactcatgcgttgaacattgggaaaagattcgtcggcgctcattcatttttttacttcttaaattaaattcgttaattaaaattttagtttaattattgtaggttttttatttaattattttttataaaagtgaatatattccaaattatttcttagttttttattttaataaaatttaattagaatattcttttggaaaataaaactgagataattaatcttctaaactctcaattttctttactcatttttaagtgtttgaccattcaatccacttttattaggttttgttaaatttttatcttttaagtggtttgtttatttagttttgctaaactaattttaattaatatatttaagaaacaataatttttcgttttctttcatttattatatcgtacgctttgtcagtggcgccgattttgccgaaattgtggccatgttgcctatcttggccttcaccagtgtccaccacttgactaagtcgatgagggagcgcaagactgtcgtctttgtgccggaccgcacacgaatgatcagccatgcttcatacagccacttggccctggaccatctcgcgctgcgcgagtcaacacaaagtttctgtttagacttagacctgaataccggcttagttgggcccgaaaccaccaaatgaaacggtgagcaaaattcgaacccgattttagacataggcgcaaatgtccgaggcgcaaatgtttggctggacacgggacaatcagaaatataacatttgaacattttaagcatgttttgaataaattttgtaaaaagaggctttttacccaaaaataaatttttgacaaaaaatcataaacaaatcttttgcttatacaaattgtacattaatattaatttatgtgtacaataaatcatttagaacattattaaaaagtactgtcgaaaacatctggtacggtggataagcacttgaaaagatttgtcattattcagccaaccacttttaaaggtgcagaattacgcgattcaaaaaatagcaaatttcaaaaagcatttttttccctgataaaaatgcgctgattatgaatttgaactcggatgctgtaaaataatttttgttaattcatattcatcatgtttttagcatgtccaattctataatcttccgtaattttaagcgct

SEQ ID NO: 25760 - DNA, 1041 bp, Heterodera glycines
ttctccggcctaatccagaaaaaatcactatctctttttttggaatattttacgtgtcaaagggtgtgcatttaagcgactcgctgtgcttgcccactgcatttcaaatagctggtaatttttatttctccggcctaatccagaaaaaatcactatctcttttttttggaatattttacgtgtcaaagggtgtgcatttaagcgactcgctgtgcttgcccactgcatttcaaatagctggtaatttttatttctccggcctaatccagaaaaaatcactatctctttttttggaatattttacgtgtcaaagggtgtgcatttaagcgactcgctgtgcttgcccactgcatttcaaatagctggtaatttttatttctccggcctaatccagaaaaaatcactatctctttttttggaatattttacgtgtcaaagggtgtgcatttaagcgactcgctgtgcttgcccactgcatttcaaatagctggtaatttttatttctccggcctaatccagaaaaaatcactatctctttttttggaatattttacgtgtcaaagggtgtgcatttaagcgactcgctgtgcttgcccactgcatttcaaatagctggtaatttttatttctccggcctaatccagaaaaaatcactatctctttttttttggaatattttacgtgtcaaagggtgtgcatttaagcgactcgctgtgcttgcccactgcatttcaaatagctggtaatttttatttctccggcctaatccagaaaaaatcactatctctttttttggaatattttacgtgtcaaagggtgtgcatttaagcgactcgctgtgcttgcccactgcatttcaaatagctggtaatttttatttctccggcctaatccagaaaaaatcactatctctttttttttggaatattttacgtctcaaagggtgtgcatttaagcgactcgctgtgcttgccactgcatttcaaatagctggtaattttatttctccggcctaatccaaaaaatcactatctctttttt

SEQ ID NO: 25761 - DNA, 1234 bp, Heterodera glycines
atttagtagtgatgctcgagaccaaaaatttcccgagactcgagaccgaggccgagactcgaccccgagactcgaccccgagactcgagaccgagacccaaaaccccgagaccgagaccaaaaaaacccgagacccgagacttttttcaaaaattttttcttacacacttaaaaatcgaaaaaaatcaatcttttgagttttctcaaaaatttttgtttttttccttatttaagctaccatacatttttccttttcatatgattgactttttttacaccattttttgtggtgctctttttcaaaaaaatgtttcgggaacaggggtccggcggtgccgataggcgccgccgggaaaattttttaaaattttactgcaatttgttaatggattttgtccaaaaatgacatttttacgattttaattgttaaaattgtgtttgaactcccatcgaaaaaaaacattaattttgaaaaatgagaagaaaaaataatacttggaggggaactgatccaacgcaaaaataaggaacaaaaccaagaacacaacccgctggaccacgcatatattaacaaaattgaacaaaaaagaacctaaaatttataaaaatagaagtttaccaaaggccaacaatcattaggggtgtaaaaaagtctcggtctcgagtctcgaaaatcgagaccgagacttgaaaacccgagaccgagactcgagaccgagaccaaaaaaaaccgagacttttctcgagtcgagactcgagaccgagactctcgagcatcactagtaaatagtcactccttttcccaaaaatgttctaaaataatgaaaaatgacaaaaaaagattttgataaaataattgaataattttttcaagcgaatatactaaaaacatttgtgaaataccttttactatgttaagaatttaaaaatttagcctattaaaatatttagaaatttttttattatattgtatattttttgaaaaatttccgatttcttgcaccgcaaaaaagtgggtttgaaaagaaaaaaatagtcaaatttatgaaccgataataatttgatttccgatcaactttttaccgtcggatccaatcgaaaaatcttagtcgacccatcagccccttctaatgcatcccgccagcccttttttggaaattctttgaatttaattgaaattttttcgattttccaaaatcccgcaatcccgcacgggatcccgcaaatattaaat

SEQ ID NO: 25762 - DNA, 1002 bp, Heterodera glycines
gtcccagtgattgaaatgtggtggggtgcagtcccagtgattgaaatggtgtgggttgagtcccagtgattgaattgctgttggtttgagtcacagtgatggaaatgctgtgggttgagtgacagtgattgaaatgaattgagtctcagtgactgaaatgctggtgggttgagtcccagtgattgaaatgctggtgggttgagtcccagtgattgaaatgctggtgggttgagtcccagtgattgaaatgctggtgggttgagtcccagtgattgaaatgctggtgggttgagtcccagtgattgaaatgctggtgggttgagtcccagtgattgaaatgctggtgggttgagtcccagtgattgaaatgctggtgggttgagtcccagtgattgaaatgctggtgggttgagtcccagtgattgaaatgctggtgggttgagtcccagtgattgaaatgctggtgggttgagtcccagtgattgaaatgctggtgggttgagtcccagtgattgaaatgctggtgggttgagtcccagtgattgaaatgctggtgggttgagtcccagtgattgaaatgctggtgggttgagtcccagtgattgaaatgctggtgggttgagtcccagtgattgaaatgctggtgggttgagtcccagtgattgaaatgctggtgggttgagtcccagtgattgaaatgctggtgggttgagtcccagtgattgaaatgctggtgggttgagtcccagtgattgaaatgctgttgggttgagtcccagtgattgaaatgctggtgggttgagtcccagtgattggaatgctggtgggttgagtcccagtgattgaaatgctgttgggttgagtcccagtgattgaaatgctggtgggttgagtcccagtgattgaaatgctgttgcgttgagtcccagtgattgaaatgctgttgagttgagtcccaatgattgaaatgctgttgagttgagtcccagtgattgaaatgct

SEQ ID NO: 25763 - DNA, 2069 bp, Heterodera glycines
  unsure (1)..(2069): unsure at all n locations
gcaaatgttttatttatttttaaattaatcagtttattgaacaacaaatcgcaaaatgcgatctgaacattcgctttataagctcaacttggggcggtgtgccaacaatttcttcctccacaaaatttcctccctcggcgactgttctttgcttcacacttcgcctgtcagggaaaatggccacacaaaactgagntaataaatatttttcttttttcaaaagcttttgcgtttaaatgcttttatttcgttttcagcggtcaatgggttccattgcccgccaaaggaaacgaaaaattgggaggaaaaaaaagataaaacatcgcaggaaaaggaagacggagagaaggggaaagcgaacggacaacggaagaaagagcaaattgagccgaaagcgtgggaagaggaggaagaattcgaaaaggtgggaagaaaacggaacaaatggacagagaggggacggacaatcgaaaataaattcaaattctattttcaatttcggatgaatgccatccttccccctcccccctcttttagtgccattccctcgtcgctttctccgtctatttcacttggttcgtcctcactgtccatgcgtattttcgcgagtttctgcgccgttacggaatcgagtcgaacaaagcggccgttgagcgcactgagctgagagtaataataattttattaaatttataacgaatttattgggttagagacggaacacagaaccgataaacccaattcgtatttgaatttaagggatttgcgccactcgtcgattctttcgaagcgatttacgcccgaaattgttacatgcgtgtccggtgagtgagtgttccttttactttggtttttgcttattccggtgaatttagcgatgtttttgagcggccaattggcggtgtgccaggggcgaaagtgtctgttcattcttttattccttcaaaaaattgataaattttcccgccaatttagcaaattggtcgaccgacaaacagatgacttctgctggacgttcaagtgctttttctgctgtttatgtgcttaacttaccaatttgaagcttttttgttcagatttcccggctctcaaacggaagtgataaatgtgagcagttacaattatttgggcttcgctcaaagcgacggcccatgcgcggaaatggcggcaaaagcagtggaaaaagggggactatcgacgtgtggcagtgcgcttgaagtgggtgggttggtttgcatctgattacaatatttggatggaaatttatttcaatctcccatgtttattacctgtcccgatattttgtggggcccaaaactcacatattccttaatttcaattttgacagaaaattgggtgggagaactgatgccattttcgagtccatttttgcccttttcattcacttttgacgaattatttaagtttattttccaattcaggtcagtgctcaattcagtccgacttggagaatttggtggccaaatttcttggcgttgaggaggcaatttgcttttcaatgggattcgccaccaattcgatgaacgtggcatgtcttgtggacgaggtgggcaagacgtacccaggaatttgacagggaaatgtcactttttaataaaatttcctcagcttaaaagggtggtgtctctacagttttcatttttcaggattcgctgatcgttagtgatcagtttaaccacgcttcgctgatcctcggcgcccgcatgtcatccgcgacaattcgtgtcttccgccacaatgacatgcccgatcttgagcgtgtgttgcgcaatgcgattgtttacggaaacgagcggacggggcgacccttcggcaaaattgtaattgtggtcgaaggcatttactccatggaggggtccatctgcaaactgcgcgaactgatcacactgaagaagcgctacaagtgctatttgtatttggacgaggcgcacagcatcggtacacattttgaacgattcggaaatgaaattgaaaaagaaggcattttaggtgccatgggtccgaccggacgcggcgtgaccgaatattggggttgtgacccggcggat

SEQ ID NO: 25764 - DNA, 1740 bp, Heterodera glycines
  unsure (1)..(1740): unsure at all n locations
cgatcagatgtcatctcccgtccccncaggggtggggggatttctcccgctttattagccattgggtgcagcacagagaaaaagcctttgttggtacaatgctgcaccagcggaacaaaaatgtgcggaatttgccctcagtttgattttttacgagcatccatttgggtttataaaagctggcgactttttcgccactttttggggcaattaaaataaatatttcatttaaataaaattaattttatttttaaatattttcccgactagcggtgaattttgggtcattctcagagatttccatattttgtaaaataaactaaatccagaatatcgcagtggcagagaccccctccccctaaaaacatggaaaaatgccatttaaaatatggtattctcagcgatcatttaaattttaaattatttcgaaatttcttccgcgcggcgaaaatatatttacagcagcggcggcgggtgaatttttattttttgtttgttctcccacggccaatcgtccgccggcggagagaatggcaaatattttggcagccaaaaaagcagcttggccatctcatcatcatcatccttcttttttttttttgagtatgtccaggccaaaaacattattatttttgctgttttagaactgaataaataaaaaatttaaaataaattccattaaaaaatctttcaaattttggatggataaataaaattcatatttgatggaaaaatgataaattagtcaaaaaataattataaataaattttagaatttttacaattaaaaaaaacaaaaatttccattgccttttaaaaaaattattatattttttatttttaaaaaaatttcccagcctaccaaaaaatgaataattttggcaaaaaatattaaaaaattataaataaattttaggactttcaaataaatttaatttacacacaaaaaaaacaaaagcttccactgctttttttaaaaaaatattttttatttttatttttaaataattttccgcgccccaaaaaatgaataattttcacaaaaacatcatcttttttgtaataaaagttaaaatattctcaatccctttttttgttcacaccaccaatcgcatgagaacctttgaccaaattagcaattcatcgccccgggggtgccggaatgaacgaatgaatccccccccccccggggcattctttttctcccatttttcatggcattcgccgccgtccccccgcgggtgccagtttactacggcaccaaagtcacgcaaatgcggcgcaggcgatggtggagtttcgctttcgtaaaataaaataaaaacaaaactttttcatattatttaataaatattttttggatttttaatttattaaataaattcaatgattggttgtcctttaaaaataatttacaaaattattttaaatttcaataataagataaattttttgcattattttcagactttttaaagtgttttatttattaaaaaaggcccaaaattaaagtaaatttgcttttaaactgatttctgttaattgatcataaatttaatcaaaattttttatattttcaaaattttggtttcctaaattcagccaaattaattttaaaaatgagaaaattctctttttttccattttaaatttaaaaagtgcactaaaatcccttcagaatttgtccccccanaatttcgagaggtaaaaatcgcatcattttcctcccatccgtcgccg

SEQ ID NO: 25765 - DNA, 1265 bp, Heterodera glycines
  unsure (1)..(1265): unsure at all n locations
attttatgaaaaaatctaaaatttttggcattttgtcccattatattaattttttactaaattaacctagaaatataaaattttcagtgaacatctgtaaaaaaggtcaaaaggtctaatttttctcccggcagcgccaatggctccgtccatcctccccccaaaaaaagaactcactttttttaagaaattgtcgcaaaaattttcttattttttggtgaaaatctgttaaaaaatctcacaatcaaatcttcaaaatttttacagcggcgcctattggcaccgccgtacccctccccctcaagttcccaaaagtctttttgaaaaaccgccgcaaacattccggtgaaaaatagatttgaagttaattaaccttttttaattttttttgttcaaatttttatgtgtactttgatttcataaatttcccacgttatgtacttggaaattggtattagcactgatctgagcccggattcgtgatcagcgacctcaaaaaccccttaaacttattttcattaatttctaaaacacatttattggcatctgaaagtgtatgtgaatctgccccgtaaactaaaaaagtaccattgtttttcgttcatttctgaccattaggcaaacccctaaaatctatccctagtaatgatataaaaaataattagcttacctatatgtattggaatttgattttgaaacaaacgaagcttttgaaatagcaggctaatagaaaattataaattgattcaattcggttttttcctcgaacagattttttcaattttgcatttatataaaaatttctatcaaaaatggcgaatgttgatttggcattggatgaaattatctcgaagtctcgccctcctcctcctcctcccgcaccacaacaaagaaactttggtggcaagcgaccatttcgaatgaatgctaccaatcgtcccgggttcggtcgacgcaattctttgggtggtggccaacgttttatgcgttccggaagtgacaatgttgtttggattaacatcgccaaccttcccgacactgtgcttactcaagaccttcaggtgcatttcccatatacctaaattacatttccattctgtctcatttaaggaacttttcgaagattacaatgtttttggaattggtgtgcattacgacgaatttggcgctcatatgggaactgctgatttatttgtggatactccgtcagcggagtcaatcattcgggattttntcaacgtggcaattgacgatgcgtgaaaatt

SEQ ID NO: 25766 - DNA, 1143 bp, Heterodera glycines
ggggggaccccccggaaaacaaaaaaaaatggatttttttcaagggtccgttgggggttcttcaacaattatggggaacaaaaatcttccttcgggggaacgtgccgggtaccgcggggtaagcagtgctggttcgtttcatcacggcaccgaaccttttggctagtcagcaatcgttgcttaacttgccagatcggacgggtgcgcaaaattccattttttccaagcaccccaccaaaagcaaaacgatataaccaaaatataaggaaaaattttttaaaaaattttttctccatcttcctttttgatactaaagcatcagattcctaaaattaagttgtaaataaaatttggcgcatcgctttagagcactttctgaaaaaaatatttatgaaacaaaaaaatcgattttttcaagtgtccgtttggggtactcaaacatttatggggagcaaaaatccaacgcagaattaaagtacaggctatagggaagctactcccgaaggattcggtctccccataaatctgggcgcatcggttcggggggactgccccgaaaacaaaaaaatcgattttttcaagtgtccgtttggggtactcaaacaattatggggagcaaaaatccaacgcagaattaaagtacaggctatagggaagctattcccgaaggattcggtctccccataaatctgggcgcatcggttcggggggactgccccgaaaacaaaaaaatcgattttttcaagtgtccgtttggggtactcaaacaattatggggagcaaaaatccaacgcagaattaaagtacaggctatagggaagctattcccgaaggattcggtctccccataaatctgggcgcatcggttcggggggactgccccgaaaacaaaaaaaatcgattttttcaagtgtccgtttggggtactcaaacaattatggggagcaaaaatccaacgcagaattaaagtacaggctatagggaagctattcccgaaggattcggtctccccataaatctgggcgcatcggttcggagggactgccccgaaaacaaaaaaaaactattttttcaagcgcccggttggggtactccgacaattatgggggagcaaaaataccaacgcagaattaaagtacaggc

SEQ ID NO: 25767 - DNA, 1558 bp, Heterodera glycines
ctatttcgggatttttcttcactaaaattcacgtccctattaattaataagattagaacaacaaaatgaaaaaatagaggtcataaataatattaaaattaacaaattctggcaatttttatctgattaagaagaaagaaaataatgtgccaccgcaaagtaaatttttaaaatggacttaattcataatcgagtgatttcttgatgattttttagaaatcttaatttttaggcactgttagacccccaattctcattattgactgcgtaggcccgaagagagtcgccctggttagctgacttttgcgccgcggacatttgcgccgctcattaaaaaatttataagattgacccaacaatttttctaaattagaatcgattgatattcaatcaataatcgcaaaatagggacgaaaaattaaaatctgtgcttttttcaaaattaaaatcgatgtaaataacttttcaacaattttaatgacaaaatacatacataaatttcatctttttttgaataaaaagcaaaaaatggtttgtttttcttacagaaaagataggggcgttaaatgaagaatttttgtgttaaaaatgtgtttctcttttctcattgattaaaagccgcagaaaaaaataactaaaaacctaaaaatccacctactcatcaattccaactattttttgagccgtgggaggtcaaaaatccgtgattaggactaattcaaacagtgtcagtctgtttagttgttattcttcttcatttttcatatctttgatgaacctaatcaatgttaagatttttaatgattaaaaattaaaaaaaatattgtctatctttaagactagtgattttttgaaaattttcaattcgttatttttgtcgttggtttttagaaaatcttattgatattagtgaaattgaaatgaaaatattatttttgactgagcggcgcaaatgtccatttttgctaggcggcgcaaatatccgcggcgcaaatgacgtggcgcaagtgtcgacttagctgagcggcgcaaatgtccaattttgctgtgcggcgcaaatgtcgcatcacaagtcgccctcccgccaattagtccacagaacattccacaaaaaattccaaatcgaaattttaccaacaatttgtgtcaaaaataagcaattataaagccaaaatatacgtattattgaacaaaatcaaatataaattagaatgatttcgtcaattttaaataagttcaccattttggtattttgaatgcaactatttatagattcaatagggggagataattagagatggacagatgaatggagacagggagattattttaagggtagtactttagatggtacccccctttttggaaaaaaaaattttttcttttcaaaaatcatgaaaagatgtttccaagggttttctggtccgctgattacgaatctggcatccatttcaaccaattcctatggacccgaattcgaacaaaaagtcgaaatttcagagttgtcgaatttctcatttttagtcaaaaaaatgtttaaacattttttaattgaagc

SEQ ID NO: 25768 - DNA, 1791 bp, Heterodera glycines
  unsure (1)..(1791): unsure at all n locations
aggggtttgaaaagtttattnttgaaaaaaagactttacaaaataatacccctgggagaagggagtgggaaacatgatttcaaaattttcaattttttatagtctaatctactcaaaacggttcagaattcaataaaaataacattcacggtgcgaaaaatggggtttgacaagtttattggggaaaaaaagactttacaaaataatacccctgggagaagggagtgggaaacatgatttcaaaatttttgttgaaatatttgtcgtgctctgaagggcgtgggaggggggggggcgaaggcccaccacgaggccgcgaagaggccgagtgagtaccttcggtgcaggaaaattattaaattttaaaaattttttaattgctttttaaatatgccaaaaaatgtaggcttaacttttttagtgaaaattcgatcactcatattttttgctaattgagcagaagcgtaccaaactatgcagggatactccccggtaaaggactaacttacactgaaatgagcgccgagctagctggctcaaaaaaatttttcgaaaatctgagtctttcgtttttatttattttttgcaaaattaattcataaatattttttcagaaagggttctgaaacgcaccaaattttatttacaagttaataaggctctctgatgctttttctatcaaaaagggagatgaataaaattttaaaaatttttaattcctttttaaacaggccaaaaaatttaggcttaactttttagtgaaagtttgatcactcatattttttgctaattgagcagaagcataccaaactttgcagggatactccccggtaaaggactaacttacactgaaatgagcgccgagctagcttgctcaaaaaatttttcgaaaatctgagtctttcgtttttatttattttttgcaaattaaattcttaaatatttttcagaaagggttctgaaacgcacccaaattttatttacatgttagtttaggcactctgatgctttttctatcaaaaagggagatgaataaaatttttaaaaatttttaattcctttttaaacaggccaaaaagtttaggcttagctttttttcagaaactgatcagaagcgcaccaaactttgcagggatactgaaaggaagagaaataacctattttaaatattatctagtcagttcatttaaataatttttatccaaaaaatttttttttgggttttcggggcagtccccctgaaccgatgcgcccagatttatggggagaccgaatccttcgggaatagcttccctatagtctgtactttaattctgcgttggatttttgctccccataaatgtttgagtaccccaaacggacacttgaaaaaatcgatttttttgttttcggggcagtccccccgaaccgatgcgcccagatttatggggagaccgaatccttcgggaatagcttccctatagtctgtactttaattctgcgttggatttttgctccccataaatgtttgagtaccccaaacggacacttgaaaaaatcgatttttttgttttcggggcagtccccccgaaccgatgcgcccagatttatggggagaccgaatccttcgggaatagcttccctatagcctgtactttaattctgcgttggatttttgctccccataaatgtttgagtaccccaaacggacacttgaaaaaatcgatttttttgttttcggggcagtccccccgaaccgatgcgcccagatattatggggagaccgaatccttccggaatagcttccctata

SEQ ID NO: 25769 - DNA, 1014 bp, Heterodera glycines
tttctttctttaacatttaaacttactttcatttaccgaaaaacattaatattatcttttaaaatattatatttttatttataattgataaatattttttaattaatttaaaaagaaatttaaatttattttaaaattcatggtcatatttcttgtgcaaaagtcaacaaaaaaaaaccacctttggggtgattttttatttgtttaaatattaaaatttgttgcaattattatcttgtaggttttatttatgtcctaatcattctacataaaaataaaatttagtttttttaataaactctttcttattaatagtatttgtttgtaattatcatgtaagaagcaataaataattgatttatttagcaattatttatttttattagaaatttgtaaatatttataaccgagactctcgaacttgcttaaaaatactcttagttaataataaatataaattttatttagtttttaataatttaaaattttttatttagtaaaatttaatccgttttttaataattcaaaaagcttttaattcttttcaattaaatcatatttctttttaataaatgaaagtttttttagacttcgctgaagtattatattttttaaatacaaaaatttgatcgaattatttaaagtattttatatttctgatttatgtaaaataattatttttgttcttgttaagcaaatcaattaatcaatacaaattatttcatttgtggaaaatgatttagtacttttattattttaatatatatttgttatttatttttttctcttatcattttttatattttaatttcatctcatgcttaggtcactcaccttgatttgtaaaatgggaggtatctatttgtttacgttttattaatatttattttcttttatttttattaaaatatctttatatgttgttaatttttcaatgataacaatggttccctgggggaatatttattctataattttcaattatttgcaataaaggttttaatttaaatttat

SEQ ID NO: 25770 - DNA, 2176 bp, Heterodera glycines
  unsure (1)..(2176): unsure at all n locations
aaaaaaagcgaaagcaaaatttcaaatccaattttttttattttttattctttcagacaaacattgtatggctgttttccccgtttttcccattgtttggcattctttgcgctctttacaccatgggaaaatgtcgctttatcaaactgccattttttggtagagtccggaacccccaaaaaagtttctcggaatcagtctcaaaaaagttccggaaccgaaaccccgatcccaataaattaattttctattattttttcgaagagttgtcgcctttggccccatgcccttttgtgtgctttgctcataaattttcaacggcggctccgttgtgctgggcgaccgttccgcgcatcgggtgaatttacatttaaatgccaaattaattttaatttattttttctaaattattttttatgtattaatttttatatttggcaaagttttgttttttgctgcaagacaaaattatttttatagcgtcatttaattaaattaaaagtgggagtgaacatattttgtttatcaatttttaatttttcgcaaatacattataagaattaataaatttaaattaaattcaaaaaatggaagtgtaaattttaatttttatatttacattttaaatcattttctatagtttaatttaaattaaaaattcgagaaacttttttaaactttctacatataaaaaaagtatttttcattcacttaaaatgattattaattaattttcagtatttctcttaagtaaaattatatttttctctttttaaattatttttcatttaatttatattanataaattattaatttattttcagtgtttcccttcttcgttttgctctccctgcagcactttttgttgctttttcattgttctcaattgtccatttgttcacacttgagcacccgtatttgctggcggacaatcgccacttcactttttacatttggcaacgcctttttcaacggcattggcttgtcaagtgattggaattattttttcggcatttttgccatcatttttttcccaaaggtatgccctcgtgccggcctatgccatttgtgccctgttcatttggcacacaatggaaacagacactgtgactaaagtggagcaaattatttttaatttttaattttattcgctaattggctcaataatttatgaaaaggccagagaatttctcgagttgagagtcgagcccagaaacagagtgtgatatttagggatcggatttttagtgataaaaaatcccaaaataattaactaaatagtgagaaaaaaattccaaaatagtggcaaaaatagtggcgaaaaagttccaaatttaggggtgtaattttttaaatagctgttttttaatttgaaaataatttaaaattaaggaaaaagattttattcactgattgcagttacaaaatattttcttagaaaatattgaacaagaaaaaaaaatttgggggaagaatttttgtgaaatttttccaattcttaggatgtatttttgaaaatttttaggtcgattcttaggggtgtatttttgaaaattttttaggtcgattcttggggtgtatttttgaaaattttttggtcgattcttaggggtgtatttttgaaaattttttaggtcgattcttggggtgtatttttcgtttttattgcattttttgggaaattttccaaaaaatgccaaaatagtggcaaaaataatgacgaaacgccaaaatagtggcaaaaaattattttagtggctaacttccgaaatagttttttttagtggcgaatttcgtgcatttctcgtcgagttaaagccgcagaaaaaatagttaaaaaactaagaatcagatccctatttatgagtccaacaaataaataatcctttatttttaatgccatataccagggatgggccaaattgaaaaataaaaagcgaaatgcgaaaagcgaaatttgcgaaactgaaaaatgcgaaatgaaaaaaaaagcgaaatgcgaaaagccaaaatatgcgaaaatgcgaaaagcgaaattttttctacaactttttaatagttaaaatcataaagcaaaaatcattttttaaaattttattccaaatttaaaaatcaataaaacgcttttttgaggcgcgctttttccaaaaaaactttttggtaagagggggcagg

SEQ ID NO: 25771 - DNA, 1400 bp, Heterodera glycines
ggagagccgcggaggaaataacaggagacttaaatttcatggattttcgtttgatccgagtagaattttttttctcaatagcgtccgttttattaatttttttttgtggaggacggagtttacattttttcccatgctcgtcgaatattcctctctctgttcccgtcccgtccctcattccttacccctcccccgtatttcgcgtaatctcccatattcccttacatgcccataaccctgtcaatctggcactaccggtgccaatcaatgccgcacctgtgccattagctactgcacgccttccacagctcagtcttcccattttttcgggcgaaccaatggaatggccagcattttggcagagtttcgagagtgccgtcgaccgtgccgcccttgagcccgtcgacaaactcaactatcttcacggttgcctacgcggtaaggctgctcgtgccgtaaccgcctaccgtggaggggagaattacgcccatgccgttgccgcactcaggcgactcttcggagatccacggaaaattgccgaagcacttcagtccgaactgatcaatctccggcctgtggacgatagcgttggatcactgcaacacttcctcgagactttggagcgtgtgtgccgccaacttttgaacctcaacatgccggatgacagcccattcatgtaccaaatcatccgcagcaaattgccgtcgactgttctgtccgaactcgtcaaaatggaacgtgcggcaggcattccatggggtactcctcagctcagagctggacttgccgaagttctcggagtcagagaagaggtcgaacggtgcctgcgcgaaaccaataccgacagacaaacacgatttcggcatgaagcaaggccaagtcgaccgcagcgaccagaacggcacgaaaatgcgcgtgttttttccgttgctcagtccgttgtgaattccggtgaaaagcgagtgccttcttgcctgttttgccctggtcagcactgggccgcagaatgcaacaaagtgacggatacagagaatcgaaagcgatgccttttgcaacagaaccgatgccttaattgcctacggaaggatcatcaactgaaggagtgccgatcaaaacaagggtgccgcatatgcaaggaacggcatcattcatccatctgccctagtgcaaaagggacatcttcggctcgccaaaaacaacctaagcccttgcacaagaacaaacagactttcggaaccgagcgtaactcaaggccattggtgtcatccgcggttgccaatgatgctgactcaatccctgagccgaaaattgttaacacaatcatggcaattgtctccccatccgttcctcatctcgtcatgatcatggccctccgagctcctgtgttctccgaatccgca

SEQ ID NO: 25772 - DNA, 1067 bp, Heterodera glycines
  unsure (1)..(1067): unsure at all n locations
tggttcgtttcatcacggcaccgaaccttttggctcgtttaaagtcgntgcttaacttgccagatcggacgggngcccttgattccactgttccaagcaccccaccaaaagcaaaacgatataaccaaaatataaggaaaaattttttctccatcttcctttttgatactaaagcatcagagtgctaaaattaagttgtaaataaaattttggtgcactttagagcactttctgaaaaaaatatttatgaaacaaaaaaatcgattttttcaagtgtccgtttggggtactcaaacatttatggggagcaaaaatccaacgcagaattaaagtacaggctatagggaagctattcccgagggattcggtctccccataaatctgggcgcatcggttcggggggaatgccccgaaaacaaaaaatcgattttttcaagtgtccgtttggggtactcaaacaattatggggagcaaaaatccaacgcagaattaaagtacaggctatagggaagctattcccgaaggattcggtctccccataaatctgggcgcatcggttcggggggactgccccgaaaacaaaaaaatcgattttttcaagtgtccgtttggggtactcaaacaattatggggagcaaaaatccaacgcagaattaaagtacaggctatagggaagctattcccgaaggattcggtctccccataaatctgggcgcatcggttcggggggactgccccgaaaacaaaaaaatcgattttttcaagtgtccgtttggggtactcaaacaattatggggagcaaaaatccaacgcagaattaaagtacagactatagggaagctattcccgaaggattcggtctccccataaatctgggcgcatcggttcggggggactgccccgaaaacaaaaaaatcgattttttcaagtgtccgtttggggtactcaaacatttatggggagcaaaaatccaacgcagaattaaagtacagactatagggaagatattcccgaaggattcggtctccccataaatctcgtagaagaggttcagggggactgccccg

SEQ ID NO: 25773 - DNA, 969 bp, Heterodera glycines
  unsure (1)..(969): unsure at all n locations
aaaattcgaaatttttttcaatttttttgaccctcgggattttggggtaaattttgaaaattcatatctggcctaaggtttgaccaattttgattaaataaagcattaaaaatggagaaaaatcaggagaattttatgggttttatttggatttttagcataaatatgaaaaaagttattccagaaattctggaaaaattcgaatttccagaaaaaaattcagaactcggttctgaaaagtcattcttgaaaagtaaaatactataaaaatccgcaatttttagctctattttataaattttatttcacatttttatcacttttttgaaaaatgttataaaaataaaagtgattttggaattcgggaccaaaggggggagcacatggtttttgagtgaaaaaattttttcgacaaaaatcttccaaaaatatgtctttaggggttatttgaggctgctgatcatgaatacgtaatcagtttttacttttgacatcgtttagacctcagaatccccgtgtgattggggattctggggcatcattttgagaaggggaggggcaagttcggatccgggcggtgtacattatttttctaccatttttttcgtgtttttcaatttttattcatttaaaatattttttgagttaataataaaaaattatatttaaattaatttttttttaatgaataaattttataagtttaaatgaattatttttttaattgatagaatttcatgtattttttaaattaaatttgttaaaaaatattttcattttaatttaatgaatttactaattactgttgtacctcttccaatcactgttgtacctcttctaatcattgttgtacctcttctaatcaatgttgtacctcttctaatcactgttgtacctcttctaatcactgttgtatctcttctaatcncagtgcacctcttctaatcactggtgtaccctctttaatca

SEQ ID NO: 25774 - DNA, 1128 bp, Heterodera glycines
ttttcccagcatgggcagaggggcgcggggaccaatggccatttatttttccagggaattttattattttttctctatgccagaaaaatgtctatcttttttttgtgagaaattttgtaacacacaaatgttcccagcacgggcagaggggcgcggagagcaatggccattctattctacagggaatttttaaatttattctctatgccagaaaaatggctatctcttttttgcgagaaattttgtaccatacaaatgttcccagcatgggcagaggggcgcggagagcaatggccattctattctacagggaatttttaaatttattctctatgccagaaaaatggctatctcttttttgcgagaaattttgtaccatacaaatgttcccagcatgggcagaggggcgcggagagcaatggccattctattctacagggaatttttaaatttattctctatgccagaaaaatggctatctcttttttgcgagaaattttgtaccatacaaatgttcccagcatgggcagaggggcgcggagagcaatggccattctattctacagggaatttttaaatttattctctatgccagaaaaatggctatctcttttttgcgagaaattttgtcccatacaaatgttcccagcatgggcagaggggcgcggagagcaatggccattctattctacagggaatttttaaatttattctctatgccagaaaaatggctatctcttttttgcgagaaattttgtaccatacaaatgttcccagcatgggcagaggggcgcggagagcaatggccattctattctacagggaatttttaaatttattctctatgccagaaaaatggctatctcttttttgcgagaaattttgtaccatacaaatgttcccagcatgggcagaggggcgcggagagcaatggccattctattctacagggaatttttaaatttattctctatgccagaaaaatggctatctcttttttgcgagaaattttgtaccatacaaatgttcccagcatgggcagaggggcgcggagagcaatgcccattctattctacagggaatttttaaaattattctctatgccaaaaaatggctatctcttttttg

SEQ ID NO: 25775 - DNA, 1172 bp, Heterodera glycines
tcaaaaaatagttgctaaatggattgaaagcttttaccccatgaaaaatataacctcataaaaaaattttcaactttttgttcgaattcgggtccggggttttgaattaggtaaaaccgggttaagactcgtaatcatcaccctcgaaaaccccttaaagttggtttctagcccaaaatttagaaaaatattttttaaaaattaattagggatcacaattctttaccattgccaaagataaacatttatcagaaattctgtgagccctcaaaaatccacagagttcaagtcatccgtatttgtttgacaaaaaatccgcaaagaataacaaaacaactttttgaatgttttttttttgttgttattataaacattatgccaaaattttatttaacaataaaaatgaagtaaactgaggaacaaatttagcctgtcaaaaagttgtagcttgtagtcataagaattttctgaataacaagttatggcacaactgtaagagcccttttgtggattgtgaaatgcatgcaatagagcccaagtttttaagatattttagcccctaatattcacatattatgcaatttttgtttaagtccattttattcaatcactttttttagcaacatatttgttttaatataagcagcaatggtggggagaattaaaaatgtgtattcgaaagtctacgatgtgccaagacgtccgttcgagaaagagcggcttgaccaggtttttttttgtttcattactgccacattcaccgtttgagttttgtatcagttatccagaattgcaaggcaatggattacccttttattttcattatttgtcgggcatttctctatgacagggtgtccgccactttagattaaaattggcatcagtttgtgttagccctaatttaatacaaaactcacaaaaaaagaaaacaaatttttgttcatggttgctttttaaacgtccgttagcggacccctttttaaaattaattcaaattgccccacaaagggttcaaattctttacatttaatagacttttaaatgttttcaacgttgtttgggtttggcggactaactttagcaaaattatgaggcaaaaacccagtttacatttagtttttccgctagcagtcgggaggtattcgctaatttgatacatttttccctacaat

SEQ ID NO: 25776 - DNA, 1345 bp, Heterodera glycines
ctagtttctactctatatagaataatgttgggtttcgtttctaaaaccaaaatctcgggaacgggcgccgggaggggcgcgggagtgtgacatcacttaaccaacttttgacggcgcatctgggaaaaatacgggttttccggtccggtggccaactgagcgccagcggcgctgaaacggcccattaaaacttttgtccgagtttgccggcctgtatctttgcgggaagaagcgggagcgaaaaatgcttggagaaagggcactgcaccgaacaatttccaacatttttcgtctccaacacgttcccgtacgactaacggtattcacggtatgcttgacagaaaattgtatggtcaaaaaccggttttttgaatttcgggaataactcgctgggggttaagcggagcgggttggcgccgcttgagcatttgtgtagtttttaaagctgcatccgatggcgttttcagattttgaaaattttcaaaatttttcgagctaggccccctcgaaaatttttcgtttttgaattttattattttttgccgatttttcccaggaaaacggagaccacttgcaagcaaccgtttttcgagctctatcgattggtggcatttttgaaaaaatttcaaaattttccggaaatagaaaaattttccggaattgagctccccatttccgttcaaggcttataactcgtcaggcgttgattttagcgaaaatttgtcttagagcatttttgtagagaattttaagctctatctaatgtgctttatttggtctttttatctttaatataaaaaaagttataaaactaaaatgaatttttaaatgcaaaaccaaaggggggaccccatggatttgcatttcatgagaaatttttttgctcctaaaattgccaaaaaatacttttctggggtaatttgaggtgctgaacacgaatatgcactttatattgcgttttgaattttttggagggtggtaaaaaaattttgaaaaatcaataatttttggcccttgaaaattcaacctaaattttaaaaattcataactcgcctcaaaattgtccaattcagctcatttaaagcattaaaaatcgagaaaaatagggagaattttatgagatttatttgaaatttataccacaaaaacaaaaaaagttattccagaaattctggaaattttctatttttcagaaaaaaatttatatctcggttctgaaaagtcattagagaagagtaaaatactataaaaatccgcaattttttgctctattatataaattttatttgacctttttatcatcttttaaaataaagatacaaaaataaaagtgatttggcattcg

SEQ ID NO: 25777 - DNA, 2741 bp, Heterodera glycines
  unsure (1)..(2741): unsure at all n locations
gaagaaaaaaatcgtgatagagccttaaacatggccgggattgagtccgtttttgcattatcccaaatggcacttctccaaactttgaagccctgattgggcaacgaattggagatttccttctgcgtgaactcggcaaatgtcagaaagccgatcaggccgaacagcgccttgaaaacggcagcagcgctgtgggacagtgccaacatcggcttgaactcgtcggcatccttttttgggttggggtaaggagaagtgatatccggcattaaaacatggacggacggacctgcatggagccctcgagagcgggcaaaaagatgtgtgaggtgtagccgaacacgacggtgccgatcggaaattgggggcaattaattaattagtggatagggaggggaattagagtcgatccgtttctttggcgccaccatttttaaagtggtttaatcttttttgatttacccgtccaaaaaaggggcgcgatgtaaaacagacaataatcttaactaattttccggctaatagagttagttaagcgctttcaaattttattaggtttatttaatatagttgataagggaagaaagtattcatttggcgccaaaacggccgactttctctcccccaattaataatcggtcaaagagtaaaaggaaaagccgggggtgacaagcccatgtcagattaagctataagattttacctatgaccatacaactttctctgatcattatgtgattgtgtcgaaattcaattccccttttaatcaccacagtggggaagaggcgaaagtttggcacaattggcagtgaggagaagcgccactcagaaaactgtgagaagcggacgggggggggaagtgattaaatagcagagccaccagcaaaacacctgactcagacagtagaacaccttgaacaggttgggttgacattattacatgatgatggcattatcgcaaaaaacagtgtaccatgatgccgttgatgaccaaatgggagacagcatttgccatggaaagattggacaccacgcgcaggtcgtccaaaaaggcggtggccagaagcacaacggtggtcagcatcatccaagcaggacgatctgagggaaaagcattggatgaacaaagtgatcagagcgaatgccaatgagtgaaaaaaacccagtcggtcgagagtttcgaccaaaattttaaattgttttttctttcgggtttttagagcagttttcggccttagttttgaccggacactatcaatcgggcttgtattttgtcacatgtttgatcaattctcggcataatttgtttggtatgccactaattgttagccaattaagtgcccccccccccatatttggcctgatcatttggtcacagactgtcccttacagatttgatcaacaacaaaaaatgggaaaagcaaacgcaccgacactcgggaagcagccttggagcaggtccccggccagtacaatgtacagaatgcaacttaatttgttggatacttaggttgttgcacatcggtgtggcaaaaagataggtaaaagaattggcaaattttaaaaaagtgccaaaaatggggggaagtttttttaaatgtcctattaattattcattttgcgtttcgtctgcttacgtgctcgcaagttcggtcagctgcgcgatgagtacaaatttgccaagccccggtcgcaccgcctcggccacttcccgataactgaatttttagggatttcagtgtcgtttctgggcaactctgttctcttaggtaaaaatagactctcgaacatctccagcaggnatggcattccgaggcacaaaatttttggaaaatcggaattctgtgccatcccctgatctccagtgccttctgctactgcccaacgtttcacctccgtctcacttttcgtcgcctctttattttctgctgtgatgagtgatcagtgccatcagtcgggcagtcctcgtaaaggcactcgatcagaatcagaccctggcaaaatgataagcaaatgaacggtagaatatttgggactgggaccgatggagaaaagtgccaggtttttgccttcggtaacaaaaaactaagccgataggtgtccaggtaaaagtgatcagaatcatcagacgctacccgacggcaaatcaacaaaaaagtactaacagtgcggtagcaaatccaggcaacgccggtcagcgcgagaatggcacaccatccgccaattttgacggcaaacggcagcccgacgatgaacatgcctggcatacagttcttatactgctccaccaacagcccaaaaagggcacatagaaaatgcgtcagtatttctaattaaaaatttgcctaaattttctaaaatctcaaaaaagggagatactgtaacgggttacggtagatttattttttatttattttccttttgcactgataaattttttgttggtcaagaaaaaagtgagaagatgcttttctcaaaaattaccttgaatggcatttgtcacattcctgcaaaaataaataaacaattaataaatgagataaaatgaattttccaacgcaattttctgcgttttgactcaattaatcttttaactgatttttggtctcggttctcgcattaaaacaaaaacggatctgctgatctattgcagttacagcatattgttttgattcggcgattttcacaaaaatttttccaagtctgagttccactcaaaagcttttcacaagatcaattag

SEQ ID NO: 25778 - DNA, 1570 bp, Heterodera glycines
gcaattaaacaattaaattaattattatttaaactcttttataattattaatgcacctgtagtcaaactgttgcattgccgtccatgttctgagtaagaaacgatgcgtcggtcggtgcccgctgccaaaatgccaacggcggacaacaaaagcgcctggggggcacacggatggacacaaacctgacttttcaatgattaaattttacccttttttcaaattaattaccctggcatgggagcgcgtttcgaaggagtacaaaaatatagtgccatcagaatgacccgacaaaaaactctttcgattggggctgaacatttgaagggtttttttatattttaattgtaaaatggttactgttgggccaatacagtaaccgctgtttctgcccgatacaaagttgaacatttgttggaagaagcggacgcacaacggacttttccgtccaataaacttattgcaaaattgcagatttaaaacctattaattcaccccgattgatcacccaatgatcaatttgctctcggttggccaacattgtgccattacggcgctggactgtgcaaatttgttgcagatcactttcttctcattcctggaatatgcatttttgcataaaattcaacaatttcaagttaatttgccaagtgtctccgagccgatagacaaaaacgatgtgatcagtttgaccaacggccaatttggcggagtcgggcgagaacaccgcgcatttgatcagataactcattttgccgaactgagaaaaacaaaaaacaaataaaaattcaataattgcccataaaatgttcggcttactaaatgctaacaaagaaaaagcttaacaccttcggttccattggttttgtgccgaatttgtcgcgccggcggaatttgtcgtcgaacagcaaaatgtgtctgtccggcgttccaaccgccaacttccgaccatttggtgaatagcacaaagcaccggcacacgaaatttcatcctaaaaaacaaataaaaataattttaaataatttaaaataactttttaccgatgcactgactacactgctcaaatattttaatcgcattaagcaaaaaaataaataatataaagagtaatcactttgcttttgctttagcccctttcaattcattcattggtaaccattggcaaccaaagaaaatcgaaaagctgctgctaaaggacagagaaatataaattaaaagtagagtgccacgggaccggtacctggtagcggacaactgagtacaactgagtaccaaggtcccggttttgaccgggaccggaactagtcccggttttttcccggctttcccagccaaaaattcccggattttcaacccgaaaaggtccctgtcccggctttgcccacaattcccgttgcagtggcactctaactaaaagtattaaatgaaattattgaacaattatgaagcctaatttcatattgaaagtatttgctcgaaatatctaaaattttccatataagtggttcttctatattatccaatttcagatggtacagaatacgttgtaaaagacgtagaatgtactgaaa

SEQ ID NO: 25779 - DNA, 1011 bp, Heterodera glycines
gtcatttttattggtagtccacagtcggaattatttaccgtacgtcgcctaaaatattccaatagaaaactgaagattcaataaatttgagagttcaaaaaatattttcgaatatttctccttagcggtcattttatttggtagtccacagtcggaattatttacggtacgtcgcctaaaatattccaatagaaaactgaagattcaataaatttgagagttcaaaaaatattttcgaacatttctccttagcggtcattttatttggtagtccacagtcggaattatttccgataggtcgtcgaaaatattccaatagaaaactgaagattcaataaatttgagagttcaagaaatattttcgaatatttctccttagcggtcattttatttggtagtccacagtcggaattatttacgggacgtcgcctaaaatattccaatagaaaactgaagatttaataaatttgagagttcaagaaatattttcaaatatttctccttagcggtcattttatttggtagtccacagtcggaattatttccaataggtcgtctaaaatattccaatagaaaactgaagattcataaatttgagggttcaagaaatattttcaaatatttctccttagcggtcattttatttggtagtccacagtcggaattatttacggtacgtcgcctaaaatattccaatagaaaactgaagattcaataaatttgagagttcaaaaaatattttcgaacatttctccttagcggtcgttttatttggtagtccacagtcggaattatttacgggacgtcgcctaaaatattccaatagaaaactgaagatttaataaatttgagagttcaagaaatattttcaaatatttctccttagcggtcattttatttggtagtccacagtcggaattatttccaataggtcgtctaaaatattccaatagaaaactgaagattcataaatttgagggttcaagaaatattttcaaatatttctcctta

SEQ ID NO: 25780 - DNA, 2249 bp, Heterodera glycines
gtggggtcggcaggcggacaaaaaaattttgcaaaatgatttaaaaaaagaaaatgacccttgcctggcaaaaatatttcttttccgttccaatgtttcgtccaaaaacagccttttgcgtggtgttcgggtcaaccacagtcagcgacaggttgtcaaaaaagccaatttcgacggcctttgccagtgacattggttcgcgcattccgtgcaaatgcaccgtcccgttttccgtgttcaaaatcctttcaacaatcgcctttccgacgttgtaaccatgtaatgtcacttcgatggtgccattgttttcgttgtaagcgcccatcaccgcctaaacgaaaaaaatggtataaaaactaacataacctatgcaaatttttaaatttagaccatttcaaaagtttcacatttggcctcttttaaaaaagcacccgacaaactggtaatgccatttttaatcctggccaggtttatgcaattattcctttcttaattcgggccctggctttggcaattcaagggcatcttttgttcttattattttctttacaaactttgtgtccatttcctcgctctttttgttcgtttggcgccttgccagtcgtttctcccttattttaataaaaaatgatcaaattagaaggaaaaaacgcatgtttacaaaaaattcacccgacaaaatgtaattcgatatttaaaacaaatatgtaaattgatgtttgggcaaactacgacaccggagataccctaacaaaaaaccattgtactcgtaataaaaaacattttgttggaaaactacaatttaatacttgactgtgtaaattggcatttagcattccaactcataaagcagaaaaaaatactaaaaaccaaaatgataatgtttgagaaaacccatgaatttatttatcggttcttccgaaaacaaaccatttttttctcaatcgtctccactttcgccgagagattgttaacgacgcccgatagattgttgacgacgcccgatagattgtccagtttcaccgagtgattgttgacgacgcccgatagattgtccactttcgccgagagattgttgacgatcgccgagaaactcatcaaatcggttagcagttgcttagaaaaagcggcgctagttacaagaaaaattcaaaaaggtccttcttgtaactagcgccgaaaaagcttcttctcatcaatagctttcgaatgataccaagatttcaaattttttgccagttgctaaaaacctttacaggagctctttttcgggatggtgtggtaagtgagggacccacgcgtttcggcgccagctcgtttttccacttaagcttttttctttggcatccaaatccaacaattttggtatcattcgaaagctcttaacatgctctattagccttatcaaaaacgaaaagtttttcaagcctgtaaaaattttattaagaaaaaacttcaaaaatttcgacttttcgcaattttcatgcataactgttttgataattgtctaatcgcaaagcaatagcttagaaaaagcttctaaatagattaagctttcgaacgacaccaacaatgttggatttggtttacaaagaaaaaagttatagccaaaaacatgctggcgccgaaacgggagcgccgaaacgcagtggaccccgcagaatccactttaaattcatgaacataatgccaaaaagaaaagttctggatttttcttttctcagtgcagtgtacccacagtgttctttttttgtagtttataaatccaaattttttctttactcaatcacttttgtgaatctacctaaaattgtaaagcaaattccttccagtttttcggatgagccgcttctccctgtccattcatgttccttttcaaacaaatgatttataactgaactttccctccccactttcgttgcactttttatgaaattttctttgctcttcatttgttaagttcatttctcaccccattccaatcgcaatccccagaaaagaaatattcgctccctttttccctcatttgctcccagtctctctctttctctgtctttgcgtacgcacgtccttgtgtggtgaggacatgccgagagttagcatagcatgtcgttaggtgaatgagttgagactgaacataagttccgttcgctctccgtcgcttttctatgtccctctctttttcgatttttcaatcctattttcaaatgtgtatttacattcaatccattctcctcccatttttctct

SEQ ID NO: 25781 - DNA, 1144 bp, Heterodera glycines
cattgcccttttgccgaattctgaattagattcagttctttattttagcccacagtttggacgcaatttcgaattccggcttttttgtgcccgaaattttgggttactataaatattctcaaaaaattttctggctgtcatatcaaattttaatttttaatccagattaaaaattacttactttttatttcacaccctaataaccaaagaaatctctctccattccctccctattttgcaaaccaaccaaattggcatgtgccgaacaactttggaccaggctcattgtccgtctgttcacttcctcacatttcaacaagtgtgacgagctcatgatgatccgctcaatttcgtcttcttcttcgtcggtttcccttttctgtccattttcacactcttcctcttcttcttcttcctcttccgtttcttcttccttttccttttcctctccatttccttcttccgttacctcttcttctgttttctcttcttcctctttcgtctcttcttccttttcctcttccttttccttttcctcttccttttcctcttccttttcctcttcgttttcttctttttcctttcccccgtcttttgtcagttcatccatttttaatttatcacttccattgccaaatacttcttttaaatttaaaaaatttggagctggagagtttaccatttctaaaatgaattatatgtatatacataatgtaaatattcaaaaatgcggaagaagcgcgggaggagagggagggcgggggaggtgaaggatgggatataatccgaggatgtgcttcttcagtgcatgtgccgttggtgaagccaatttttggccggtgatttattgactggcatggaatgaaagagcagaaacggaagaatgggcaaaaataatataaaaagaggaaaaagaaagggggagaaaagcattggaggaaacagtgacaaagagggaaagggggaaaaagaggaaaaagggggaaaagaggaaaaaaggggggggggggggaagggcactccccgcgggcattggccttagggaaatgagagaaatgaaaaatgggtaatgccttcagcaaagtgacggtcgacgaccgacgagcagcaacaggagaagaggaaaagcggggggggggggggg

SEQ ID NO: 25782 - DNA, 2468 bp, Heterodera glycines
tggtcgtaaatttataattatttatttatgttattttattttaattacatataattgcaaatgtgcgtgttgattccgtctttgtaactgtccaatgccgaattgccaaacgcattggaataagtgccgagaatagcctaaataaatgaaaataaactcacaattaattaaaagagtgtctccgattatgcccacatttaggcaagttatttaacatggtttagcaaaaagaattgaaagaacttatgaatttttcaccatttaggtttttggcaagttataataaagcaaaatggtaaaattgggagggaatcgaaccctcgaaatattttctataaattaaaataaattgaataaagttataccatttttcatcgcaaatttcatccaaaatttgtgaaaattttcccggcggtgccttcgatccaccggaccataattatattatcaaatgctctattaaactgaaccctaaattattaaaatccccaattctgatttagaacctgtttaagaatttgacccatataaaccgccaaatcattagggccaaattggcgaccatcaggacaagtaatcacataggccgaggttgtcgccaaaatggtggttgttgtagggggaggaggcgaaagagtcgtagttggaggaggaggaggcggaagagttgtcgttggaggcggaggaggcggaagagtcgtcgttggaggcggaggaggcggaagagttgtagttggaggaggaggaggcggaagagtcgtcgttggaggcggaggattcatcggatcgtatgggtaattgcaaaaattgcggtcgcagatgcactcctgatcatcatacggatcattcactttttggcactggatagcctttggatcttcccaggatgtggcacagaatgagcgaggatactgagactttcctaaacaaattcatttagctttaagcccccccccccctcccttccctaagtcagtttcgtttgtgcccttctcttcccccgtccttctcctcccaatcacttacgagtgacacaatatttgccagtacaatatttgcttccatcacagatcacattgaatggtgcgagtgatctgctcccatccatgttcagcacatacggagttccgcattcgaagcaagtcatattgcccggctcttccggcttcacaattttgcttagagtactgaatgttgctaattttgctcttgaacaattccaattgccctccccccactttttcaacctgttcagtgctaacagaaagcctggattattcggcgtgttgcaaaaatttgtgccacaccggcaaaaggtcggaacatttgccgaacagtacgggtcgggggaggaggggatggaaacagtcgacgagggagagttaggcgaagtacagcccgaccgccaactgttgtcagtgccaatgacttgaaaacacagtgaaacacagcccagccgtggatttattttgctaattgaactcactcagaaagcatgagccattgccaacgcaaacattctgaaaactcagcgtggacccatttgtgagggctgtgccgaagcccaagtaacagtaaacattggcactatttacgatgggaattatggccaaaagtgcaagaaatgccaaccaaaattggtttggcattttcgtttccttaaatacgataaaattgatcaatcaacgggggatttatcggtgcatttccgatcagaattacggtaaaagtgccgctagacttatttccgcattgaatgtttttttcttcgatttttgcttttgtcatgtgacctttttgcgcgcattaaccgtttcggtggaaatttcgctcgcatttcgcgctgtctcttctgctgatgagtgataatcctccacaaattggtctatttgcccccccccccctccgcccaatttgtcggattggccaattaaagggcaaaaattgcgagaaatttaatataataaaaaaaggtaaaacgaaacaaaaaaaacaaatcatttgctgcttaaacatttgtatgtgaaagaaaagtgctctctccacggctccaccatcacgcgactccatctttcggactcacagcgacagaaaatgactgtgtcgttgacgccggagaaagagtcgaattctgaaaatgccactgacaatttcagagcaaaaaggacaccgaagtgatcagactttgtctgtccaacgttccgatcactcgggccaatgacctcgcccctttgcacttcgacttgaacacctcggccaacggcctgcagaaagcgactcgaatttgaggactgaatttgacggtcctttcagtgtcgaaactacactgatcattctctgaattgaaaatgaaaggattgagcagcgaaaaagtgaaacgaacggagaatttctgatcaaatttaattttaaacgaaataaaaaggagaaacggttgccaagaagcgatcgctttttaatttcattaa

SEQ ID NO: 25783 - DNA, 1879 bp, Heterodera glycines
  unsure (1)..(1879): unsure at all n locations
tatgcctaggctaggcttaggctttcttttgcagaatttattattgtacgagtcgcccaatgttcgagttgccattgattccaaaattataaggacacttttttaaagaaacataataaaaaatcaggtaaatgtttctttatatgaagattaaaaaaaacttatacaacaacataatcatatagttccttcagagtgtaccgactatcaaaaaattcatatacacataattttttctaaatttagggtaaaatataccaaattactccaaaaaagttaaatttaagttaaaatctcggaaatagatggtttgaaaaaacaaaacaaagctaaaataacttattttaaagaaagatgacttaaaaaattaataatttaccttgctggattatttctggtacaccaaatccacgcattaattatgcatataaatcgcgaaaaatgttccaaaatatacaaaatcatatggaatttcattctaaaataacaaaccaagcaggtaaaaggtttttttcgtgcgtttccgtccttccacagttaagattgacaaccccctccccaattatgacaattttccttaattttttttcttgactttatgatttggttacaaattgtgcatattcgttaaaacaaaatgtttctcacttttgcatttgattgacagaaattttaaagtaaaacaaaaaatggcggcggagtcattgttcaacaaaattggacggaatgcgaacttttaagaaaaaatataaaataatttattaattgacttttgttacaatttaccatcataataatattcattagcaactgtcaaatttatcagtgatttcaatgccattgttacaagctgtggcatcccaataatttcctcgcaaagttaaaagcgtctttaaatttgtttatgtaaattaatttaaaatattattttttttttaaattaaatattcttaaagattacattcaggtaatttattggcttttcgttaatagaaaaattttttgaggttttattttactttgttttaggattttttaatgttaatagttttttttttttgcttttaattaattaatttttcaatttacacatccccattatttttcacaccattttaatctgttgtttattcattttcttttccaattcagtgatttttccaaaaagttgttcttgcttctgctgatcatttttcatttgagtgaatgtgtcgacggaaacttataaaatgaatttaaataatttaaattgattttgaaaaaatcttgaattaattctaatacgcagcgactaaactttcatttattttctgttgttcattggtaaattgttcgaagtgtggtgttataaaaatcgcaagtacttgtcaaaatgcacttcgtagtcaaaagtcgttttatatattctacataaatttgacactatgccaaaaaatgatttatgaaccataaaaaaaaattgtcactgtcccaaatacagaacatcccttaatgaagatgaattggaaaatgaaatgaattctttttttattattttaaagctttcgcatgagagacattagaaaatatttctcgtttaatatactgtcgatgcccttgatcaagaatatgacattcattttgattaatttcgaattctggaggcaatttgaaaagtcaatacaggaatcaaaaattttgaaattataatagaattcaagggatgttgcgagaagaaaaatcaaaaacgaaaacgaggacgagacgccctaaaaacacgagaaaaagagatgaaaattttttttacttaataattaatcaaaaattttaacaaaagaatattttttccaaaagaaaaaacttaagcagattaantataatgattttttcaagcgaaaaa

SEQ ID NO: 25784 - DNA, 1738 bp, Heterodera glycines
ttttttggatataggcctggatgggaaatttttttaacccaaaaaatatgtaaggatagtttctattctattaaaaaataagcgtttttggaaaagactaattccaaaaattcgggggaatttaatcggtgggtggccccatgtcacctatttggtcattaccacccctttttagaaaagttgacaactccgagtcctttttaagttgttgactcgatttgttggcacagaatggcaaaaattaaaatgtcatagttttgggccccttaccaatcgttccaacggtgaccgcctgcaaaattgtccatccgctgagcagaaaataattgagggggacagaacgagcatagacaaacatagcgaaaagaagggcaattgagccgaagaaagaagcgaacggaaaccatggcctaaaagtggagaagcatttgacaaaaggacgaggaaagcgtaagaaaaaagaaaaagtgagtgaccaattagagagatttcggaaacccacaaaaccaaaaaatggggaaaaccaatcaaaatttgagaaaactttaattcaagagtaaaacactaaaaatcgtaaaaataaacccgtttaaaatgcgtattttttgaccgattcaaaatacctatgagtttttttaaatgtttaatttttgtatttttcccatttgttcggtgtaacaattggaagctcttacaattccattataataaagtgtttttatacgaactgttgttggatgaacactttgactccgtccgttatgtaaaaggcgactccgagtccaattgtggccagaaattggaaggccaaaatgccaaggactttgcgcagaaaagcttaaattacttcatttcattatgttttaatattctattaattattagattgtttaaaaagaaaatgagtgacgaaaaattaaaaaaaaagggaaggaattgtaccaagacgaatgtgcagctgtgccatggccaccgaattgttttggtcaatatttcgcaaatgcttggacaatattccatcgatcattcctcccccttcgccgttcgttcgccccttccccaaatcactccaaaaatggtcgacgcctccacggacatcgattcgggatttattggaagccgaattttgaccaatggacggtttttgttgatcattgacgacttcttcatagctgggcaagttctgttctgcctcattgtcctggtcagacaaaagagggacggcgtgggaaggatgggacattcagtccgactctaacaaataatataaaggtgaaagtaatgttttattttgaatttctaaattatcttcctatatactaaagtttggtgtttgtgtgtacatatgtgcactatgggtacgccccagtgtcagacaaaattgctcataacgccaaatagcgcatttggcgtaaatttttgcccgctatttcaaaatttacactgaaaaatgccttttttgtattttttatttgatctgctataactcgtttcattcccacctaaactgaacaaatttggtatctaaaaaaagtttttgaaaaggagaatctgagaatctttttctaagcgaatgctaagcaatttgacatcccagaaaaaagttgtgatattttcaaatttttatcccgttataactcaagtcctaaactgctgttttcagcaaaaatgctaaaactattaatttctctatgattgagaaggtccaaagtgattttttatccatatacctaaaatt

SEQ ID NO: 25785 - DNA, 1312 bp, Heterodera glycines
ttgcggattttttgagtatattatttttataaatacttttcagaagggagttaggatttttttctgaaaaatcgaaaaatttccagaaattctggaataacttttttatttggaagatagaaattccaaataaatctcataaaattctcctaattttttgctatttttcaaactttattccactaaatttgatcaaaaacgaagagatttatgaattttcgaaatttcacaggattttccggggctcaaattttgacgatttttcaaaaaattttaaccaccttccaaaaagtctgaaacacaaaataaagcgtatatacgtattcagcacctcaaattatgccataaaaatgcattttggctaatttaggagcaaaaaattttttcatgaaatgcaaaaccatggggtcccccctatggttttgagttttaaaatcacaattaattttataactttttttatactcatgttaaaaatatgggataaaacacattggatagagcttaaaattctctacaaaaatgctcttgcaagatttttggctaaaatcaactcccgacgagttataggcccgggactgaaatgtcccggtcagagcaaaaaatttttctatttccggaaaaaaaccaaaatttttctgaaaatgtcaccaatcgatagagctcgaaaaactatgttttggaagtggtctccgtttttcctggaaaattcgttaaaaaatcagaaaattaaaaaaccaaaaaaccgttttttaggcctagctcgaaaatttctgaaaattttaaaaatccaaaaacacggttggatagagctcaaaaaattacacataatcattttctatgtgcactggatataagcaaatcccgcagagttattcccgaaaaacgaaattccggttttcgagttggcaatttttgctcacttgtacacggaatacggttagtcgtagcaaaaaatgatcaacaccaattttgtagaggacacttgtgcggagtgccctcccagcggacatttttcgatcagaccaaaacccatagttttacaggctcttgaaaaaagcaaaaagccatttcagcgccgctggcgctcagttggccgccggaccggaatgcctatagttttcctgaatgcgccgtcaaaagttacccctgcatgccaaatttcagctccccccgattagcggttccggagatttttgttttagcaacgaaacacgatttgattttatagtatataaactagcgggtgcgtgaaccgtcggctatttagctgggaaaaagcgcttcgcgctttgggagcttcgctacctag

SEQ ID NO: 25786 - DNA, 1542 bp, Heterodera glycines
ttcagaaccattttcccctttttttcaataatcgtaggaaaaaacggctttttttttttttcggacacttttttgaaaattttttccgaaaagagattttgtgacacgcaatacaactaacattcgagggttctgtcatttcctttttataatgcgtatataatttaggctatttgattttatcagcaaattccgaaattagcttgggaatgggcccttttgaggccaacctttttttatgaatgttgtcccattttactttgtggtctgcggcctatggacgcttcagaggcatttacgccttcttttcaatattcgtatgtaaaaacgactatctctttttttcggaacacttttttgaaaattgtttccggaagagattttgtgacacgcaatataactaacattcgaggcttctgtcatttcctttttataatgcgtatataatttaggctatttgattttatcagcaaattccgaaattagcttgggaatgtcccttttgaggccaacctttttttatgaatgttgtcccattttacgttgtggtctgcggcctatggatgattcagagccatttacgccttcttttcaatattagtatgtaaaaacgactatctctttttttcggaacacttttttgaaaattttttcaggaagagattttgtgacacgcaatataactaacattcgaggcttctgtcatttcctttttataatgcgtatatagttgtggtctccggactatggacgcttcagagccatttacgccttcttttcaataatcgatgtaaaaacgactatctctttttttcggaacacttttttgaaaattttttccgaaagagattttgtgacacgcaatacaactaacattcgaggcttctgtcatttcctttttataatgcgtatataatttaggctatttgattttatcagcaaattccgaaattagcttgggaatggcccttttgaggccaaccttttttttatgaatgttgtcccattttacgttgtggtctccggcctatggacgcttcagagccatttacgccttcttttcaataatcgtatgtaaaaacgattcagagccatttacgccttcttttcaataatcgtatgtaaaaacgactatctctttttttcggaacacttttttgaaaatttttttaggaaagagattttgtgacacgcaatataactaacattcgaggcttctgtcatttcctttttataatgcgtatataatttaggctatttgattttatcagcaaattccgaaattagcttgggaatgggcccttttgaggccaacctttttttatgaatgttgtcccattttactttgtggtctgcggcctatggacgcttcagagccatttacgccttcttttcaatattcgtatgtaaaaacgattcagagccatttcttcttttcaatatgtaaaaacgaatctctttttttcggaacacttttttgaaaattttttccgaaagagattttgtgacacgcaataactaacattcgaggcttctgtcatt

SEQ ID NO: 25787 - DNA, 2230 bp, Heterodera glycines
gaatgaatgaatgatttgtcatttgtaaaattaaaatgtcggacaacaaaaaaatcgaaaggaaccaattaattacaaaatgaagtaattaataacacagagagagagaaagaccaacgctaattaaggcgtctttcttccaccgattagtttatctctccgattccaattaaatgcctttcctcttccgctgaaatttatttaaaaattgaacttcctaattatttaatgccttccctaagtttaattaacaactgaaagattttcaacaaaatctttttgcacagtatgtgcccttacagtactcacctccattttgtacggtcgctccacaaattgtttgttgtcgttttccaacaatttcttcagttttctcattttggccttcactttgtcgctttttcccgtgtttttctccaattctttggtcactttttcaatttcttccaccgttttgcaaatttcctctttttttggcgtgtcaattgtcagcacaattcccatcgctttgcatccaatttctttgattttgtccactcttttctccaattgttcactcagttcctctgagttttcttggtcgtcaattaggctaatgagtttgctaatttcgggttccaaccgtttaatcagttcttccatttgttggcctgcgattttcttcaacggttttatcaattcatttgctaaccgaaacaattcttccgctttttgcagatagtccttctgtaaaaaatttaaaaaattattacgtagatttatttcctaattgcgcttatgcttaccatagtttggtccgattcatttgcccaatatgaatttgtttgccccgcctggcttaattcggcatggaaatcgagcataaatgtggccaattcgatgtctccaattttggcattttcgaacatttcccttttggtgggcaattccttggccaaaatgctcaattttgtgtccattatgcgatttttcaaaatctgcttgattcttatcaccgccccgtcttttcctttttcacggcttccaattctttttttgccatttccaaatatttcacctcacaaaatgtttcatttttctttataaattcgatgagattgcccaatgtttgctcaatttcatttttatttttcacggacatttgatcaaccaaatacgcctcaacttcaaccaccaaagtgtcaaattgccttccaaactcattaatgattgcccgcatggacgacagcaattcggcgttactaaagacgggaaaaggtcaaatttggcatcgctttccgccggcgttaggccgtggaaaattttaacgcagaaatcctacaaaataagaatgccaacattaggaaaaaagaaaaaactatgccagtttttgatttattccttttttgttgtcttaaagtaggatgggtccagcagcagtattacgtttagttttatacgttactaagcccctttaactgaactgtttgccaaaatggatggcatttgctcgcttcgctggcccccacaagcggcggttgcattttgccttcagttcgtttatcggaaatttggcaacaattcccggtaatttgctcactttgatattcattcttagaaggtatttctggtccaattgcactttttgaatttcttcgattatttcttggctttgtgttttccattcttcccatttttcccattcttcgtcccttgtcgaaacggaaaatttgaacgatgaaaatgaaaaaattaaaatgttaaaaaaggtaaataaaaactgtttcatatttatttttatgcttaagaataggtaaaatgtaactttgttttgctcattcgttcaaaaaatgagcaatgattattctttgaattcgtaattgtaattttatagaatggatttaagtaaaatcaatttaagcgagaaaaaaaggcttttcatttatgacgtccataattttttcattttgcttaatatgaatgcctaattttattaatcatatgcatcagggatgttgcaagtttaccccaggctcaaaatatcccaaaagttaaaaaaacaaaacgacccaattctcaattcttaaacttaaaaataaatttttattagatgagctgagaaagaaaagaagaaaacataaacattgaaatgaacaaattccaaagggaataatgctcgaatgatctcaatggtgctgggacgttagtcaaaaaccaacaaaatgggcgttagtcaaaaaaccatcaaatg

SEQ ID NO: 25788 - DNA, 2251 bp, Heterodera glycines
tgtaaaggaatttattcaaatcagccttctcccgacaattggtaaaaaataataatttgcgcaaaaattattttgttaatttaattatgaaaagctggaaaggaagacgtcaaatacgccaaaaagtgaaaaactgcgtgttgtgtttaatgctttcaaaatccagtaaataacattttcattgaataaataaatcatttaatttaaaatacataattttttcaaaagctgcaatgaatcattataacgtttggacttttaattatgaagaatattttcgttttctaaaactccttaaaaaaggtaattgaaattttgaagtctttttttaaattttgatgattttagcttttatgcataacattttcccaaatcgtttaacaaattgcaaaataagccaaaattgttgtcctcgaatcgccggacaataaatttaatcaattcaaaaattggcatttttgaaaaaaaacataataaattatgtaaacattcaatatctttcggcattgtttaaaccctttgaaaatgaaattgaagatttaaaaaaaaaagttattcacgttttaaatcccactttaataataaatttcaagctaatttataaaaatagcacaccattaatttaaagttattacaatttttttaaaaacgaaaaaatcaatgaaaattgaaaataaaatcacattttttgacaaataagcgatgcggcacatttttcggagaatggtcaaaagttggcacgttttatcagcgacatgggcttctacagtttggtggaggacaaactgatgaaagaaatcaatgggttgccaacattatgccaaaattttttcaaaaattttttggaaaaaattgatttcaaacaaatgatggacgatttgatgcactatcagcagattagagcgtcacttaaacacccaaaaatgaataaaattggcgacacagtaaacatcaaagtgaccgtagtccaacaactggcctctctactatattatggactactgtatcaggtaagaacggtacttagtagttggtataaaacggaatgaaattttcttaaaatttcaatcattgtgggttcagggtgactgatcataaagttaaaatttatttcagcattctgggacccaaatgaattaagtcataaagttgggatttttcgatttgccggtttcacttgttgtattgtcaagacatcaacaaaaatatgggtttcaagccatttttaagtggatttttcatcccaaaaatatatttttaactaagaaaattttgcaaaattcgggggaatttttcgttgatttaatgaaaaaaaaaaaagttcaaaaaggaatttttcggttgaatttttactaactgttcctaaaaattttatgaaaaaccccaagaaaaatttgaatattataatacaattttaatgcaatttattggtgattttagaaagttttcgaaatatttttgtaaataaaaaaaactattatttctccaggcactgcttgacgagcttaacaagccaaaaaatttgtcaaaaagggatgccgcaaaattttggatcaaaaatttcctgattttttcactggctgccattagagcagagttcaacatggccaaatacgagatggagaatgggttggatgatgacagaattaatttgctgccaaaattttcgattggacggcattacaatgaaaaattggcaaaaaaattggcggaatggaccgacagaatgcaaaaaagacaccaaacatagtgcaaaaaaaagctttgttattttatatttttgttattttaggaatttgaaaacacaaagattgctgaaacttctgttactttaaacctttaaaaatgataaaatttgtttttatacaatttaaaatatgcaaaaaaaaaatctttttatatttttttaatttataaggcaagcaattaatatagaatttataaaaaaattcattattcagaaaatgattattattttttgcaaaaaatgcaaaaaaatttgcaatttaagttgttttaaattaaaaatattaattattttattgcgtcatttgttaaacttttcattttgtcatattctaacaaatctaattaaccattttcagcctctttcgttttggaaaaatttaatttggattcaaaatttcaattcccatctttaatcccatcaatttcaatagttccatatttaacttcgttgcattttcgttttgttttcattctttggtattgcaaaaacttatttataaat

SEQ ID NO: 25789 - DNA, 1467 bp, Heterodera glycines
tttgggtataatttcctttaagcagcccagggtggggttcgggaacttttagtacatactctctgaatgagctgagaaataatatatattttttcaaggtcatgaaaatttcaagaatttttatatgggcacgagtgtatgatatggtactttgggtataatttcctctaagcagcactagcttaacttcggaacttttagtacatactctctgaatgagctgagaaataatatatattttttcaaggtcatgaaaaattcaagaattttcatatgtgcacgacagtatgatatggtactttgggtataatttcctctaagcagcactagcttaacttcggaacttttagtacatactctctgaatgagctgagaaataatatatattttttcaaggtcatgaaaaattcaagaatttttatatgtgcacgacagtatgatatggtactttgggtataatttcctctaagcagcactagcttaacttcggaacttttagtacatactctctgaatgagctgagaaataatatatattttttcaaggtcatgaaaatttcaagaatttttatatgggcacgacagtatgatatggtactttgggtataatttcctctaagcagcactagcttaacttcggaacttttagtacatactctctgaatgagctgagaaataatatatattttttcaaggtcatgaaaatttcaagaatttttatatgtgcacgacagtatgatatggtactttgggtataatttcctctaagcagcacaagcttaacttcggaacttttagtacatactctctgaatgagctgagaaataatatatattttttcaaggtcatgaaaaattcaagaaggggtgggacaactctcgcctctcgtctctcgcctctcgccaactctcgccatttttggtactctcgcctctcgttttttgggacgagaggcgagagttgaaaatacacccctaaagattgaacttttgagcagccagaaaaattttcaaatttacgcgaaaaaaaaatcttaaatctctttctttccttccttaatgttttctctatttttggatagctccaattcaaatatggtctgctggctaaaccttctgcctttcattatttttctcttgggttcaattccccaacggtacagaatttttttaataatttctttaaattattttcaattgaaattttaattaataaaaaatatttcaatttaaaaattattattttttctttttttaaacagcctaaaactgcaaatttaaccaaaactttgatcattttttgacaagttctgttaatatattacactcaaaattttggaatttttccggcggcgcctatcggcggtgccgattcggcaccgccggaccccgcacccaatgttccaataaattttttttggaaaaacgagcgccacgaaaaaagagcgacttaaaaccgaaaaaattaa

SEQ ID NO: 25790 - DNA, 1687 bp, Heterodera glycines
  unsure (1)..(1687): unsure at all n locations
attaaaataaacatttttacttttttcatggtctgtaaacatcaaattttccgccgataagacgcaagagtgccttcatcctctcatacgctttttgagtcccgagctgtgacagcaaaaacagcccatcttcttcgtggattgtttgttgttgtcggagttgttccttcttcatcggtgtgtagtgtccaaatttgtgacgtacttcacgatgcagagattgcagcgaacatcggctcactgaccgcgaccgatctcgatcgatcacatcagcgattttcttggccagatttcgccgcgaggtctgctccaatgtagcagcattctttttgcgccgtgtggaagctaaaaacaatttggatgataaatggctttaaaaattctgcagaattttacgtgttggctggtccttctgcgcctgctgttccaattgacggcgcagatcagcgatcattgcgtctctgttgcggacctgcagtcgtagaaagctgatcgtttgttcctgctccttcagctgtttgtccaactgctcggtttgtgtcgcggcgtcctcatatgccaagtccacgtcagttgccttgtccatcgttgtcaaatccatgtgtgttgcattgtcggtagttgtaaagtccatgtttgttgctttgtcggtagttttaaagtccatatttgttgctttgtcggtagtttttggacggacacgcacatggtgcctgaccggagtcgctgacaatggccttgtgcttgaacgcgggccttaatttaatttttgcttctaaaatagtgacttttttgacttacgaaggtccaaagttgacgttgatggtccactttcggcggcttgggtcgatgtctcctctccatctgctgttggcacggctaaggtctgctttagacctaaaaaatgcagtgtttttaaaataaaattaattttggtcaattttcgtcactttttggcgtcgagccgcctttttgagcccgatcctggcgccattccttccgctttcgtcttgcttttgcagataagctgttcatttgctttgccaatccagatttgtctcgggaaaagaccatttttttgtgtaaacaattataaatatttgctatgctaaaaaatttttccttatgcaacgatttttttgaaattttgcataggccaatattttgacctcctctatcgattctaagtttattttgtgaaagttaagtttttaactcgagatcggctcttctatttttacaagggaaaatccccaataaattttaagttttgcaaagttttggcgttctgattactaaataaataataaacttatttgtacttggagcccaaaattgactcgccgtgtatagagaaatttggtctttttttgggaaatttttggtaagaaacagagtaaaattttcaaaaattccccccggcgnccgcctattcggcaccgccggcccaatctctattccggaaactttttgagcaaagtcaaaaaacatattgtgcgaaaacaaaataaaaagcaaagtttcaagtacatatgagcccattttaattaaaaaaatcattaagtttattaaaaaattcgctcgaaataaagtaattttgggaaaatcagtaaataatcacattttctaaaatttcactaaaacccatatttttctaaaattgtggaaatatgtctcaaaaaccatt

SEQ ID NO: 25791 - DNA, 841 bp, Heterodera glycines
tttggagttttgaaaaaattttttttttttttatttttgatttttttttttgtttcccagaacataattttgtaaatgaaagaaaacataaatttctaatgaaaatgaacataaatacaaaaattgacggggaaattgagtttaaaatttggagtttttgaaaaaatttttttgttttttatttttgatttttttttgtctgccagaacataatttcgtaaatgaaagaaaacataaattactaatgaaaatgaacataaatacaaaaattgacggggaaattgagtttaaaatttggagtttttgaaaaaaattttttgttttttatttttgatttttttttgtctgccagaatataatttcgtaaatgaaagaaaacataaattactaatgaaaatgaacataaatacaaaaattgacggggaaattgagtttaaaatttggagtttttgaaaaaatttttttgtttcttatttttgatttttttttgtctgccagaacataatttcgtaaatgaaagaaagcataaattactaatgaaaatgaacataaatacaaaaattgacggggaaattgagtgaaaaatttggagtttttaaaaaaatttttttttttttatttttgatttttttttgtctgccagaacataatttcgtaaatgaaagaaagcataaattactaatgaaaatgaacataaatacaaaaattgacggggaaattgagtttaaaatttggagtttttgaaaaattttttttgttttttatttttgattttttttttgtctgccaggaacataatttcgtaaatgaaagaaaacataaattactaatgaaaatgaac

SEQ ID NO: 25792 - DNA, 1327 bp, Heterodera glycines
ttttcacacctgagtcaaaaaacgagacatgtgtcaataaagagagagtgcagaggaaaaaacatctctctttttggcgtactatttctttatctctgctaatagagaaaaaccgaatttacttcgtgatgtttaactttttttcctgatgttaaatccacacccaattttgcatgccgatagagaaaaaaattctgcattattctatgctcaattattattttctgtgctcaaactcaaaagttgtaagaaaaacaaaatttcaaagcatcatatcttttttctaacccatcaaattgcttaatgtttgctgagaaaaagcttctactcatcaagagctttcgaaagataccaagattatccaatttggttggcaaaaaccttcaaaaataattcccaaaattcgtcattttttaatattttggacaaaataaataaaaatattcatgttgcacaacggactcgaaccaccaccctttgtccctttactatcttacaaaaaccacttcgccacatatgcatttactttttgaactaggggctcaaaattgactcggtgtgagcaagtaagcaacaaaaaaaagcatatgcctcaaaagcgccgcaaaaaatggaagaacattcaatcaaacgaagcgacaacagaggcaaaggcaacagcagaaaaatgtgagaaaggagaaggagagaaacggcaccaaagggaagaacagcgaaatgtgccgaattgtcagcagttgtgctcgtgggaggaattcgaagaacgagtgcaagcggtcagactgaggccgaggggacggcggacgagcggcacaaactgttggggggcaacggggggagcgaccggcaacggatgccctggggccatcgaacggaagcgacagcacgaaatggcacatggggaagacggaaggaccacaaatggaagaaaaatgggagacagagaagggagggaagcgcaaaacgaagtgctaaaacagcaaaaatgttggaagtgccaccagatggggcggaaatgtgtgaattccattctgacgattggcaccggcgatcagcagcagcgactaaagcttgcaggttgttgtcttgccgtatgtattttgccttccgtcggtcgtgtggacctcttatgccatccgctggagcggcctgaaaatctgcaattcttctttagtaaaaatttgcccatgggttgatttggtccgatctggcgaaaacaatcaccggcgaattcacttactggcgaaatcaaatacagacgccgagaaaaagagaaatatcactcactggcgaaatcactcactggcgaaatcactcactggcgaaa

SEQ ID NO: 25793 - DNA, 1152 bp, Heterodera glycines
  unsure (1)..(1152): unsure at all n locations
cgacaaaaagtcaacccagcaggtcattttagaaatgcaaatataagaataagaatctgcaaatttcttatatcacaacttttttaaatttcatcttcaattttttaatttttttagtttcgcttaagtcagacgcggttcctaacgtgggttatccaaacgcaacaccaacgccattggacaaaaaagcaaaaaaacaaaaacggcgtaatgatgggaattcggctattcatcaaacggtgaagcaaatgattgttggggaagtcgcgaagggaaatggcgtaagtaaagcgagaatttttttattatagtaaaacagcttctaattgagctaattagtcgttttctgtttctttcgttttgcacagattgccgccagcaattgctaaagaaacaatttccatattttaaaaatagcgattcgtaaataattataaataaattgatttgttgatttcaagaaagcaaatcgtcataaaggaaaacgaaaagttactttctcatctgaaagcagtgggaacgaatattatgcggacaattccgaacaaaagtcagaagttgtaagaaagggtgagttgaattttttgaaaaaataagagttcaatttaattgaagaatcgaataaacgcatgaaaatgaccattgaaacggattctgacgcgacttcgaccgctgagggtcttacaaaaaacgactaattattcacatagcaaattgtgtttaagatttgattgctacaaatggacagttttctgaagacagcatggaaaacgaggaagaaagccttgacgatgatttggaggaagaggaagaagaaataggggaagacttggaggacgaagaactcgaagaagcagacgacgatgaactgagaaatggcaatttggaggacgaagaggaagcgaactcttcttttttcacgtcagacgacgaatcgcttgaagacgaaattggagaggaatcgggagaaggtccaaccaacccaaccattttaatcggattgaattactctaatgtttagaaccttttgaattggaatttgttggatatcaatcgacaacaaaatcgggctaaatgtttgcttttggaagcattgnaggactacacaattgcaacttcgcccctttgtctctttcaattttcggatggcat

SEQ ID NO: 25794 - DNA, 1643 bp, Heterodera glycines
tcgcagaacttagccgaccatgaggaggactcactggttttggggacatagcaatattgggtatgacaatgagtcgtagggctttatgagcgaccccccccccaaaaaaaataataaattgggctcaaatggacattggtcagaaagcaaggcccattaaaaccagttcggtttgaaattctcttaattaaagcgcctgttttcacaaagcaacagatgtgaaagcaatgagagagagaatcaatggccaaaagcggcggacggatttattcagaaaacattaattgatcactaatgttttttatggtcaccatttccatttgatcagatttgtctgtaataggttcaaagatatctgtctgattgtacttacttagggtgtaacataagtttccgcacaattttttttttcaaattcaaaaattcataactccgtaatttctgcagttattttaataattctttttttattttgttcgtcagaaagtcttctttcatttcattttttatttgcttattcaattttttagtattttttcccgaccatgcaaaaattgaaaattggcccactaatttttctcgattttttatggtcaaaaaagtaacctgatataaaaaaaaggttttctatacaaattagaccagtagaatccgaatatggccttaaatctgacctatcttttaaccctgagcttgtactgctccaactccatgcatgaagttggagctgtacaggtttgttgagaacccagagaccaaatctaaagccatattcggactcagcgtggtcaatttatttagtttaattaaattcggaatttccaaaaccacttttaaaacattttgttatttgatggtcttgaaaaatgccgtttttggagacatttttagactcggccctccaataattcatttttgaagtaataaaatttttttcttataatttttatagtcctaactttgctctatttactcacgttttctctgcctctgtatctcttttcattttctttaaatcagccatcaaaaatacatacctcgaaaatgaccatttttacattatcaactctaactccttaaatacttttctaatgggatttatcccttgcccaataaatagcaaactcattctcaataataatgtcagatatttcggatcatgattgtggttttttaaatttatattcataaaaaaattctttaaaaaaagtgtgcggaaacttatgttacaccctaagtaaaattattataaaaactttatttactttcttaactttttatttaatttttatgtccttattattttaggtttttgaatttttctttgctgttaaaatttaaaaaaagattttaactttattgaattatcacttttttatatcattaatttattttttaaattggaaataattacttgttttttttaataaatcttgacgaattgttcgtatcagtagttgacgcacagcttaggaattaatgttcgattgctaatttatttatctccttttttcgctgtctaatttgtaaatttagaggtctaatagcaatagttccggtcttccaaattcagcgtcttatgagaattaaattttctaaaaaaatagttaaatataatattttttttctattcttaatttttt

SEQ ID NO: 25795 - DNA, 1699 bp, Heterodera glycines
gcattcagtacgcggtcttcatttggtggaattcggggcctttttattggcttttgcaggctctcaagtatttccagtacagttggcatttcttactaaaatctgaattacctttttgtttggttagaaaagaacttataaaaatgaaaggaatacttaagctttgattgatgcaattctttcgtctttttacttttttttctttacttttttttggactacttggcaaaatgtcagttggcgaaatgtcagattttggttaagttggcgaaatgaatgtttttgggttagttggcgaaatatatgtacaccttcaggtgaataaaaataaaaataatctttaagtagtgtaaagtaaaattcaaaaatgaaatatttatttattaaaaaacataaaatttttttgaaaaaaaatctcataccatctaaacggggcggagtcattatgtaaaaaaccatcaatatgatttgatgactgcgtccttggcgttgtaacgtggattaaaaatgtttgatatgtgttgcataggttaatgtttatttcctattaaaataaatattgctcatttttaatcaagcatattttttttaaattataagaataaatttatattttacgaaatattaaaaataaatattatatttagttattaatttatatttaaaataaaagtatttttatttaaatttatgattagttttaaagggtattttctttgtacgaatatttgcactatattttattatataattttaatttcatatttatatgtgattaaaatgattaattgatttgaataaaataatttttaaccttttatttaaataattattagttttttaatttactaaaacaatcaatatcctgcttactaaaatatatattttaccaattttttttatgtttaaataattaatattatatcattatgccatttactcaataattttattttataaaactatttttaaaacaatattataaatcataagaggtttactgatttataataattgaaaaatatatacggttttagtgaatatttgctatttttgtattcattttgttttttttgcaaattggtttatcattttgaaatattccgtttttatttttaaatttggctattataaaattagcttgactattaaaatttttttattatatattaaatattttatagttcttttttaatttatagagatttttttgtattttttattcttttgcacatgttttccttgaattaattaatcaataaatgcctcatattaattttttactaaaattcatattctagcttaagaataatttttcaattatttaataagttctttagtgaattaaagctttaaaaacaattaattattttgtgttaataattaataaatctttttaatccaagtaagaaattaattactccattcaattcattctttattttttttgtaaaaattaaaaaaaaaaagtatttttcagttatttgactaacaccggatgcaattattatgattttaaacaattttattaaaaaaaattaacccaaaatttaaataaatgcaattatgttttatatacaggcttattattaaataaacaaaaaatttaatataagtttattaaaactaaaattcattcttttttttgttcattatcggatgataccaagaatgtttaatttgactgacattgacaaaa

SEQ ID NO: 25796 - DNA, 977 bp, Heterodera glycines
tttttcttttcgcaaatcggtgctaggagaaatcgggagtttcggttttcgaatcactttttcaaagaattgcaacaagtgcaatttatcattttttaaacaaatctggttaacataccataattacgaatcctgggaatcaagagtctcgggttttcgaatcatattgacactaaaaattctttaacatatcaactaaataaaaaaccaatacataatcaataaaccaaattttttttatttgtatgtcatgaaattcctgtctagcttaaacaaaattttattatttttttgttataattaatattaataataatattaaactgttttcgctgtttattatttaaatatgtgaagaattttaatttctgaatatttttctcatgctgaattatttcattgcttataaaattaaaattaaatttaaattaactttttcccattttaataagagaataaagcatgttcactaatttcccattgcttttctccgctttttcaatttttctgctccttttgaccctgcaattccctccaaaagtgctgggaatgttttctaattacaatgttttgcctttgtatcagaagaataacggtaaataaattatctatttaatatattaatattttttaatttatttaaagcattaatagctgggatttttaggctttaacggatagtgtttgatgatagaagaatgatttagagcgactttttatcacataaaacacctaaaacgggggtatgcaccaggggtgtgccttgtccccaaaaagacgagagcgagagtttggcgagaggcgagagtccccaaaaagacgagagttggcgagaggacgagaggcgagagtttttcaattttctgtagccttattttttactccaaaaaatcacaatgatcgttcgaattttagcacctattttagcctttttcagaaatttcatagcaaaagtgcaataaaacgtaaaatacaat

SEQ ID NO: 25797 - DNA, 511 bp, Heterodera glycines
agaggggggggggggacgaacaactcaagccgagcggaaggcacaactcactccttcggtattttcacagtgcccgccgcttcggccggttgcttcagcggcgatgacaccggcgagtcgctcaatgcgtacgttctctgccgactcgcacaatctgttgcccctacaaaatgaccatcgaaatcatttggacgttcactttgtttggtcgtctgctgagattggcactgcgagagaagagaacctttggaaattgctgccgccattgaaataacacttgcgttggccatggaactgccatttgtgcatattatgctgttactgaggtcgaacaaatgctgaagctaacgagttggataaaccccaatgaattaattctctccaattccctcccctaattagagaccggcgcgggattttgggggattaatcgcgcgggatcccgtcccgcaaaaattttgagtttaaataccacagcgggatccgcaaatttgtaatttccggtctctac

SEQ ID NO: 25798 - DNA, 1191 bp, Heterodera glycines
tacaccaacttaatcagatcactccttcctagggaccgggaaaccccaaaatacactgaaaatcggggcaattttcgaaaaaaatccttaatgggttggaaaattttttcagaagaaaatgggcaagaccactgacaagagcacaaaatttgctaccgaattgcttttggaatggtaggtctatgatttgtatatagaaagttatacttggttgaataattgatctccataatgataatttttgatagtgccataactttttgtagaagcatccaaattaaacaatcttggtatcttttgatagccctaagtgtcctctatttgcttttaagatttcaaaaaatttggttgtgtttcaaaaaagttgtggcttgtaaatttcaaaaattgatgtggtaaacctttttgaccacaacttctttgtaactcaacgaaattttttgaaattttacagaaaaatagaggaccctataagctatcaaaagttaccaagaatgtttaatttgggtgcttctataaaaagttatggtgtatgaaacttatcaaaatattacatggtcatgtcttttttcgtggtcgtgtaaactgaaatagagccaaatatatttattattattagcttattattcaattataaatttaaacaattaattaatcattagaacaactcttccgtactgaaatgacccgcctcttctgatcaccactcattcgcacttttgtcacttcgacacagcaccggctaacttacccctctgacatttctgcttagaagccatcccggcaccgtttgagaaactaacggagttggagaaattggcgaagcttcaaattggccattggggccaaatcggaggtttccttcgatgaacggatttatgaaaccgaggggagatgggacgaaagaaatcccattcagctgaacgacgaaaggggaaagaagcaaaagcagtgggagaagaaaaggagcagcgatgggtgaagcgggacaatgaatcgccatttgagctaacgtaggacgaaccctaagaagtaattaactaattgtattttttaaaggagggggggggggcgaaattcaaatgaaaaggtcgaaaagccaaataggaggaaacgaagtgccgaacacattaagagcagtagcaaaaaagactaattcattagagagagagcaccacccggccatcaaag

SEQ ID NO: 25799 - DNA, 1339 bp, Heterodera glycines
ccggggactctagagtcttaacatgaatattttgaataaattttgaattcgcttttttcttttttttctacttaatttttttgtttttgtcatattaaatcacacagcttatatacatagtgtcattatcattatttttctaatgtttttagtatttcttcggttaatttcaattcttgctttgttgcttcactgaaccctttccacgacgatggttgtacggcataaccatctacatattcttataagtacatctttttagattaaaaatggttttataaaaaatagacttttaatatatacttaaaaatttcaatttcttttaattttgttttaaacccttttcaaaatctccaaatttgtttatgctctcatttttatttaagcatttttacattgaattttctcttttatttatgtttaaatctgattctaaatattaattttgcggaatgattttaatttatcttatacatttttgatttaaaaagataaattataaattttattactttttaattgtccactaattaattgtccagcaactcatttgtctggtgaattgttctggccggttttagttactatttaaatttcttattttaatttaatcaatttatcttgcgccaagaaaattgtttgcgtcattttttcatgccttggagttattttatttaaaaaaaatatttatgttattattttttctttatttattatataaattttttttgttcattgaattagtttatatcaaaatacattaaaaattaataattttattattaaatgtaatttttagtgttgttacattttaagaatttgtttttaagcaatttatttcgagagtaaaatttaaaaattatgttaattttttttttcatatatttattctcaatataatcaaaaaatttatttgatctgcttaaaaatgttttttttattataacaatgtttcataattaatttttatttgttttaggttatagatttttatttagtattactttagatcaattttttgcattgccctaaaaatcttgaacattatccagtgtgcatagcgacgcacactggcctttgaatttaaaatataatttgtaaattttattttttttttaaatatttatgttattaaattttttatttattatataactttttatttttggatgaatatctgcagaaatgttgaatgtaattattattgttgttcaataaaatgcttaaatttgaaaaattgctattttacaaaattcaattatatttaattatgttttgattttttttaattttttttgtcttaatgtaaatgtaacatataattattaatgcaaattga

SEQ ID NO: 25800 - DNA, 2032 bp, Heterodera glycines
ttgattatacatacatcatccatccattcacaacagtccctatcaaaatccctgctcatttcttttcccttttttctttagtggaaaaagcggcatttgtttccggcatttgttttgaattttctttatccgacgaaaaaaaattaaaattaaaatgcttttatttaattttttcaattttttaaatcccacaattcataaatattcattcattcgttgtttaatttgttttttttctgttgatgttttgctctgcgctatgtgtcagcttttaatcaaaaagcaggcagcacacaaaagcacgatttgtgctttcattgcattaagcaaatgcataccaaaaatataaataaataaacaattagtaattctaaaaaaattaaattaaaaaacaagcttttccctgttggagggggcttacataaaatccccggagaaggcttaaaatgcccacaataatcatgggaataaaaaggacacatctgcgagagattaaatgccaaaaaagtagcagaaaatgcaaaatagtcatgctttctaaattataatatcctttatatagcgaaattgtgccgtaccttcgggtcatgccatttttggctcaactatatttttatttgccaacaaaattgccatattcaaagcgcttaacagtctctattagtatgcaaactttcaaaaattcattggactacacaaaaaaaattatggccaaaaacctcaaaaagtgattttttttttttttcttgcagtttggcgccgcgcgccatttatttttttaaatttaattttttgaaattttacaaaacaatagacatatataaaatttagttcccttatgtatgacgcgttgaaagcttttgaggttctatattcccttgcaaaatttcaaaaaaaaaattgatcttttttattaaaaaatttttaaaatttttgttcatacttttttcaaatttgaaattttttttttcttaattttgcatttttatagagaaccttaaagtctatcgaggaatatcaaaacgggttttttttttatcgaaaaacacaacgagacggggcagtatgggttggcctagtttacgatatttttacgatcctaattttgtccaattgatttgccctccttttccaaaactttttcttatcacaaccaacacacacagcttttatatcacttggatgcatttgtgctgactttgtgaacttccttctcccattttgcaggaatgttaatttcccattcgggtgccattccgccgggcacacaaatgctaaatgcgcagctaaacggacacaatgtgaggagaacacacaacagacagacacaaacaccacaaaaaatggaccaagggatagcagaaaacgcaaaattaggcttttaaaaacgatttgaatttttgtgtttgagacaaaatgaaattaaaaagtgaaaggtagagagagagagacagagagagagagagagacacagagagagagacacagagagagagagagacacagagagagagagagagagagagatatagagagacacagagagagagcgagagatagagagagtttagggaataagtacaattcgaaaatataaatattaattcttctccagggacagggaatttgaggtgtttcacacattctggccccttcccttttgggtggtcccagcaggacttaggcttgttggcttcgtgtttttttaacacccccccccccatcccccgcttttttcactcctcgccctaacggaaaaaattaccgaaattaaaaaaagcattgaaattgaatatgaaaattgtttttccatcagcagaatgcctcctcactgctccaccgggcacagcacaaattccaccaccagcagcagcaaacatttgcctctgaggatactaccacaatcattgaccacaacaacaccaaatcgcatcagcaacacaaccacaatcaccacaacacccaggcgcaacaaattgcgcggtctgcggtacacacaaccaccacaaccaacaacaacagtgcacctcct

SEQ ID NO: 25801 - DNA, 1967 bp, Heterodera glycines
aaataactgcccgattatgtgcagtttttattaatcgcccctctttgtgtgccaatttcatgaaactcttctcagactaatttaatttgttcggcgtcattttcggaaactttccattttcttttttggcttctcatctttagccaaacggtgcacagtttgactgtaccgacatttaattcatttccaaatgccatcggcgtaagcgatgccatttttgaattattaaagtgagctttttcggcgaattgttaaaatgtctgttaattaaatgcctttggccgactgaacagacttttgagtgaaagctgtttagtgatgaaagttcagagattggcacaaaaatatcacatttcgtaaaataaacgaaattggaaaaggaagggacaaattggggagacaaatggacgaaaaagtcacgtgcggattaaaatggcttatgaaagtgttcgcttttcaaaagaatgccgacggacgaaattgacgaaattcgcataattttgtaaataccaacgacagaatcattaattattcgactgagtgaaaattgaaaaaagaattgtgtggccaaaaatgcctttcagcctttcattgtgccattctctttacatcaatcgcctcggcagatcagttgagacagtcgcgcgtttcgcctttgaacgacccggccaaattaagggtgcccagcggaaacactttttcggccacgggtccatcagtgatataactggcgggaagctgaacaattaaatgaagagaaagtgccaattgtgaaggcaattaaaaagaaaagtgccaaagaaattaaaagggaaagtgccaattaattcggcggaaaacacacgtcgatggaaatttttttgtagcacactttcttcagcgggttaagactttcgtcgtcgttgcaattcttaaaatgcgtttttcttcctttcttcgtccgcttttcctttgctcctcacgtgataaatgttcacttttggctctatcggagtgatttcgctctcttttccgctcagatggaaaaatccctcctcgtcggtcactccttcgtccattaggtcgtccatgtccgtgtcttcgggaatatcaacattttaggagttatatggagggaattggccaaattggtttcacataattgagttgagtgtatgccaatgccattttggtttgaatgccatcacttagtttcccttttccccctttttaccatcctcgtcgtacagtttcactttggcatgcgttggctttccattgcatgtcaaagtgccattgacagccgccgattggacataaccaatggaggggaaagtgagcgcggcatcggccaatggcacagcgaatgcgaaagccaacagaagcgaaaatttcatttccaacggatgccaaaaacgagattttattctctgcgaaaagagtaaatttgcaaattcggcatttttaaacccgaaaaagccaccaaatttcaaatccatcataaataaaattaaaataatttttagtgtcaaaatggacgggtaaaatattgacaatgaatgagaaacaattcacaacgaacgaatcgcgcggaaaatggacgacgacggcggacggacgaccgcccccccctccaccgcctccccttccctttgccccccaattcgccaatccccccaagggattactacgattttctcctcctccccccccccaccccttcacacaatcgacggggagtgtccctataatcgtcaattgtcatcataataatgacggccgccgatcgccaccactcaatcgactcaaaacggcgcaaaagaaggggaaaaagtgatgaaggcgacgtgaaaaagcaacaaaaaaaaacaaacgaacgaatcaatgcattttaagaagagaattaaattaatttattaaacgagtgaaagataaaaaagagctaaaaagtaaaaataaatacaaaccaataatattaaaaaagcgac

SEQ ID NO: 25802 - DNA, 1261 bp, Heterodera glycines
  unsure (1)..(1261): unsure at all n locations
gtcgggttgttgnggatcgcagcncaaatcaggtgtaactttcatctaagactaaatacggccacgagtccgatagcgaacaagtaccgtgaggganagtgccaaagcactttgaagagagagttaaagaggacgtgaaaccgatgaggtggaaacggacagagctggcgtatctggtctgcattcacccgtttgttgctgtacgttggcctgctagcctccagactggggtttgctgtccttctgttcagtggcgaatggggcatttgcaggcggagtgcgctgagatgctcggagtagctgcgtgagctcggtcttgaggccagcctttcggggtctggtacccggatcgggggagtgctgtttactctgggtgaattgtgcaatggtttcgggtccgtgttgactcgagctgggggtcggtggcggtcgcgtgcgacacgtaccagcaaccagttcggtccagctcgggctctcagttgtgcgttctcggtgtaaaagccggtcatctgttcgacccgtcttgaaacacggaccaaggagtttagcgtatgcgcaagtcattgggtgttcaaaacccaaaggcgcaatgaaagtgaaggcttcttacggagctgatgtgtgatccctggcactgcggtgttggggcgcaacatagtcccgtctcgatcgcatgcgatggggcggagacagagcgtatgcgctgagacccgaaagatggtgaactattcctgagcaggatgaagccagaggaaactctggtggaagtccgaagcgattctgacgtgcaaatcgatcgtctgacttgggtataggggcgaaagactaatcgaaccatctagtagctggttccctccgaagtttcccccaggatagctggagctcgttaagcagttatactcggtaaagcgaatgattagaggacttggggacgaaatgtccttaacctattctcaaactctaaatgggtatgaagccagggttgcttgactctgaacccaggcgttgaatgtttgagctccaagtgggccatttttggtaagcagaactggcgatgtgggatgaaccaaacgtggagttaaggtgccaaagtgcccgctcattagacctcataaaaggtgttggttgatatagacagcaggacggtggccatggaagtcggaatccgctaaggagtgtgtaacaactcacctgccgaatcaactagccctgaaaatggatggcgctggagcgggccacctatactccaccgtcattggct

SEQ ID NO: 25803 - DNA, 1793 bp, Heterodera glycines
aaaattaaaaaacgggcgcgaagcggccgaatgttatcaactaaattaaaaaacgggcgcgaagcgcccatcctgaggccgcgaagcggcccaatgtccccccaaaaaattaaaaaacgggcgcgaagcgcccgtcctgaggccgcgaagcggtcaaattcccacaaaaaattaaaaaacgggcgcgaagcgcccgtcctgaggccgcgaagcggccggactccccccaaaaattaaaaaacgggcgcgaagcgcccgttctgaggccgcgaagcggccgaatgagtccacaatatttagaagcgcaaagcgcccgtctgaggccgcgaagcggccaaatgagtccacaatatttagaagcgcaaagcgcccgtctgaggccgcgatgcggccgaatgccgcctcaaaattaagaaacggacgcaaggcgccgtctgaggccgcaaagcggccgaatgtacaaaagggcgcggagcgccctttgagtccgcgaagcggccgaattaaaccttaaatataaaaagggtgcgtagcgccctttgaggccgcgaagcggccgatgtacaaaagggcgcggagcgcccttttgaggccgcgaagcggccgaaagtcctccacaaaattatgaatgcgtcctcgcgatgcctgtagaccaaaatcccttatcacatccataaattcatttcaaaatcgcgcatgcactagcaacgaagtcctttgcgcgaagcgctcatgtcagcgcccgcccatatataccaaaagtatactgtctacaccgtgcaatcactgcgcgtgcaagtcaactgcctgcaccgcgcccccgtcaattcccacacgctagtttatatatatatagagaaaaagggggactcgtcttaaaaaacaaaatctcccggccgaaggccgggagcgccctgaaagtagtggaagggtcttacaactttttgaggcgcatctgggaaaaatacgggtttttctctccggtggccaactgagtcccggcggctaatttctcacttttgtttttatttcaaggcccgtaactttttttctaaaactcgaatcaaaaaatgcccgctgcgagggcaccccgccaaagtgtcctctacatgctggtattttttatttttttaatagagccaccccctggcctgcagaaaatggcaactgaagcgtgctcaaaaagtacacttcagtaccaggcgaataccgcgtcggggttttatctgagggaaaggtgcccagcagacttattgtagagttttggaagctcgattttctgaaatttaaaaatttcgaaaattttcaaaatttttcgagctaggcctaaaaaacggtttttgggtttttgaattttaagaatttttaacgaattttcctggcaaaacgaagaccacttccaaaacatagtttttcgagctctatcgactggtatttttttcggaaaattttcgattttttcccggaaatagaaaaaatttttggcctgagcgggacatttgagtcctgggcccataactcgtcagtagttggttttagccaaaaaatgccttagagcaaaattgtagagctttttaagctctatcgaaaggtgtgctatatgcccggaaaatttcaaaaattttcgagctaggccccctagaaattttcaaaaattttttcgggggcgaaaacgggtgtgacaaatattttttctgcggtaaattaaggtgttgagttccaatttgacctttggttttccgtttcctgaattttggatttttttaaaaatcctttattttttgcaatttttt

SEQ ID NO: 25804 - DNA, 1402 bp, Heterodera glycines
atcatttgctccagtgaggcccaattgcgctgcttgtgtacattggaatgagttcggccagcactttcagtgcgcgctctttcagcactacgtcagcggtggcaaaaccattgatcagcaaagcctgtagcaatttgatcaccggccgccagcccaactcagtgccgatcagtccgatcacttccgattgggttttgcttaattaaatatatcgtcgattggcccattaattgatcagagaaatttcctttggacaaactcacaaaggctcaatgacactttcaagcgaaaggaaaagctgctttagggctgaatgatctgcagaatgtgcgttgatttgatcatttaaacgaaaagaggccgattcagctttgccagctgagactaaatattgcagcaaatcttccttgaatttgtcttccatttttgtgattttctaaattaaattaaaaaattattaaatataattgtttttaattaaacaatttaagcattaatttaataatatgtctgattgtttacagatattaaaaaggattattttaatttactctctccgtcttaacaagaattttgccttttcaaaagtcttaaatccatcgcaatcaattttggttctttgttttatgactttattttatttttatggaggagcggaagaaaaggcagagaaatgggcaaggaaaatgggaaaattttattgaaaacaaaatgagacagaagaaagaagagtttcacaaaaacatatcatttttcaaaaattagtaatacaaataaaataataaataaaaataattaaaaatttattttaaaaaatcgatgagagtgcgtaaaatttttagaaaatgcactagaaagattgattttcatgctaagtatagaaattccaataagcaaaatttgatttgattttattcaatcattgaagaatttaattttttccttatttcggattgttttggcgctaatagaaaataaaattatattattttagtctaatgaatagggatcggatttttagtgataaaaaatctcaaaataattaactaaatagtgaccaaaaaatgccaaaatagtggtaaaaatagtggcaaaaaagttccaaatttaggggtgtaattttttaaatagctgttttttaatttgaaaataatttaaaattaaggaaaaagattttattcactgattgcagttacaaactattttcttagaaaatattgaacaagaaaaaaaaaatttgggggaagaatttttgtgaaatttttccaattcttagggatgtatttttgaaaatttttaggtcgattcttaggggtatatttttgaaaattttttaggtcgattcttgggatgtatttttcatgtttattgcattttttgggaaattttccaaaaaatgcca

SEQ ID NO: 25805 - DNA, 1451 bp, Heterodera glycines
attggctggcggattttgttggggctgacgaggcgtctttaaaccggcggcggctgttcgacttgaggtgcctctttttctggcttcgtcttccaaaagatgtcgtcgcctgagctgattcgcgtgccgatgaacaagccgacgcagaacaggcacataaacacgatatgtgggcgaattgtgaagcctttcaacaatttttccctggagccactccgtcttattgttgcggtaattgatcagtaggacatgatcatttggggaaaaattgatcacttttgatccatgcttccgatcaaaattttgagccattttgtcggtgtattttgattgtccctttttgaatgagttttgatcaaaattttcggctttttctccattcggatgaacgagcgacaatttcgtgcgcaattttctgccgaaaaataattgatcgggtgaaaagccatttaaggcaacgtggggagtggttctgtaggagaacagcatcttttcgatccaatcctttccacctttggacattttcttcatcgatcgcttgaaggtgtcaacgaatcgttccacttggccattcgattgtgggtgaaatggcggtatgaaaatgtgcttgattccaaattctttacagaatgtggcgaattcggcggatcgaaattgggtcccgttgtcggaaacaatttcctctgggattccgagccgataaatgattgatcggagaacaaatacggtggcataagcagaaattgtattcatacgatagacttctggccactttgaaaatgagtcgatcaaaatcaaatattggtgaccgtctgagcaggggccagcaaaatcgatgtggactcgctgaaacactttgtccgtcgttggccatggcgaaagaggcgctttggtcgggtttttctggcccagttggcactcttcgcaagtgctcacaactttttcgatcgctgagtccattcccggccaatacacgtgacgtcgagcaagtgctttcatgcgcacaatgcctgggtgagcgatgtgcaatgccttaaggatgcgactgcgaagcgaagttgggacgatcacacggtcctcatacagtaggcaattgtccacttcaaaaattttgtcccgttttggaaaatatggactaatttcagaatcagcgacttttgctggccatccatttctcaaaaattgaagaaccgtttgaagtggttgatcattggccatttctgctgtaatttcgactgttgtcacggggagctgatccattctgttttcgaaaacagaattaatgtagcaatctgtatcggcacagatgtttgctatcaggatgtcttcctctggacgcgaataattggcaataagccgtgacagaacgtcggcttggccaaatgatgtggtgtttacgtagcgaatttcaaaatcgtaattcgccaaaaccatggaccagcgctggaggc

SEQ ID NO: 25806 - DNA, 1544 bp, Heterodera glycines
ttttccggtggtctaggcccgactctttgcttttttttcactaaacgagtcgggattgtgtctttttttccggtggtctaggcccgactctttgcttttttttcactaaacgagtcgggattgtgtctttttttccggtggtctaggcccgactctttgcttttttttcactaaacgagtcgggattgtgtctttttttccggtggtctaggcccgactctttgttttttttcactaaacgagtcgggattgtgtctttttttccggtggtctaggcccgactctttgctttttttttcactaaacgagtcgggattgtgtctttttttccggtggtctaggcccgactctttgcttttttttcactaaacgagtcgggattgtgtctttttttccggtggtctaggcccgactctttgttttttttcactaaacgagtcgggattgtgtcttgttttccggtggtctaggcccgactctgcttttttttcactaaacgagtcgggattggtctttttttccggtggtctaggcccgactctttgcttttttttcactaaacgagtcgggattgtgtctttttttcgctgggcgggcccgactctttgtttttttttcactaaacgagtcgggattgtgtctttttcgctgggcgggcccgattcgttcatttccaaaaaaccttggttgccagctccggccattccaagctgtcaaagccatctccgacgcaacgcgtgaagaagacctcttccgccgcacggccacctagcgacaattgaagcttcgccttcaattgcgcccgggtgtatctgtgctgggccggtggttggaaatggaccgcgcctgcactgccatctctcgggtcagcggctgccgtgatctgaacccaacaaattttgggattttttacgcttttttcacgcttaacattttttttttgatctccatttatacaaaataagacacttagagctatcgaatgatttgatagggtaactctggagggtgaatgtgtttttttgtgttgttgaaaaaattagtgaaatgggccaagaccaatgggccctgttacaatttttctttccggttgtttgctttttatttaaaaaaaaaaataataaccttgcgaaactcgtcaacacaatccacttcgtcccagaggaacttcagatggcccacctcgtgtaggcaaattcggcccggcgtcaattcatccaactgttcgccctcgtcaatgctatgcaaaaattccgcctcttcggcgcgtcttttcctttgtgccagttcccgattcgttggcatttccattattaacaaaagaaaatatgatgaaaataacggagctaaactgaagtgtttaattggctacaacaacctaggggaacggtgcagatacgtagaaacgggtacaagaatttgtcaatttaaaagatataggcgatgaattcatttaagaaaatgcttaagacgcaagagtgaaaaagagttagctgtcatcagattcattttcgaatgttgtatctagctctctaagagctttc

SEQ ID NO: 25807 - DNA, 1437 bp, Heterodera glycines
aaattcccggttggttccagtcccggacgaaaatcaaggtcccggttccgacttttctggtcccgataagtcccggtcccggtttttgtcaaaattcccggtcccttgcaactctaatattagcttttttgctaacttgctatagcctaatatgcacgaaaacgagtttttaacttggtttgaagcttttatcttgaactttttggtgcatttttttgccttttttgcgatttatttttttgaaaaaacggtaaatttttagaaaattttgcaactttttctaccatattttattacaatttccaaaaaattttccggcggcgcctatcggcaccgccggaccttcattttaccttaatttttgaaattttaattacaaaatgggtagaatttgtcattttttatctgagaaaaagatcgaaccggaaaatgcagattttttttttgcatcacaacctcaaaagctattggtaaaattaaaaaaaaatttcgcttttcgcattttcgcatattttggcttttcgcatttcgctttttatttttcaatttggcccatctctgctaccaacccctacctggagacgggaacatggaaacggcagatgaatccgccgagtttggcccaaatggaaagtaatggccaaggattggagatggtgccattgttggtggtgggctgtgccgcagagcatggttctgcgcaacaacgatggactgatttggctgacaatgagcaatggcacgagagggccccggcaccagcggagtggactgtgcaattggaagaccctggaaaatgaagaaaaaattcataaaaagccttctataaaactttcgaggtgtttgttcccccgcctcccgctccccaggccgcggaaaattttaaaaaataataaaatttttcgttttctaacttttttttcaagtgctttacgatagtttactccccaagtgaacattaaaattaaaataatttttttgaaatttttctgaacccttccatttatcgaaactctttaaaaaaaaatcaaaataatttttgaaaactcgaaattatttattttttaattaaattattgcttttaccaaattttctttctcctcaatcctacgctttttgcactttgtctgttcttcattggtctgctgatgctgatcacttttggctttatcgtctgccgcttctgttgtctggatcggttcttgttgatcagttgggcttgtcattttagaaaattataagtcagacttttttaaaccgtcaaaaaatgtttttattaaaaaaataaataactaaattatgcaaattttatccttttccccagggttcatcaatttcatccttcccatttaacaaaaagtttctttaattattttttaaaattcagttgatggaaaatatttgaaattttcatttctgtcccctcctctacccat

SEQ ID NO: 25808 - DNA, 1923 bp, Heterodera glycines
  unsure (1)..(1923): unsure at all n locations
acaatagacaggaacccggacgaacgggactaattgtcccattttgtcaggattcatttgtcctgacattttacccaaagagaaatctcggcaaacgcaaagcggaatcccgcaaatttgaaattcccgggctctagaaaattttgtacaaaaaacataggtttattgcaggctaattaggattgaattataagtaacttcaaaatttcacagattcatttcagcaattactttttttttacataatgccaagcctattttacattgccaaaatgccatcggattgattttcttttgtaaaataaatgccaaattctattaaggcaagaattattctcttcatgcctattcacattaatgcccttttacacgtgttggacaatgcacataaattcccagcagatcctccaaaatggcattcattcatttgttttttttaatttctaaaaatgcgtcggattccttttgcccaactgttcattctgctgaacattataattgaaattgtcatttttgtggatgggatggaccagtcccaatttgaaatgattgactattatggcacaacggagaagaaagacattgaaaaagcaaaacaaattcgcaacacatttgtcaccattggcattgtgaaattggaaaaatgaaaaatccagaagaaattggtgaggaagaatccgctgaagaattggttaaattgtgtgaaaaatggaaaatgatggcattggcagtcgatgcatttgtggggggagatttaaatgtgaaaccacaatttgaactggtggtaaaacagcagctggacagaacccatcatcaactcctaatgagctcagcaatggaagcgatcaaaacagttaaccgggacttattcacatggggcaaagggaatggattaaaagtcgagctaatttttgatttttttttaattttatagttatttttttagattattttggtaaatgagaaggattgcgaccttgatcaattgttatggactgatacgagaaaaaatttggatgggttaagtgcaacattaaagtgttgtagaaggtttcggtgcaactcgggctcggtaattgaaaattataataaaatcttttttttaaagctaagatttattattaaattttgaaaaattttaaaacctgaaaattggtcaacaatttgcaatgctggaaaggatcacgagaaaaaagttactaatgaaccggattattctttgaaaaaagactttgtattattgcgccaattcgaccaaggaaattctctgaaacttgaaagatatattggcgttttgttaatggaatacaaaactcaaaaacaaatggtagcaacggacccatgtgaggaggccaaactgaaagtgatcaaactgatgaaagatgtacagaaatcattggacaaaaaggaaaaagatggagtgaccaaaactgacaaaggcggactgaacgaactgatcaaaatggagaaactgaagtcgaaaaccggtacacgcaatgacaaagcaaagtgatcggagatgaaaaaagactgatcacaagtcaaaatggtgatcagagtgaggaaacgaagtgaagagtttttagatcattagtctgttttgtgcactatcatcatcacttttcttttgggtggcttttctttctagcataaatttttccatttccttgaccaaatgctttaatccgattggatcaatgaaaacttttaaattttgctaagcaataggatggaatgtaaggacatgtaaatgcgccgtaaatggtttagatcatgtggttgtttatgtaaaggaatgtttaattaagtgtcatttangcattttgtcaaagtttatcctttacaaaattcgacaatttatatagnacgttttcgccacccgtataaaaccggtacaaattttttccttataaaaaatgcctt

SEQ ID NO: 25809 - DNA, 1164 bp, Heterodera glycines
tttgaaaaaaaaataaaataataggagactcagaattttgaaaattttttataaaaactgatgacaagctaatgtgataaaacaggttaattcttttcctttcagtatccctgcaaagtttggggcgcttctgataagtttatgaaaaaaaagttaagcctaaactttttggcctgtttaaaaaggaattaaaaatttttaaaaatttattcatctccctttttgatagaaaaagcatcagagtgcctaaactagcatgtaaataaaatttggtgcgtttcagagcattttctgaaaaaaatatttatgaattaattatgcaaaaataaaaaaaaatttctaaaaatttgatcgtccataaataatttgtaattgatcaggggctcaccaaaataaattttcttagaattttttgcctggtggtacgcttctgctcaattagcaaaaaatatgagtgattgaattttcactaaaaaagttaagcctacattttttggcatatttaaaaagcaattaaaaaatttttaaaatttaatatctgggcgcatcggttcggggggactgccccgaaaacaaaaaaatcgattttttcaagtgtccgtttggggtactcaaacaattatggggagcaaaaatccaaggtaaaaataaagtagaggtatatcgaagctattcccgaaggattcggtctccccataaatctgggcgcatcggttcggggggactgccccgaaaacaaaaaaatcgattttttcaagtgtccgtttggggtactcaaacaattatggggagcaaaaatccaacgcagaattaaagtacaggctatagggaagctattcccgaaggattcggtctccccataaatctgggcgcatcggttcagggtactgccccgaaatccaaaaaaaaattttttttggataaaaattatttaaatgaactgactagataatatttaaaataggttatttctcttcctttcagtatccctgctaagtttggtgcgcttctgatcagtttctgaaaaaaaagttaagcctaaactttttggcctgtttaaaaaggaattaaaaattttttaaaatttattcatctccctttttgatagaaaaagcatcagagtacctaaactaacatgtaaataaaatttggtgcgttccagag

SEQ ID NO: 25810 - DNA, 1353 bp, Heterodera glycines
  unsure (1)..(1353): unsure at all n locations
tcccgaatgcacaaaatcactttttatttatgtatttttaatttaacagatgataaaaaggtcggataaattttattataatagagcaaaaaattgcggattttttaagtatttaaaatttcaaaaacacctttacagaccgagcttctgaatttttttctgaaaaatcgcaaatttccagaatttctggaataactttttttgtttttgtggtataaatttcaaataaatctcataaaattctcccgattttttactattttttatgctgtaaaagagctgaattggaccattttgaggcgagttatgaattttcaaagaatcactttaattctcaaatccaaaaaattgacgatttttcaaaatttttttaccaccctccaaaaaatccaaaacgcaatataaagtgcatattcgtgttcagcacctcaaattagcccagaaaagtattttttggcaattttaggagcaaaaaagtttctcatgaaatgcaaatccatggggtcccccctttggttttgcatttaaatattcatttttattttatatctttttttatattaaagataaaaataccggataaagcacattagatagagcttaaaattctctacaaaaatgctctaagacaatttttcgttaaaatcaacccctgacgagttataggcccgggactgaaatgtcccgctcaagccaaaaaaaatttctatttccggaaaattttgaaattttttcaaaaatgccaccaatcgatagagctcgaaaaacggttgcttgaaagtggtctccgttttcctgggaaaaatcggcaaaaaataataaaattcaaaaacgaaaaattttcgagggggcctagctcgaaaaattttgaaaattttcaaaatctgaaaacgccatcggatgcagctttaaaaactacacaaatactcaagcggcgccaacccgctccgcttaacccccagcgagttattcccgaaaaacggaaaatgccgaaattgggtaccaaattttgccattttctgcagcattggcatttaaagatagccccgccaaataagcgccaagttttcccaaacattccaacttaaaatcctacctccaagcattttccgctcccgcttcttcccgcaaagttacaggccaccaaagacggacacaaaaaatttcacgccgtttcagcgccgccggcgctgaaccgtccaccggagcggaaaacccatatttttcccagatgcgcctcaaaaagttgtaagacccttccaccactttcagacccctcccgacggccgttcgactcaaattagtttttaagacgnagtccccctttttctctatggtaatataaacgagcgt

SEQ ID NO: 25811 - DNA, 1236 bp, Heterodera glycines
tattcgtattacttttcctcccttaaagctttataatgaaagcgtcgttgtctatttaggatttgccgtcgcaattctgtaattccactttggaatccaaaggaatttgattcgcttttacaaaatagacagtgccgaaatttgtagatcggctaaaccttaactgaaacataccatatcagcgagacgccatgctgatttgttgtaatcataataaaaaggcccttattgtttaattctgcctttcctataagcacaatgtgtttgatgggctctacaaaatattgcttctgcaaagcaattattttcttggaggctgtaattttctgtagtcatttgatatgcatctgctatttttctagtcacaaacaacaatatttttcggcccgaattttataggcgtgaaaagtactgatttccaacttctttctattcggatacacccaaaatttgaaaagcatctgtaatttagcctcttttaaatcttaattttctgaaacccgaatttagaaaatatgaatgtatttctgcgacgccttctatacttaattcatccataatgggccaaaaatcataagttaagaccaaaagagggattttagtttcagccggaatttctataaaaatgttcgtgtgtaacctatctttgtctattctgataagtaagaaattgaaatattcgtattactttgcctcccttaaagctttataatgaaagcgtcgttgtctattttggatttgccgttgcaattctgtaattccactttggaatccaaaggaatttgattcgcttttacaaaatagacagtgccgaaatttgtagatcggctaaaccttaactgaaacataccatatcagcgagacgccatgctgatttgttgtaatcataataaaaaggcccctattgtttaattcggcctttcctataagcacaatgtgtttgatgggctctacaaaatattgcttgtgcaaagcaattattttcttggaggctgtaattttctgtagtcatttgatatgcatctgctatttttctagtcacaaacaccaatatttttcggcccgaattttataggcgtgaaaagtactgatttccaacttctttctattcggagacacccaaaatttgaaaaacgtctgtaatttagcctcttttaaatattaattttctgaaacccgaattgagaaaatatgaatgaaggagagcgacgccttctatacttaattcggccataa

SEQ ID NO: 25812 - DNA, 1429 bp, Heterodera glycines
ccccccccccccccactccgtcaattcattttgccaccccccctaattctttttgatttcacataatttataaataatattttcatctttaattagcatcatgccattttcattctctgttcaataatatgttttgtattcatgttgtattattttccccattttgatattaaatatgacaatagttcagttggatgcttttttacgtttcatctttcgacgatagtccaaaaaataacaaatttaaaaatagtaaaaaataattacgccttttccagtgaaaataataaatggaaagttgaggataagggaagaagaaaaataataggaaataaaggatgagttgagaaggagtaaagcttaccggaaaagggcaattgaaaggaaatgagggaaaggtgagcagaagagggaaaacagagagaaaagcaacaaaatgaaatgggggaaaagggggactggcagagaaagagagaggggagagagagaggcaggagagagggacaacggaagggagagaagagggacggaacaaattaacaaacaaataaaagtgttgttcggttggcctttttgttgccatttgcaaatgcttataattagcaaattggccactgattggtccggcgttccttgcgttctgttccgatcgcttttggctgtttatcgcttccttctcttcccttcagaacattttctgctgatttgtgtcgccgacttcggccattgtcgccgtttgcgtcgcgttttgctgcgcggcgggcggtgagccgagcagcgcggaggccaacttttgctgggcggcgatcagctgggcgatcagttgctgttgctgatcagcaacaatggccgactgagcgaagaacggagacggcacagtgccgaaaagaagggacgacggaaaggcgggcggaaatagtccgccgccgacggaggacggcgaaagcggcgagtcgggcagagaagcggcggacaaaacgccagatagaagagacagaccgttgagcggtctgaacaaacaaaccattgcaaatggaagggggcagaggaaaagcattgaggggaaaaggcagtgatggctttgagatcattggatgaaaggaaagataaggcagcgaaagtcagtttcagtccctacattttcagtccgggaagttattacgacccccttttcaccgtaatttatcccgttctattcaatttaatgatggttcatccgctctccgactccgcttaccttcctccgttctgttgagggatcatcggttcaaaatgcgcagtcagacccgacatttttggcgttatgtttgggaaagtgcccggtccgtgcccgctgagagtgttctgcactttgcgctgctcccatgccaccaatgtgcgtcgcctaaagtaagattgtcttgatttcccagaggagtcattttctttt

SEQ ID NO: 25813 - DNA, 1828 bp, Heterodera glycines
  unsure (1)..(1828): unsure at all n locations
ttttggtctcgagtctcgggttttcatctcggtctttgagactcaaaaccaagacttttttatacccctatgttttgcttttggtaaacattaatttaataaatttttagtgacgtatactcatattcgtggtccagtggtttgtgattttgttgttttctttgctttggatcagtgccactccatgtagttgttttacgtttaattttctaaattattcctttttacgaaggaaattaaataattttctacaattaaaatcgcaaaattttgtcttttttggactaaatctattaacaaagtgcaataagaattcaaaattttccccggcggcgcctatcggcaccgccgtacccctaaaaagtgaatggatacggtatttggcagatttatttttatccttttttttttgtcgaaccattctaaattttatctaatttttgatataataaagcaataaattctatttattttaagttggcaaattcactatatgtggccatttgtaatgatatgttgtccttgattttgatttgagattcgtctaaagacaaacggaaactccgattgaaatgtttgacgcactaaaataattttaaaaattctttaaaaaacacctcgtaaattgcgtaaaattgtcttttttgatgacacaaattaaaaaaaaaggggaaccataaacccttattagtcaagaaaaaaccttaataccagttggaatagcaataattatagtagctgcactaaaataggcacgactggtttttttttttgaataaaaaaaattttttttagttatttttttctctttctttctacacaccaatgtgcaaagaaaggtattgcagcaatcaattaacaaacccaagcagtgattggagattaaattggtgacttgaccagcagaagtatgtagattaaataattgaaacagcgatggtgcaaaaagtgatcgaaacgtacgatgattgaaatgattaaatgatgacaaacttataaaaacaaacaaacaaataaataacaattgtcattaaaatgaagaaaagccatattattcggtgatgagaagggccctgaatttgaatatcgattatacagccagcgattatctagccatcatacaaatttataatatgataaaatgtaatacaaaatcctaaaccaattctatgaaaattaatgttgtgtagttaaagaaaatcggatattgcttttactatagaaaaacccaaaataaaatcagattttaattttctaatatttctcagaaattattctaatcagccgatcaaagccgttgaaaacacgtcggagaaattgccgcgaaatttgataatctaaaacattattttgtgttgttaccaattgcaaaccgtggaataaaagcgcttttcactgctaaacgaaatgtaattctgtcaaaaatgcagtgtaaacaaacagaaatggccagctttgtgaagcaattcaaaatggagcaaagtgccaaaagataggtaaataatggtggcacgtaatgacattaattagcaaggattcgtaaaaaaataattttatagcctaataattcattccacatttggcggttacatcaattagagcagaactatttaaaataattcgaaataagcaattaatgcaaaatagaagcacatccaatgagcgcgatcagcttggatttgcattttgaatttcaaataaaacgaaaaaaattaattggaaaaaattattatttaatattaaataactgtattgtgtttaaatcagggttctcatctgtgatttgtacagaaatgttctgatttttggggggcgaccanaaatttgt

SEQ ID NO: 25814 - DNA, 1418 bp, Heterodera glycines
gcaaaaaacatagcatgttcaatgctttatcacttctataatacttaaattaaaaattttagaaaatcatattgtgatagagaacaattaaggctattaaatgatatcacgaaatattaatttggtatgaatttgaaccaggctatgaatttatatatattacccattatttgttttcaaacccattgacggatttaagaaacgcgctggcggatttaagaaacgcaccagcacctttaaatgcattagtggcagaaggatgcgatctcaaatctcaaaaagcgggcacagagtcaaatttagcaaattgttttttgccccattttacaagtacttaaccactggaatagtaaacagccggcgggaaattccgaaggtaccatcagaaagaaagcgccgcaagaaactaaggttgagccccgacccctcgggggcaaaatgtcgggggtcggggaccccgatcgggtagtgagtgatcaacaaaattttttaacgaaaaagcctttttctttttaaagctaatcttcctttttcactttaatcatctgattcaaattcattcgttggcgccagtaaaagcgtccaaattggcattttataaccgggcattccgatgctccaaaaattgtcagaattcgaaaatcggaattccgagattaaaaagtttttgcggtgcgcttttcaaaattttttttagaacatggggggaggtccgggcgtaccgttaggaaccgccataaaaaattttaaaaatttgagcaatttgtttaacagattttgcccaaaaaattggcaatatttgcgatttcggaacaatttctaggaaaaattaggtgttttggagagccgacggtgccgataggcgtcgctggaaaaatctttcggaatttttaatgaatatcttaaagaaaatcttttcaactttcaaattccccccttcgtcgttgaattaacttttaaattttacaacgcttggagtccttgattccggggggggggcacatgtcgggtcgggaaataggcccaaaaatgtcgggggccgggcggctcggggtcggggcttaaccctagaagaaacctctaacttttgtcaaattcttaaagtaagtatttttcttacctttgtcctaggattttatcaacgaatagtactgtaataataaataattaaattaataataataaaacttcaaaacccaaagtatttcattaaaaattctgttaaaattagcatggatttgttaaattggcttttatcactccctaagcttgatattttacctttttttaatttcaatgccggaaggaacttccaaacttcccactttccgtgtacaaagatgtcaaaattgttttcccttttctcgaaattgccccctttccggtccgttgctttcttccaaaaccgttttaaataa

SEQ ID NO: 25815 - DNA, 2780 bp, Heterodera glycines
gccgcggtgagctgttgaattgtagcgtcacccatctaaccacagctcgtagactttcttctcagctcgagagtactcgttttaaaaagtagtgtcgttcaccactacaagtgggtgcgcgtggaagagctataaacagcagcgcaaaaaaggctctgatttgaaaaaatggcagtccactgaattgttagctgcccaaagttcgattgttgtcgagacgttgccaattgttacgccccaaagtccaaaggggaataaaacaatatttattcaaaagagaaaaggacaagggcgaacggggtcagagatatcgattgggaataataacgccaaaatataattaaacaaattatcggtccaatcaaacaatatcatatctctactcattacagtgtatgccatgcgacagtgtccattttgggcattaatcttggcaaaagataatggctttaagtcctttttttctcctcatttggcaggattaattaagtgtcattgtccttatttccaaaaattgtccttggtcttgttattcgactaattttttggagaatttggtaatcttttaattgttataattttcctgttgtgccaacaagcgacccaccaaatgccttggcatttttgaaccatttgtaaaatttattatttaataggcaataaagaccaaacactaataataaatacaggtcagaaacacgccttttgcgcgtcaatttctgctcgactgggccaagttggaattttcacagccaaaattttcgagcgcagacaatggcgcattgcaagtgaaaaatgagaacgaaaatgaatataaattttaaaatatttaaaatgaatttaaattttaaaatatttaatctaatttagctgcatattctgaagacagttttgccaaatggccaaaatcaaaattgaggtgagaaaggggaaaaatgccgaaaaagttgagcataaaataggccaaggaaaatgtgccaatgatacagtacctaattgagcctgacatcgcaggaacagcttaaaaaactttcattacaaaatcacgttttacatcaataagagtactgtgtgtaggcttctttccctacaaaacctattttctaggtttttatttttagagccaaaaaagccttaaaattaaaaaaaacctattatggtttttttcccaatattaacaaaatgcaataaaaacgaaaacacactcttaagaatcgacccaaaattttttttcaaaaatacacccctaaaatccacgaaaattttctgaaaatacaccacctaataaataaaaaattttctcaaatattgatcgccaaatctaatcagtgaaactacaccaaatttgaaaaaaattaataatattttggcgacatgtccttagtccaaagtttgaagatactatgggtcaagcccagtgttagacaaaattgctcataacgccaaatagcgtaattggcgtaaattatttcgcgctaattcaaatttacgctgatcactgccattatgattgtttattttgatcagtcataaccttcttcatttccaactaaattgaacaaaatttgtatctaaaaattgtttttgaaaaggagagtcttttttaagcgaatgttaagcaatttaactcatttcaaatcactcaaattttttgaaatgaaaaagtgaaaaaaatatttataagtgaggtgaaaatttggtcaaaaatctgggtagttgtcattttcttggttgttctctacgcctcggtcctgcagtgcattcaacatcgtcgtgtgcttcaccagtttttcaacgatcttctcttgtgtgccgagatgagagtaacgaccaacctaaaattaaactttcaatgatcaaaaaaagttgaagcaccaaattgttgcacattctgtgcatctgttccattccttgttcgctgatcaaaccccaccaaagatgagagcgggcagaagggacgacatgggcagtgagaaggtgcagcttcggtcggacggggtaacgggcgatgtcaattgatcggagttgctgccagtgcgcgtagaacaacttcgtccaatgttcaagcgaatttagatcctctggatgaagaatttaggcacgcgataggcggcaaatgtggcggaggtcattcatggcgtcgaccagcaaaaatttcaacggtccagcaggaattggtgccgtgaataaagcgaagttttcgtggtcgaggattttgcagatgtcgccacctgtcaaaagttgggctcaacaacccccaccctatccccatcattctacccgtgaattgttttgtccgagggtgccgtcgcacgccgacatcagacagtcgtttccgaacaacgtcccccttagcgtccgcttccgaacaaatggcgtcaattattcgctggtcattgcctgtaaattctgaatcttttttaaattcgttttcttcaccatgcaaaagatggaaactcggcggtacaacattggccaaagcaatgttgacgagtggagagccggtgtacgaattatggggtgggggatgcgacgggcgggcatccacaattttgtccgacaattggtcccgccgagctgtacaaagcggacaagggaaggtcgccgcagatccctggtgccccatcagcgccgaagtgaatttgaggtcggcatagagaagcctgaaaataaaaattagcatttctgatttttatttctttacatttggactggaatggtccgcttcctcccggcgatttcgaatgcaacggttttccggctggttcaattgcgcaaaa

SEQ ID NO: 25816 - DNA, 1514 bp, Heterodera glycines
attgttgacgacttttgacacttttcaccattaacgtggaaaaaatgaataaactaattagtttgtttagttgttatattacccgctttatatcgtcatggaccaatataaaagcggtggaaatattcacaaaaaagcactttcgatttattcgactattcaattaaacaatttcaattgaaaatgaattgccaaatatggttcggccaattgatgtgcattatgttgctgatggtgtccacggattatgttgtatcccaagacgattcatctacatcctcaagctcgtcaacgagtacgtcaacttcgaccagtactagcacgagcacatcgaccacgaccccaagcacaactttgaccagcacgtcgaccagcactgcaaccacgcccacttcgacttcgaccagtacctcgaccacaccgacttcaacttcaaccagtacgtcgcccagcacttcgaccatcccaacttctacttcgaccagtacctcgaccacgccgacttcaacttcaaccagtacgtcgaccagcactttgaccaccccaacttcaacctcgaccagtacatcgaccacaccgacttcaacttcaaccggtacatcgaccagcacttcaaccacgcccacttctacttcgaccagtacctcgaccacgccgacttcaacttcaaccagtacgtcgaccagcacttcgaccaccccaacttcaacctcgaccagtacatcgacatcaacgagttcttcgacatcaacttctacgagcacctcaactacaacacccacttcaacttcgaccagtacatcgaccacaccgacttcaacttcaaccagtacatcgaccacaccaacttcgacttcaaccagtacatcgaccagcacttcaaccagtacttcgaccacaccgacttcgaccagttcttcgacttcaacgagtacttcaacgactacaccaactacgaccagcagttcgtcaaccacaactaatccgtcgtccagcagctgtaccaacgcggctggtgacagagcgtgcaacttttacaagaataggtgcaaccgattttcggcatggcttaaacagcattgtgccaaagcatgcaacatgtgcccatcaacgaccaccagcacttcaactacaacctcgacttcaacaagcacctcatctaccacgaccaaatcgtcaggtggttcatccggtagctgcattgaccgtattggtgcccgactgtgcagccgttacagtaggatgtgcaaccgttttggcatttggatgagactgttctgtgccaacacttgcaaaatgtgttgaaaaaacaatgaaaacagatggatgtgaggaggaatttgtgaagaaaaagataaaaattaaacaaattgaaaagatatttatttgttaattgaatttatacacaatatatatttgttatttaaattttatgttttgtttaaatgggataaaattatgaaaaaattgttttctaagaaatgcttcgtttttgaacaatttatgtgaaaatt

SEQ ID NO: 25817 - DNA, 1486 bp, Heterodera glycines
atgccattcccattccccccccaaaaatgccattcatactctcattaactttttcttcattcagttgactttttttgccgctttcatggccatcatgggcaatgttgagcagcagggcaagcactgcttgttgctccgccagcaacaaccgcctcgggggaaagaagcgcaagtttcttccgactcattaacatccattaatcctccgagcggcacatcatcatcaccatcatccacatcattatcaaccgccgctgatgtgccgtcccaatgcaacgcaaggcattgccaacatccggcaacgccgacaacggcacagattactgatcaggaagaggtggcagcagaagcatcgtcggcaagagctgctgatcatctgcagctggatatcgatcagaccagcatgaatgcctcctttgacagcgatcagaccggcaaggatgaatatgatcagagcactgatcagagatgggtgcttgatcaaactgtaggcagcgatcggatcagtgatcaatatttgagggctgctggtcaaaatcgaagggctgcccggaaatgggagattgatcacgatcagagcgctgatcagaactggaacagtgatcagagccaaattcctgtgcagcagatatggaagagagatcgaaatcggagcccatatagaaatgatcagagtcggagcactgcgcagaatcgagcgactgatcagaatttgagaaatgatcggaattgggcgattgatcagtctgagaatgctgatcataaatgtggtgccgatcagcgatgggtcaagattgatcagaatgggctggacaataatcggctgtcgtcttctgatcacacatttgtctccccttctccaccttccactgatcatcatcatcatcatctccatgcttccaatttttcccatcgctttttcggccactattttggccctctgctcctccatccgatcgttcgtgcactgatcactgttggctacatggcttacattggcattgcgatcgctggctgtatgaattttcgcgaggggttggagccaagccacttggtcacctctgatcattacattgcccgctactttgatgacatgaaaacattttggaagatgggcccacagcttcatattgcggtgatttggggcaaaagcatgggactctgatcactttgttgattacaattagtgttaagccatgttggtctcggttccttttggtttgcatttatccgatccccgaaatattccgcctcgaaaattccggaaattgtgaccattttgtttcgagataaccctaaacggttactttattaattagtagtcaatgataatcagagggagaaaagaccaaccgatcaaaataaaacgggctcatcaaatcatccgggagcgaccatctctgatcactttttttggagggggtgccaaaattgaatttgattggtcactgtggcataataaccaactgatgattggtgattggtc

SEQ ID NO: 25818 - DNA, 1452 bp, Heterodera glycines
atttttaatatatttacattctgaacagcttacaaaaacaaatgcatttaaaaccaattgacaaataaatgaaaaaatttgggacaaacatgttcgaaccattcaaataatcttggtattttacgatagctcttgtaattttctattatgaagaaaatttaagaaattttatttggtttcaaaaagttatgacatttttgtttgaacatgttttgctacaagttattaccttttttttaattcccttttgcttttaggaaaaaaatattaatttctctttttctttgaatttccagatttttggaggatattaatcctaattagaaaaataatcaatatgaaataaaactaattatttaataacaaataaaaaatacttttgaattatattttcagaaatttttcttgtaattagagcaatctgacaggctatttatgatatgtacctttattatttaatttggttttttttaagaaaaaacataaattgaattgttattatgtttatatccatgaagaaagtgcattcatccctttcatggatcatttaataaaaaatttttgcttgttcttgaaatagagcggataattcacataaaatatttataaagctgaaaatgtaagttatgttatggaaaaaaaaggtttttaaatttggcaaaatgttcagaaagggttaattttacttcttctatgaaccaacaacaatttttctgacaatcaaaaaaaaaccacaaatttctcattctgctggtgctttctgatgatcttcactcccaaaattgtccagcaaatccaaagtctcatttatggcgcggtccctctgaatatttacaaattgaatattaaatgtatttaaaatgattttaatatttattatttttttacctcattctcttgctgattctgatcattttgtttaccggtaaaatttgccaacaaatcctgcgttatttttggcactcgcttttcatttggcaattctctttgttcacttggtcctgccccatcggttccatcattaattcggcgtcctaattttttttagtaaattaaaaataaaataatttattccaaaaatatttttgatactttttgaatcggaatatttttttgttctaaagcatttccattttaattctgtcgatgatccattgttatgaatgaccaggttataattgatgtcaggctcaaaaatattgctctgcttaggattggggcattttgtttcgcgatatagttcactcttaattaataatgtattttaattatattttatttttaattaataatttatacttaaactttatcattatatttaaaaagaatttgttttttcattccaatgaacaaaagattttatttgggctttttatataataaaagattttggtactttcctgctttgaaaggcacaccccctttttaaaaaaattgcaacaaagagccgtt

SEQ ID NO: 25819 - DNA, 1527 bp, Heterodera glycines
  unsure (1)..(1527): unsure at all n locations
gtcagttcatttaaatatttttatccaaaaaattttttttgggtttcgggggcagtccccctganccgatgcgcccagattatgggngagacgaaatccttncggaatagcttcactatagcctgtacttaatttctgcgtgggatttttgctccccataattgttggagtaccccaaacggacacttgaaaaaatcgatttatttttgttttcggggcagtccccccgaaccgatgcgcccagatttatggggagaccgaatccttcgggaatagcttccctatagcctgtactttaattctgcgttggatttttgctccccataattgtttgagtaccccaaacggacacttgaaaaaatcgatttttttgttttcggggcagtccccccgaaccgatgcgcccagatttatggggagaccgaatccttcgggaatagcttccctatagcctgtactttaattctgcgttggatttttgctccccataattgtttgagtaccccaaacggacacttgaaaaaatcgatttttttgttttcggggcagtccccccgaaccgatgcgcccagatttatggggagaccgaatccttccggaatagcttccctatagcctgtactttaattctgcgttggatttttgctccccataattgtttgagtaccccaaacggacacttgaaaaaatcgatttttttgttttcggggcagtccccccgaaccgatgcgcccagatttatggggagaccgaatccttcgggaatagcttccctatagcctgtactttaattctgcgttggatttttgctccccataaatgtttgagtaccccaaacggacacttgaaaaaatcgatttttttgtttcataaatatttttttcagaaagtcatgcgcacccgtccgatctggcaagttaagcaacgattgctgactagccaaaaggttcggtgccgtgatgaaacgaaccagcactgcttaccccgcggcacccggcacggtcccccgaaggaatggatttaattaaattctctccttcggggatttttttccattaggtcgtccgttagcgttcgattgctctagtcaatttttcaaaatttttgttgaaatatttgtcgtgctctgaagggcgtgggaggggggggggcgaaggcccaccacgaggccgcgaagaggccgagtgagtaccttcggtgcaggaaaattattaaattttaaaaattttttaattgctttttaaatatgccaaaaaatgtaggcttaacttttttagtgaaaattcgatcactcatattttttgctaattgagcagaagcgtaccaaactttgcagggatactccccggtaaaggactaacttacactgaaatgagcgccgagctagctggctcaaaaaaattttcgaaaatctgagtctttcgtttttatttgttttttgcataattaattcataaatatttttttcagaaaatgctctgaaacacacccaaattttatttacatgctagtttaggcactctgatg

SEQ ID NO: 25820 - DNA, 1323 bp, Heterodera glycines
cgttgcacctgactgaccaacgtgggagtaataagagtcatgttttgaaaagtcattcttaaaactgcttatttaaaattctggcattttttataaacagtatgagaatatcaattacaaaagtgaaggtttgccataattatgggcaattgtaactgttccaaaattctatgcagaaaaaagcaaaatattcaattataaaatgctcatcctagaaatcaatgctctgattatgaaaaaatgtgcttaaacaactcaatagttggagccgccttttgtatgacatggaaattttggcagctttgcaaaaaagaggagcataaaagattttccatgataaaaagcaaaaaattaaatgtacgcccaaaggtctaatcgagaaactttgaaaagtttgggctatttaagcaagcatatgattagcctatgagctatgatgaacgacgttgcacctgaatgaccaacgtggagtaataagagtcatgttttgaaaagtcattcttaaaactgcttatttaaaattctggcattttttataaacagtatgagaatatcaattacaaaagtgaaggtttgccataattatgggcaattgtaacagttcaaaaattctatgcataaaaaaagcaaaatattcaattataaaatgctcatcctagaaatcaatgctctgattatgaaaaaatgtgcttataacaattcaatagttggagccgccttttgtatgacatggaaattttggcagctttgcaaaaaagaggagcataaaagattttccatgataaaaagcaaaaaattaaatgtacgcccaaaggtctaattgagaaactttgaaaagtttgggctatttaagcaaacatatgattagcctatgagatatgatgaacgacgttgcacctgaatgaccaacgtggagtaataagagtcatgttttgaaagtcattcttaaaactgcttatttaaaattctggcattttttataaacagtatgagaatatcaattacaaaagtgaagctttgccataattatgggcaattgtaactgttcaaaaattctatgcagaaaaaagcaaaatattcaattataaaatgctcatcctagaaatcaatgctctgattatgaaaaaatgtgcttataacaactcaatagttggagccgccttttgtatgacatggaaattttggcagctttgcaaaaaagaggagcataaaagattttccatgctaaaagcaaaaaaataaatgtacgcccaaaggtctaatcgagaaactttgaaaagtttgggctatttaagcaagcatatgattagcctatgagctatg

SEQ ID NO: 25821 - DNA, 1173 bp, Heterodera glycines
cacaagtcaggagagggagatggaagtgaccaaactgacgggggcaaaagtcaaagtgtggtcccgagtttggaatgagacggtgtcccaacttcaccactgatggcatggggtgggcattgggtcggattcgttcaccgccctttcctccaaaggatcttccgcgcccgaaattctgctctcggtgattgaaatcttcgccaacaatttcgaggcgggtgaccttgggcccaggtaaacggagctccgttgtccattcattcattcattcactgctccgccgtccctttggcagcacaatcgtcggcagtgccgccttcaacttgttcatcatcgtcggcatttgcatcatggccagtccatcccatcccatcccccgcttattcctccctccttctgctgtttaggtgattccctccaatgaaatccgccgcattgaccgtgtcgacgtcttttgggtcaccgtcctttggtcgtccttcgcttacgtttggctttttctcattctttgtgtgttctctccgaatgtcgtcgatgtgcgtttaattccttgatgcttctcaatttgccatttttctaaggtatgggaaggcattctgacgttgattttctttcccctcaccgtcgtctccgctttcgtcgccaataaacacgcaaaatcatttggcaaacgcattctcaccaccaaagcaatcacttcttttcgccacacgccccggctgagcaaacaaaagcggagagacagtgccaagtcgaatggcaacggagtgagcagcgacacggagtaagaaaaaaagaagaggggggggggaagattggcaatggcacgggaaatcattgccaatggcactgaaattgggcaaccaatgccattgaattgtcgcttatattctccaaattgaccaatttgtagagttgcgcttttggaccaattgaatggcgattcgaatgcacttgtgaaacagaaacatttcttggaaataatcaaaagacttcgaaatgaaaatccgaatttatccgttgcggagttgcagcaattggcctcttcgttaattttcaccgaagtgccaaagagtcgcgccttttaccgaattcaggggattcggagaatgaccggcaacggggacatctcgtcgaagaaattccgggagcaagcgcaagaggagcaggcgg

SEQ ID NO: 25822 - DNA, 1144 bp, Heterodera glycines
  unsure (1)..(1144): unsure at all n locations
aaatgacagaagcctcgaatgttagttatattggcgtgtcacaaaatctcttntcggaaaaaattttcaaaaaagggttccgaaaaaaagagatagtcgtttttacatacgattattgaaaagaaggcgtaaatggctctgaagcgtccataggccgcagaccacaaagtaaaatgggacaacattcataaaaaaaggttggcctcaaaagggcccattcccaagctaatttcggaatttgctgataaaatcaaatagcctaaattatatacgcattataaaaaggaaatgacagaagcctcgaatgttagttatattgcgtgtcacaaaatctctttcggaaaaaattttcaaaaaagtgttccgaaaaaaagagatagtcgtttttacatacgattattgaaaagaaggcgtaaatggctctgaagcgtccataggccgcagaccacaaagtaaaatgggacaacattcataaaaaaaggttggcctcaaaagggcccattcccaagctaatttcggaatttgctgataaaatcaaatagcctaaattatatacgcattataaaaaggaaatgacagaagcctcgaatgttagttatattgcgtgtcacaaaatctctttcggaaaaaattttcaaaaaagtgttccgaaaaaaagagatagtcgtttttacatacgattattgaaaagaaggcgtaaatggctctgaagcgtccataggccgcagaccacaaagtaaaatgggacaacattcataaaaaaaggttggcctcaaaagggccattcccaagctaatttcggaatttgctgataaaatcaaatagcctaaattatatacgcattataaaaaggaaatgacagaagcctcgaatgttagttatattgcgtgtcacaaaatctctttcggaaaaaattttcaaaaaagggttccgaaaaaaagagatagtcgtttttacatacgattattgaaaagaaggcgtaaatggctctgaagcgtccataggccgcagaccacaaagtaaaatgggacaacattcataaaaaaaggttggcctcaaaagggccaatccccagctaaatttcggaaattgctgataaaatcaaatagccctaaatatatacgcattataaaaaggaaatgac

SEQ ID NO: 25823 - DNA, 1384 bp, Heterodera glycines
aaaaaaacacgaaaaatcatgaatacagagattcctaggcaggaggttgacaaaaaaaaacttgtaaaattggataatcaaaatttgcaaaattttatgcatttaaaaaacgggtgactcattcccccccccccttttcccccgtcgtttctccccgaaaaaaacaagaaattttttaataagaaaattttaagaaaaatttttgaaaattttcttactaaaaaatttactaagatttttttttacttaggaaaacttctgttttaaaatttttcgggggatgctcgcttaaaaaacaacaacaaacgcacagctgctggtccttgcacgactcgtcaaagctgcgctggcccagcacctgcttcaggtcgggcggtggcaaattctccgccactttttgcatggcccactggacaatgtcggaactgtggaaaaaggggaaggaaaaatgaatggcaaatatttaaaaaacatacaaacaaacaaaaaaagagaggaaacaaacaaaaaaaactcttcgggtgccactcccaaatgggggcaccccaaaacgtcgccggccgaaacgtcgccggaagactttttggaccataactttgttcattgtaaatcaaattaagcattcttggtgttgttcgatagctttatgtgtttactattaataggctaaatttaaaaaattttcgttaagtttcaaaaaagttatggccagaaggaactcaaaaacctagtatttcgaactttttttgctctgattttttttgtacattaataaaaaattttgaaaaatttgtagattaatagagtttttcataagctttggaacaataccaagaatgtttaatatggttgagtaggaaaaaagttatggtccaaaaattcgcccggcgacgtttcggctggcgacgttttttcctggtccgctatttttcttacaccaaaactcattcaaaacttaatttatttataaacctcatatattactctttccggtcacaataataaaatttctcgatagtatttaaagttatagaatggaattgaattattttacttatttctttttttaattttttaaaataattttattttgaaattaaatattaatggattaataagttatttttatcttgctaaatatttttgggttttataaatgcaattattttttttagttttgttttttcaatatttcttcttaaatgaaatgttttgctagtttttttaattaattaattttggaaataattttcttatgatagctattgttttttaacttttacttttaaataatatagaatttattttaataagctaatagttctgggtttacagcacagcatattatgttatttttcatagctttttggtattattggatatg

SEQ ID NO: 25824 - DNA, 1408 bp, Heterodera glycines
attcaatcccttagtgccgggaggaccgacgacgaagaaacgttctgtgaaaatagtcaaaatcgaaatatgtcataaataaaaacgaacacgaactagtgaagagcaacgatcggtttgcgaacagattgtactgaggcattgcgaatgaaaggaaatgaaacaacgaaaacaaatttgaatctaaaaggtttaggatgatacctatgtacacaccgtttcaaaaaacgagacatgttagagaaaaaaaacatctctctttttggcgtactatttctttattttattaacaagaatgcaaatgaaaaatatgccactacgaatcgaccaaaaaaaaatttcggacccctaagaatcgtcctaaaaattttcaaaaaaacacccataagaatcgaaccttggcgttattttttctgcgttaattcaaaaacgacactgatcaatgatcattgcctttctctgcactatttattagagcccggacgggaccgggatcccgccgggattttgccgggactcccggtcccggttttttggacaaaccaacgaaccgggagtcccggaaaaacgggagtcccggtaccgggatcccgtcccggtccattttccaagtcccggtcccggtcccggccattagggccgaaaaaacgggactaaattatacacccctaagaatggtatattcgtggattaaaaggcaaaaatttatacaattttgaatttttttaaacattttgacaaacttttatgtaataaaaaggaaattttgttttcttaaataaaattttgtggattagtggttagtgcttcaaaactagctgtactttttgtatcagttcgatacccgttgacgttttcttttaaatttatttatttttctgataatagacaaaaacaccagggatggactttcgcgtttcgctttctcattttttttgtttaaaaatggtcaaaatttccaaattttccccctacggcgcctatcggcaccgccgaccccccccccctccccccattttgctgcctacatttttttttttgaaaaaagcgtgccctaaaaaagtgctttgaaaacaatccaagctaaaatagaagatgacaatttttttaaaaattttattatcaaaatttcacaaattttgaaaaagtcccggtcccggccatttcaaaattccgggctctaattttcacatctctaacacaaaaaacatcaaattcgtaaatgctaacaattttggttataaggatacaaaatcactttggacatttagaattaataaagaaattaatagttttagcatttttggtgaaaacagcagtttaggacttgagttataccgtgaataaaatttgaaagaatcccaactttcttctgaaaagtcaaattgctttaccaaaaaattttttt

SEQ ID NO: 25825 - DNA, 2122 bp, Heterodera glycines
  unsure (1)..(2122): unsure at all n locations
cagacggaggaaaatgtcganngggaagagggaggaggagcagcgaaagggaaagaatcaacgacgacgaccggcaccaccaccacttgtcgacgacattttggacgaggaggaggagcgaattgaaatttgagggagcaaagagagggggtggggaatgaatgcttttgagtgaattgattgaatgattgtttggtgatcgaagggaacagccccgccgcttgtgaggggaggggatgactttgagtgattgtgatttgatcgcaaaaacatcggatgatcaatttaggggaggggtgggggaattgtgcggaacattctatgtgcttggaatgtggcgtgacatttccatttcataaaaacaaagtttggaattttcaaatttatattacaaacgaattcccttttctcaccattgagcggcgctgtcatgcaaaatctttttattgttgttgtttttttttgttgattttttccataaaattattttgtttcctttgtttttcttacgaaataattggcatcgattttaattatattctatttttaaatgccatttgctgtgctcagaatattcattaagctgtaaatacaataataataatagcaattttccatcaaactcacagcggcgatgaaccctcgagggaatgttctggtcgttcatggtacgttttgactgtctgaattgtgacgcgggtttagattttgtgaaagttcagtttccccggaacagtccttaattttactatattagagtgcctaaatcattattagtccaatgttgtcggattatcgcttactaattccattcagttttgttcgtccgcaatttgtacatccgcgcgcaaaaggccgtggacgtgtacatgtcacttgcaacctctgggaaggggccatggaagagcaaagtgaccaccaatacagtgcgagtggaggtggacagcaatgcccggggcgagccaagccgatgggacgaacattgtgaattgtgaggaccaaatggggttagggaggaagcatcagcagttttattgttggaaaccccttccagtaaactgaacgacacggacacaaagctggtggtgcgcgtgaatcacaagacgatgctgggcaccaccgaaacactaggcgaactcactttggcgctggaggggatggcacgttttcagacgcccgtttggtttgcgctcgccaagccgggcaccagcggcggtaaacacaaacgcactcgtgcacataaattagtccatgtcaaaatattaccaatttttgcccgagggttggacttttttcattgaaatttcattttgcctgcccactttttacccttgttcgggattctactatttactcgatgtatttttttttgttaattgtccaaatccatcaatttcgtttagtcagtggaaacggcgagcgtggacacattcagcttggctatcagttcacaatgtccagccgggcaacaacatcatccgctttggaagtgccggctatgtccgtgtcgaacatgtcactgaacaaaattgagaaaggtctttttatttgggctcgttaattccatgaactttcgcttttttaataatcctattttggaatttttattttggagtatttttgtacaatttaatatttttcttttcgtgctttcattttggcaaatatttccactttttattttaaatcaatcccaaaaatcaatactctaatttgtcatgtgcatttttcattaaatgccaaattttccattccatttattttattttacaaatttctaatgcctcaagaaaagaaattcgaccgtctccgtcgcaaaatgcaacagttcggccgccgtggcagcaccagcagcaaacggacttctgtaatggacgactcgcagtcgctggcgtcgctttccatcgccgccggcgcaatgggcgagggcagcagtcggcgcagttcgtccatgtcgtccacgaaaaattctgccgcgttggccttctcgtcgccaactccgagcgaaaggcagcagcaacaactgcaacaccaccagcaccaacaacagtatcagcagcagcacaaccatcaccagattcagcaaaatggcgacagaaatgtcactctcttcgaaagccca

SEQ ID NO: 25826 - DNA, 1629 bp, Heterodera glycines
ttcgagaattgcgattttttttattgatcaatttcttttctggcttaatgaataattatgagaaaagattgattgactcttttgggaagacaacggaagtccctaattaagttgtcgagtccggggaaaacaacatattatttgatcattaaggaaaaaagaaaaaaataaaattatgtatagacgaacagtgtggaaaatattaaaaaaaaaataaattttttaaattatttttttagctattttcattcgacggacttttgcctgcaaattggttcgcctttcgcattgaatatcgcctcattttccgagttgggcccgaaaaaagagcaaaacattttgacgatcaattgatggtggacaacaacggcaacaacgatttgaccacaaaacaggcagataaaaaaaataaaaaatagaaaattaatttttacggaaaatttttttcccaaaaaaagtttcaaatttcacaacttttcctttattcattcacttctatctgatgggagcaccttctttcttctttttgcctgctttgactcttttgatcaaaaatggcatcccttttgtgtgccaaaaatgtgcccaaaaatcacagtgtgttgttgtaccggcggtggcggtggcggcggcggtggcggtggcggtggcggcggcggcaatgattatgatgacccccgtgggggctgtttgtgtctgtgaccttggcggaaaacgtcccaattttgaggggaggaaaccccgaggggttgggctggggggctctacctgaaaacttcctccccaaggcggccattgtttgggctactcaggcaccactacctaccaccactagcaacacaattcggagcaccaccaccacacaatttgggagtggctggtatttggatgagcattaattgcccatccgccgcccccaatgaattttgaaaatggtgttgaaataggcgaaagtggggggggggggaggtgtgaaaaattagcatagaaatttggaaaatccgctacgaatagaatggcaaatttacagacaaacacattaaataaaggatggcattagaagagaagaaagaagggggggggggagaattggaaatttatttaaaatcaaaaattggtaaaatgaaatttttgggagatttattaaagaaaataaaaattgattaaatcaatttaaaaaaataatttattacaaataaagtttaaggaattgaaaagttattttaaaattcaaaaatttaaatgaagagaaatttatgggagatttaatgaaagaaaatcattataatgcaattgattaattttcaaataatactttaattaataagacaatttaattagtttaaaggaattttcaaaattgtaaaacatttaaggaattgaaaagttattttaaaattcaaaaatttaaatgaagagaaatttatgggagatttaatgaaagaaaatcattataatgcaattgattaattttcaaataatactttaattaataagacaatttaattagtttaaaggaattttcaaaattgtaaaacatttaaggaattaattgtgcgaacccgaacagagcttcaaagtgactcagtcggccgagaacaaattttaaatgaagtgaaatttaattaa

SEQ ID NO: 25827 - DNA, 1326 bp, Heterodera glycines
aaaatttttttgtaatttcgttctgatttgttaacagactttcaccaaaaaaggccaattttttcaattaaattaagtcaagcgacgacttttttgctttaaaacactttttttacggcgtgtttttcaaaaaattttggaggatggacggagggtccggcggtgccgataggcgccgcgggaaaaatttttgcgattttaatgcgatttgttaacagatttttgtcaaaaaataaccaaatgttgccacaaatcttatattttcttaataaaatagtgacattatgccatcaaatttcaaaaatgtgagtttatttaagaaatcaggacaaaatttgatcgctacctccaaatcaggacaaatctgataaatcaggacagatcgcatccctggttttaacgtcaatattcataataataataataataaaatattttgggattattaaagaaaatatttcttaaataattcgactttttttagtaatttttactaaatacattcacattttcaaaaaatggagcacaaaatgctataaaacaaaaaaagtgctatttttcaataattataagtaaattttttttgattaaatttttacttttttttgaaaaagcattcaaacctaaaatggatgtgccttgttgcaactgtaatcaataaagaaatttttagtcctgttataagggtgaccgatcgatcatttcatcaacgagaaatcatttttaaaaaatttgttttattattagggatgtcaattttatgtaaatacatatttttttcctggattctccatgctctaaatagtaggaaaaacactttcttttttgtgtttgcgaacaaaaatcgggacttttaattacatatttttacatatttcgggattttatacaaatttggtacatattttggactttttcttacatattttgatttttttttacatattttgcgagttttttatggaaatttttggaaatcctcaaaaaaaatccaaaattttggcaaattttttattttttatacatattttgagaaatttttgaaaatttttagaaattctagtgaaaaaattttaaaaaactttttaaatgtacccctccaaaataattttttaaatgttaaaaggtgattctaaacatatttaggttatttttatgccattttacgcctatttaacactttacgaaggttttttcccaaaaaataaccatttaaaaaaattttatttacatattttcgtacatattttgggtttttatacatatttcttacatatttggggattttttttacatatttatgtacatattttgaccaatttttgt

SEQ ID NO: 25828 - DNA, 1565 bp, Heterodera glycines
  unsure (1)..(1565): unsure at all n locations
agaaaaatagcagatgcatatcaaatgactacagaaaattacagcctccaagaaaataattgcttancacaagcaatatttggtagagcccatcaaacacattgtgcttataggaaaggcagaattgaacaataggggcctttttattatgattacaacaaatcagcatggcgtctcgctgatatggtatgtttcagttaaggtttagccgatctacaaatttcggcactgtctattttgtaaaagcgaatcaaattcctttggattccaaagtggaattacagaattgcgacggcaaatcctaaatagacaacgacgctttcattataaagctttaagggaggaaaagtaatacgaatatttcaatttcttacttatccgaatagacaaagataggttacacacgaacatttttatagaaattccggctgaaactaaaatccctcttttggtcttaacctatgatttttggcccattatggatgaattaagtatagaaggcgtcgcagaaatacattcatactttctaaattcgggtttcagaaaattaagatttaaaagaggctgaattacagatgcttttcaaattttgggtgtatccgaatagaaagaagttggaaatcagtacttttcacgcctataaaattcgggccgaaaaatattggtgtttgtgactagaaaaatagcagatgcatatcaaatgactacagaaaattacagcctccaagaaaataattgctttgcacaagcaatattttgtagagcccatcaaacacattgtgcttataggaaaggcagaattaaacaataggggcctttttattatgattacaacaaatcagcatggcgtctcgctgatatggtatgtttcagttaaggtttagccgatctacaaatttcggcactgtctattttgtaaaagcgaatcaaattccttcggattccaaagtggaattacagaattgcgacggcaaatcctaaatagacaacgacgctttcattataaagctttaagggagacaaagtaatacgaatatttcaatttcttacttatccgaatagacaaagataggttacacacgaacatttttatagaaattccggctgaaactaaaatccctcttttggtcttaacctatgatttttggcccattatggatgaattaagtatagaaggcgtcgcagaaatacattcatattttctaaattcgggttcagaaaattaagatttaaaagaggctgaattacagatgcttttcaaattttgggtgtatccgaatagaaagaagttggaaatcagtacttttcacgcctataaaattcgggccgaaaaatattggtgtttgtgactagaaaaatagcagatgcatatcaaatgactacagaaaattacagcctacaagaaaataattgctttgcacaagcaatattttgtagagcccatcaaacacattgtgcttataggaaaggcagaattaaacaataggggcctttttattatgattacaacaaatcagcatggcgtctcgctgatatggtatgtttcagttaaggtttagccgatc

SEQ ID NO: 25829 - DNA, 1424 bp, Heterodera glycines
  unsure (1)..(1424): unsure at all n locations
agtttccgcagctccttaaagtccaaaaccattcccaaactcatcaaattgcncaatttgtcttctcccaccgattgnctgagttgggcgttgtattcctccaaatatttgttctgcacgtccaaatggcgtacactntggtattctccgccgcatttggccaaacagcgcaacaatctgtcacggccaattttgagttggtccgaccgcgacattttggcaaatccatcggacattttgaagttggaaaagaaagaaaatgttgaaaattgataaatggaaatgattagttgcactgaattggaaattcatggagagaaaaagttgaaaatgaaaataacacacaatttggcattttgttgcaaaaattagtgtgccaaccatcaatcattagatcattagaagtagcgttgggcggactaaaactttggggaaaaccgggactggatttaccgggatcagaaaatccgtgacctgggagacccgggaattccggctggtcccggtcaactctaaccagaattgaccagtgtactaccatatatgtataatggctgcatttaaaagggttttaaaaatgccatatttagtgcctgcgcatatttttgccgtaattttatgtctgcgcgccatttttctcacaaaagagatggtcaccctggggccaattaaccgatttattcaaatatttcatcgtcggccatcgctaattcaattaatttattctgagaatttattttaaatggatgctgctgacctttaacatcaaattaaataatattattattgattctaagtattagttaaaaagtaaagaacaaaatgttaatagatggatgagaagagaagatgaaagattgctcaagggaatggaaaaagttgggtaaatgaaaatgaaagaaaatgaaaaagaaaatggaagggaaagggacgaaaaaagggagaaatgtaacagaacacaaagaatgaccgatggttgatgagaatgacaatttgcaaaggttgtcataaatatgtaaattatgagtaaaaacgaaaacccaaaagaaaattctgaaaaaaagaagttaagttaaatccttaaaaataaagtataaattgctttgttgctataagaaattgcagtagaaccattggtttattaaaaatgtttaacatttaaaaaaattaaatcgtccggcggtgccgataggctccgtcggggaaatttttttgcaaattttcaccaaattcgttaaaaaatggcagagaagttgcttatttttcctcaagaattttttaattttcatttttttggggggggggggggtgggcacacccccaggctgaaaaaacgggcatagccatgaatcagtttaattatttaattaaataataattagttgtctgtaattttttctcacttaatttgaccacttaatttg

SEQ ID NO: 25830 - DNA, 1099 bp, Heterodera glycines
  unsure (1)..(1099): unsure at all n locations
tatagtaatgcgttttcggggaaaacctcatgtggaaggctgtagaaaaaagagatagccatttttctgagaatatctattcttagttatggagccattttccaaccgaccatttgtagggctcaaccgtatatagtaatgcgttttcggggaaaacctcatgtggaaggctgtagaaaaaagagatagccatttttctgagaatatctattcttagttatggagccattttccaaccgaccatttgtagggctcaaccgtatatagtaatgcgttttcggggaaaacctcatgtggaaggctgtagaaaaaagagatagccatttttctgagaatatctattcttagttatggagccattttccaaccgaccatttgtagggctcaaccgtatatagtaatgcgttttcggggaaaacctcatgtggaaggctgtagaaaaaagagatagccatttttctgagaatatctattcttagttatggagccattttccaaccgaccatttgtagggctcaaccgtatatagtaatgcgttttcggggaaaacctcatgtggaaggctgtagaaaaaagagatagccatttttctgagaatatctattcttagttatggagccattttccaaccgaccatttgtagggctcaaccgtatatagtaatgcgttttcggggaaaacctcatgtggaaggctgtagaaaaaagagatagccatttttctgagaatatctattcttagttatggagccattttccaaccgaccatttgtagggctcaaccgtatatagtaatgcgttttcggggaaaacctcatgtggaaggctgtagaaaaaagagatagccatttttctgagaatatctattcttagttatggagccattttccaaccgaccatttgtagggctcaaccgtatatagtaatgcgttttcggggaaaacctcatgtggaaggctgtagaaaaaagagatagccatttttctgagaatatctattctttagtatggagccattttccanccgaccatttgtagggctcaaccgtatatagtaatgcgttttcggggaaaacctcatgttggaaggctgtagaaaaa

SEQ ID NO: 25831 - DNA, 1806 bp, Heterodera glycines
ttccttccataatttctgtgtcaatctcttttccaattgtccattgtacgtcttttgttttgtctttgtccttccattggtttctttttttgctttgtttgtccaattttccatttgtttcgtcccttcttctaaacctcgtacatattctgctgtgcttcagcacctcctattaatggacgttgagttgatgaatgaatttgcgatgggacggattggccacgcgatgggcggtgggggggggtgagaaaatgggaaaatgcgaagggattgtcgccccccacccctttttatccctttgtctttgcccttctctcaatggcctaaaaagcttcgagaaatttaatggaaaatattaacagaattctttcccaataaatcaattttcacaaatattcttcatccaattactcattttaatctcttttttctttttgcctattttctgatgacgtcatttaaattttttttcatgctaatttcatttttagcaaatgcgtaacggcagaaaaaggacagccaaagagacggcagcgtcgcctcacaatcagcaggggacgagcgacgaattcggcacagaacgaagcgaagggaacggcggagggattggccaaggaattggccaacttcggaacggactcagttggccagtggaggtcataaattcaaaaaattgacttttgttctccagtacttttacattattttcagtggttcggcacttttcccattcgaaaagttacgtcagaaaatgtggcaaaacgattggacgcactgctcgaatttgaggagggaagcaatgcggacggagcatcgggcgggagaacagcacggcacgggagaagggcatttttgcggatcagggaaacggggattgaagtggcaggggaaacggaggacggaatggaaaaggtgggacaaaaggatggggagaagggggaaatgaacggacgaaatcaaaattagagggggaggaaaaaaaaggggggaaaggggcaaaataagaggggggggggggggggtgaaaaaaggggagggataaaatggaaagcaattagcaaattaatcagcatcatttatttccaaatttggcataattctctccgtttccattgcttccgccccatttgtctgcctttctctcctccctttgcttctcaatttaattttgggttcccttttctttctccccccccccttttttcccaacctttggccgaatcattcgcctaatccttcccccccccacccttcacattttctttaaaaagcatataattaattatctctggaagaagagaaaagagaatatttttcaattaattttcattttcaaaaaaagacggaaaataaataaataatttttccattgtaaaaattggaatgtctgccggaaatttgttaatgagagaatttaaaatgttttgtcccttctccgatatttaaattaaattttccaaaacattgtttgcccattttctcgaatattaaaatggcatttagcttatgggaaagtgccgttttggcttttatttacgcaactaatcggattaattcctcacactttacccaatttctgcaaaaatgcgataaaatgaggacagttcggctgatggattaagtgagtgagtgatgggaggatgatgatgaccttaatctcgcccacaaattaaggcgagagacgagaaaatgtgcaaaatcggcgagaaatgcgtttttttgggggtggggcgggcactcagccaaaagagccaacggacgaaaaacttaaaaattactgtaaccaaaaatgggatacgataccaa

SEQ ID NO: 25832 - DNA, 1577 bp, Heterodera glycines
cacacctccttgaaattgttgacccaatcgaagtccgtttgttcgttgtgatcttcgcaacacaatcgcttgggttggccatcttttatcggtgtgtgcaaccatttggacaatgcttggccagcagaaattgatgcattcgaactcatcaaaaccatcaccaaatgcaaagggcaacaaaccacaggaatcgattgaattcaattaatagattagagatcggaccggtcggttttttttcggtttttttcggtatttttcgattttcggtttcggtttccgaccgagaaatttttgagtttttcggtttttttcgaccgttcgaccgaaatatttaaaaaaccgaaacaatcgaccgacttttttgacaaatcagttggccatttttttaaaaaattcattaaaaattcttaaaattttcctccggcggcgcctatcggcaccgccgaccctccaaaaagctatcttttcttaaaaaattagcccaaaatctcaaaatttggtatttttagacaaaatctgctaacaaatagcattaaaataacaaaaaaatttcccggcggcgcttatcagcaccgccggccctaaagttatgactagagctggcaattaaggcaccaaaaagcgcaaaataccgaaaaaggcatgaaaaaaggcatttaaattttttattaatatttttagggagcaaaacacgtaaaaaccaaccaaaaaactaaattttgctataattcaatattttataatctttttcaataaggaaatttttaaacctaaaatttttatcaagaaaaaaaatgaattttggcgaacaagttttgtgaaaatttttcatttcataaggtagattctctgaatttttttagatcatttcttaggggtgtatttttccgatttttttgaatttttaatggaatttttcgggaaaaaacgccaaaaaaggcaccaaatcgctaaaactaatatttgtgggttttttagaatcaaggagcaaacacatttttttggctgccttttctaacattttccatacctttagtacaccattcaatagagtttcaatagctctacaatttactcagaggagatttttgctttttatattaatagaatagtttattgctttttttggaaaaaatataaaaattcaaaaaaaaccgaaaccgaaacgatataccgaaaatttttcttcggtttttttcggttcggttttttttcggtttttaaccgaaaccgttcgaccgagaatttttgagtttttcggtttcggttttttttttcggtttttaaccgaaaccgttcgaccgaccctcttgtccggtctctagttgaaatcagtgagaattgtcggtgaaatgagacgacgcaaattgtccaactgatcaccatcaggggtgtgcgaaatttcgtgtcgttttcgtgtcgtccccttttttcgtcactttttgagtttcgttttcgtgttttcgttttcgtccttcaagaaattttcgtttcgttttcgctttcgaatttaaaaattttaaatttttgttttcgttttcgtcagacggaattttgacgaaaaaagacgaaaa

SEQ ID NO: 25833 - DNA, 1309 bp, Heterodera glycines
  unsure (1)..(1309): unsure at all n locations
atgaataatttattttatcgtgccatagtcattatttttcttaaatgtgaagcaattttgtgtataaaatgtaattttttgaaaaatgaattttgacttttttgttcgaatccgggtttggggctcggaattgaccaaaatggatttcagaatcgggtttctcgaccctgaaaacctctaaaacaagtttattttcaaaaaaaattttttgaaaatctgtacacagataacccacaagtaccaaactttctccatttttaacactctcgaactgggaaactttctcgatttttaagacgttcgagttggaaaattttcgattttgagtcttagttttataatttgaaaaaacgaaaactttcaaccgtattaaatagattgatcattttcatctctgaatcaactaattttcccccgatcaaccgacatccaaaggtatcaacaaaatactgatcgaatcacattcatattcccaacaattttgtacattgataccaggggtgggacaactctcgcctctcgtctctcgcctctcgccaactctcgctatttttggtactctcgcctctcgtctctcgcctctcgttttttgcgacgagaggcgagagttgaaaatacacccctaaagattgaacttttgagcagccagaaaaattttcaaatttacgcgaaaaaaaaatcttaaatctctttctttccttccttaatgttttctctatttttggatagctccaattcaaatatggtctgctggctaacaaataagccttctgcctttcattatttttctcttgngttcattccccaacggtatacagaatttttttaataatttcttanactgcaatttaacannnacttgatcannntgtgacagtctgtaataatactcattaaaatttttatatttttttttttggtgggggccccccccggcccgcccacccccctttcccccccccaaattttaaaaacccaccgcaaaaaaagggggaaaaatgaaaaaaaaaaaaaaggtttttttaaaaaaaaaaatttctggaaaaaatttttttatttctgaaaaatttaaaaaatttttttttgggatttttttggagttgggacccggttaaaaaaaaaagacctggcccgcgtttttttaccccggcaaaacccccgacccccggaatttccccacaaacccggccccaccccccaactattattataataaaatatttttaaaatttttttaataaaaaaaaaaaggaataaaaaaaaaaaaaaaaaaaaaaacccccccctcccccccccccctccccccccc

SEQ ID NO: 25834 - DNA, 1480 bp, Heterodera glycines
atgcatttccgcatctaaactaaccccaaaccctctttttgagttttctctggcatttccgtgccacacatttcattaacaacattcaggatttctgtcacgaatggcattccctcatttttctctccttcttccgtctccatgatcattcgatcatttggcccaacactctttccactttattcgccatttttctcaggatttttcgtcacgaatgacggtccttcgagctcaagaaccttggcaccaagcgtggccattgggtcatcgcttgtctccaaaatcatcgcctctagggcatgcacctcctcttgttgtcgtccactttcgatcgacattacggggaaatttatttttattatttttttgaaacaattaaagaattgattggaattgaaattgataaaataattaatttaagtattttaaataattttgaaaatggttcgtccaacgaaaagcacaattcaaaagcgcaatgccgcagcggcgggttgcgccgtcattgaggcacaaaaggcaaggatggccgctttaaaagcgattttggataggagcgtgccggcggagagcggtgatccggcatttttcgagatttgccagcaaatctgggcaattcttggccaattcctgggtaagttttgccttatttggatggggaaggcgggagatggaggggtgggggggggggaaaggaaaacgccaaatgcaaaaatgaatgattgtaaggatggaaaagggaaaaaaaatgggaaagaaaaattgcgagatgactatcagtggatcggtgtaatggccgagaaagccattaggggaggggcataaatgtgtgcaattaatgtgtttgtatttaaaatgattaaaaatgattttaaatatatatatttatttatttgagggaaagtttcgaaattataattaaattaaattaattgtttgggtttaaatagtacttgaattgtccacaaataattggctaaaggaaaagttgaaaaaaatggaggttactgtaggtcactttaccggtccggctttaaggggaattgtggccagtgactttcggctatttgaccaagccagaggaactcgcaacggcatgggcaagcagtctgccggcgcaagtcggcctgcacccgctgcaccattcgctgccaatgaagcgactcgtgtcatctgtcgcgcacgagggtcttcacctcctggaatgccaacagggaagacagtggccgcgtgctggcagcagcacaaagcatgatcatggcccattttttcgtgcaaaatgtgcagaattgattgagatgtccggtggactgatccagccggaattcaaagagtttgaccatttgtgaattttgttattttataattaaaaatttgttaactgtgactttattatttatcagggtttaattagaaaataattacctctcataattttatagaaaattttaaaatttacaaagattaataattattattt

SEQ ID NO: 25835 - DNA, 1295 bp, Heterodera glycines
ttaattaattaaaattgaaatcccatttttaaaaggggtaggaactgtttttgatggagaacggctggagaaaagtgagaaaagttgcgtttgaagctgcctttctgttagccaaacgtatgaaaaatttcaccagaggaaaattttttattcaaaaaataaaattgaaaataaaattgaaattttaaacaaattgatgaaaaatggggaccaaaataattgtaattggaatgaaagtgataaaaatgatgaggaaaatgaacaaaaatcgcaccaagaacagcgcgaacgactgagactgattttggcgggcattggcgacggaagcattgggccaatgaaaattttgtcaaaaagtaaatttaatttgtttttaatttcaatttaatttttcctaatagtcattggatgaaaaacttagttttttaagtattttttctgcagccttttttcttaccgaagtcccttttatggctaactatgaacaggttgtaagctttctaattgtggctaaattgggttattcaggtaatcttttttttgggtatttgaggttacacgtttctaattatgtttaaatttggttatttgatgacctaaatttggctattagagtgcatgtcataatattttaattatttatataattgaagtattaattgttcataattaatcacagattccaaaagtgacggttcgtctcgcaaccgacgaagacgcaaaaaaagaaatgacatgctaattgcgataatagtcgtgttggttgtcgtcattgtggctctgatttcatgctatttcggccgagcgtgtgatgggagcagttcggcaccggctggcaccagtgccaacaaatcggccagcaaaagtgccatttcaagcaaaacggaaggagcaagaaaatgatgatcaacactctgggatatagaagctaaatttaggggtacattaatgtaattatggggcactattttctctcccattttggcataatagggaaatcaataagattaattgtgcaatttattcgaccagaaaaaagagcaattttgtaatgctaaaatgtggaaaaaagagaatattcaattgaattttattctattttatttcttttttttttgggataaattttataaattcttcaattgtaatttaaacaaaaaatttttgtttaattgtctaaaaaacatgccggtttttcataaagttttaattccacatgacaatctttgtaaaatatttaaaaagaacaaagcacaaaaatgtggaggatgatagtccgaaaatgaaggatttat

SEQ ID NO: 25836 - DNA, 1489 bp, Heterodera glycines
aataaggaacgcaaaaaaggaacggtccggccaaaaattagggtcacagaaacgcgtcctatggacttttaagtgtcccatcaaaattttgcgagtccatgcgattttagctaattgtatgtaagaacatcagatccaatacaatttcctgggttttttttggactgttgtaaattcatttgtcaaaagacagagtctgtaaagagaaaaatatcacaaatttttctgcaatttgaaaaaaatgccgacaaatttttcattttttttcgcttaattttttattcaaatgatagtcaaaattattttgttcattgaaacttatgaaatgttatggtccaggaaacccaaaggaatgccaattttattgggttttttcaacaaaattgccatttgagcgaaaacaaaattaaaattgtgaaaaattaattttttttttcaatttttaccctccgttttttaaggcgactttcgcttgtccaccagcttcgcaaggacgacaacggaggctattccaaacacattctcaaggtttcatcaaaaaaaaagaagcaatttctgtagattttctaacttttgcgggtccaaactgaaaaaatgcccggcctttgtatatgaaaaactgccccccccctttgaagttggcactgcactcggactatcgcaaggacgtcgcatggcgtgccgatgtgtccggcactttgacgatgaaaaaatgggtggacaaaatgccggagggcaccgacccgaggaaattggacgaacattcgatgggggaacagaagttctacgcgaacaaagaggtgaaaaaacaacaaccacaattattccgtatttttcccttaattattcccatgccattttggtagattttcgcccaaaattaccaatttgtcggtgattggcaattttaacagcgcattaagggcaacaaaaaatttgtttgaccgctttaaatatttggcctaaaaaattgcaaaataatttgattttttccaccccacgcaatacaaaatatggggggggggaggttcaactaaaagttttgcgaaatggtctacccatgtaaactgctaacgacctttttttaaaggcattttttgggcgcgcttttttcaaaaaaaatattaaatgagattttgggctaattttttaagaaatatatgtttctggcgggccgctggtgccgataggcgccgccggggaaaattttaagaattattaataattttgttaataaaatagccaaaattttcagaagttttcccttcgccggcgacccccctcccccacctcttttgggtgcaccccaaaatcacgccgggacaaaatcacgccgccaaaaatttaaaaaaaatttttcaaacttaaatttttcaagaaaaaaatcttagaaaatttttttatacgaaaatttcaagaaaaataagaaagatttcgaaaaaacttagtaattaatcataaagttcccaaaaaattgctgaaaattttt

SEQ ID NO: 25837 - DNA, 973 bp, Heterodera glycines
cttgcattattatgttattgaaaatgtccctaaatgttctgtgatcctcgctttttgaggccaccaaaattgaaaaaaatttttattattataatctgcgggttgttgtcatttgtccttgaatggtaagtccttgaaaaccaaaaagaactggaaataaaagtccttggttttggtatctgtcgctatatttttcaaataaaagcgttggagatttaattttaaaaaaactttcaagaactttgcttgaaagttaaaggactatgacaacgtttcacttaaatttgcattttttttcatggcaaccaaacatttaaaaccaaaataaaacgacggcattaccaccagcagcaccacgtcgaggtgttagtgatcgagtgatcacaccattagcaacaggaatgataatggaaaaaaagaaaatgaaggaaataaggggcaaatttcccattttgttttcctaaataaataataattgaattattattttatatattataatgttaatataaaaaaataatatgaataataaaaaaattcagcttttaactataatggaaaattcactcaattaatattttaaataaaaaaatatgcattgacggctaagatattatagcgggaaatcataggattgagtgtattgttggcaaacatttaaaaaataattaaaaaataagagtaaatatcacccgttaatgaaaacatttaactaaatagaagcagtgcaattccggcgaaaaaaatgattgatttattttaaagttgaatatttttgttaaaaatcttttaaatgattcatatgaatgtaattgatttaaatgttgggtaaatctgttcactttttcttagttatacatacatatgtacattgttgaatttattaaaaattaaaaaaaaataataataataaatagaaatctaaaactattgagaaaaaaaattatgcctaaatcatcctactatgtaaaac

SEQ ID NO: 25838 - DNA, 883 bp, Heterodera glycines
ggacaaaatctgttaaatagcacaagcaaaaaaattagtttgaccatccacaagagaaaagccatttgttagaaaaagcctcaaaattattatttttttaaattatagtaagtctggatttttaagtacatataaaaaattttgagaaaaagtctcatctcgaatcgaggaaagtctcggattttttttaggtctcggcccctgtctcgagtctcaaggtcaagttttgggtctcgagtttgtcacctcgtccacacaacagtacaagttgggcactactacaatttggtctaatatggcgtcattcattggaaatttggaaatagcaagatggagaaaaatatcatagtgcgtgaattcatgatttgaaattctttccaaaaattttgggccgagattcgtaatgagaaaatattttcgtctttttaaaaactttaattttataatcattaaaatttttaataatagaaatgatttgaagacctaactttctaataatgtattctattgcttagcaactgcttagaaatgcttcatctttcaaaagttgccgaaaacgcaaacctaaattgcgttgtttagaaaaaattttgaaaaaattaatatttaaaaaattatttaatacacagttttttaacaaatttttagctttcaaaataatctttgaaaatttgtttttttagcatttaaattttaaatgggagtcaaatcctatgtttaatttaattttttatttatgcaaagccacattgatcgcaacaatttaagagcatttatttaaacatattttttatttacttttggattacagtatgcgcgaataattaattgggggagatagtataaggtgtcttgaattgcattcttctattttgaaaatttg

SEQ ID NO: 25839 - DNA, 1796 bp, Heterodera glycines
tttttgggaccccaaaattgggaaactctttctgactctcgcctttgtgtttggtgcatgcgattttgaccccaactccgaatgcgttcgtatcgtacggcgaaatgctcagccgagtgattgtgccacgccaaagcacaaagtcacactcgtggacagtctgcacacagaaaagcacccattcaggctttatacgattggaataatttggaagtttcaaagattttcctggcaacaccgccgaaacgccaagatttcctcaaggtttttatatttttcaaaaattggggaggaatttacaaaaaatcgcataaaatttgcaaaatttctacggcttgaactagttaaacatgttggtgtggtggtgctgctgctgctcaccttcctcagcaagctgtttggtgccgacatggccattatccattggagaagctgttcaatgccttgccaaaagaatggtaaggcattaccaaagaaaacgaaaacaacggatggaaatcaaaatttcatttttatagtttttttgcaccttcggcttcgccccccttcggcacaaatgtgtgaaagttttccgccaaattggcaccgcgcaatttgcggcccaacgtccgctcgttgaaatagcgcacccgcgaccggcccagctgttgtcgacgcgtgcggtccaacgaaaactcgccgatacagccttaatccgaagggggtacggtagggctaggtctcaagagcgaaggtgtacggtagaattttggcatttggggaaaacggtggcaatggcggagtttcacaaatcccggccgcaaccgcccgtcctaaggccacgaagctgccgaaaattcccaacaatccacaatatttagaagcgcaaagcgcccgtctgaggccgcgaagcggccaaatgagtccacaatatttagaagcgcaaagcgcccgtctgaggccgcgaagcggccgaatgcacttgcctataacttatcaaacgcgcatgcactagcaacgaagtcctttgcgcgaagcgctcatgtcagcgcccgcccatatataccaaaagtatactgtctacaccgagcaattactgtgcaaagcatactgtctacaccgagcaattactgcgcgacacgctagtttatattaccatagagaaaaagggggactcgtcttaaaaactaatttgagtcgaacggctgtcgggaggggtctgaaagtggtggaagggtcttacaactttttgaggcgcattcaggaaaaatatgggttttccgctccggtggacggttcagcgccggcggctaatttctcacttttgcttgcgtttgatggcccgtaactttttttaaaggacagggagcggaaaattcttgctggtaggattttaagttgaagtcttttctaattttcaaaaaaaattccaggcctctacctatacttggaagggctgcagaaattggcaacttttcagtaccaactttgcccagttcagtccccgttgaataactcattaggctttgacctgagcgcagggtggccagcggacttattgtagagctcggtgagctcgatttttccaaatttaaaaatttcgaaaattttcaaaatttttcgagctaggcctaaaaaacggtttttgggtttttgaattttagtattttttaacgaattttcccagaaaaacgaagaccacttccaaaacatagtttttcgagctctatcgactggtatttttttcggaaaatttcgatttttttccggaaatagaaaaaaattttggcctcagcgggacatttgagtcctgggac

SEQ ID NO: 25840 - DNA, 2088 bp, Heterodera glycines
  unsure (1)..(2088): unsure at all n locations
ttttggttgcaaaaaattncctgagaataaatgaaaaacatgncctttcagtgagtttattgcagttttgtttcatcgaacatttttgtgaaaatcccaaaaatcttaacaaattgtgaaatataactcacaatatcccatccggtcttaatgatcacaaaagtattataaagattccggccaccccaattagttcctcaatgaacatttttcggtttttttttaattaataaagaaaatattttccttggtttttcttcaataatttatcggcgaattaaacatcggcgagttcggttgtctgtttgcccgtattgatgtaactgatcaatttcacgcacttcattaaggtcaatcatatccatgtttatatcttccaagtcaatcaaatcaaaattaataacattttcttgttcagtgtcttgcaattttcttttttttattcaaatgttcgttttcaaaagtttttaaccgctttttttctccggagctttgaaccggttcatccgcttttttgaacgggagctttgaacccgtttgatcatttgagggtcgtgaatcattatcatgcaatgatgatgaagaacactgatcctcggaaggaaaagattgcttaattcgtaccattataaatctaaataaagatacaaaataaaacaaaaaatttacactcaaaaaacaatatcaataaaataggacgattattatgtaagagaaatttctaatatggacaaaaaatggttcaatttcactttgtgcgtcgaatcatttttatgcgtccgatcggaattttttcgctgatcaatgattacgaatataacgatttattaatccaaatccattcaaaccaaattaaattttatatttatttttttcagcttagtttccaataataacgaagttaagtcagatttagcaacaaacggcatttattcgtgatcagcgacctgaaatcccattcgatatgttttatttgattttttaaaaattaataaattaacgtaattaggtgcataagaaattgatctggactctaaagtaaaactgaaaccaaaaaacatcaaaatacggacctaaaattcacaattagaacttaaaattttttgaatacccaaaaaggaaaaccaaaaaaaaagagtaaaagaatgcataaggaaaaaatatcgatattttcggaaagaaactaatgaaaaaatatgtaaacaacggaggaccaaaatgatgaaacaaactaatctttgatgtgtaagagagacacaaccacaattttactgaaaacaacccaccgacacaatctttcttgttttttgtttctttttcctattatgtacaacaaagcaccatttacccgctaattcaaaaaaagaggcggagcttcggctgacagtatatagttaagggattttccagacaaatagagaaaaagcttggctattttatggtactaagaatgttaaaaatgacaggtttgctccaccttagtaccacaccttttttgaaattttttttcaacatttataaagccgtaaaaaatgtttattgtatttgacaattaaaacacatggcataactccgtgcatcatttaataaacaattatgtaatgatacaattttcaaacggatgacccccttctttttttttctgaatttcgctaatatttattctgcgtaaaaatccggttttttttaatttgcacttttcgcgaaatgacgcggcacctgcctttctcgaaaaattctccaatttttggaagggggccaaataaataattacaaaaatatgtacacacaacaacatttatttatccgcaaaaaatgctgaagaattatttttcgcattctgaccattaaaatatgtgctgttgttgttgcttccactggacagttctttgcctttggtctgcaaaatattattacattagttttatataaatcaaggataaattaattatgaaggaagatttttaagttttgaaaaacgattaagaaataatttagagaagtaaaaggcaggaccataaccagcataaaattcgggagggacaagccaagagcttctttctttttgctcttcggaccaaaaatttt

SEQ ID NO: 25841 - DNA, 1340 bp, Heterodera glycines
  unsure (1)..(1340): unsure at all n locations
ctaaaatgccccgtcttttntggtttccatcacccctccaccggtcaatcttcggcagcaattagcgctgtcagcaatgaaattttaattccttttctaaacaaccaatttaattttccaaaaaattcatattttattgccaaaaaatttacccaaaaattcatattttatgccaaaatctccttttttaattgagaagaaactatttttctaaaatgcagccccacgacgaagcacacgtcgcgagcgacagcgcgcagcgggaatgcgcagatggccatcctccctattcttggccgacgaacagcatttccacattctgggatcaccggcaatcaatcggggcgattttacagtggaggtgagtgatgggaggggagaggaaaggagaggagagtggcaaagcggagaagggacaagaggtgagaagagagtggcaaataaatgtcaaggagaggagaggggagaagagatgagaagagagtgtggctaataatgtgaaggataagagagggaagaagagagtgtggcaaataaatgtgaacgagtggagaagggagaagaggtgagaagagagtgtgacaaatgtgcacgagaggagagcggagaagagaatgtggtaaataaatgtgaaggagaggggagaagagatgagaagagagtgtggtaaataaatgtgaagatgaggagaggaaaggagaaagacggcaaaagggggaggagaaaaagatggaaatgtgaggaagagagaagtggcaaatgggagagggaggtgaggagaagaaaggagaaagacggcaaaagggggaggagaaaaagatggaaagtgtgaagaagagagaagtggaaagtgggagagagagaggtgaaggtagagagacggcaaaaggtggaggataaagtgatggaaagtgtgaagaagagagaagtggcaaatgggagagagagagctgaaggtagagagacggcaaaaggtggaggagaaagtgatggaaaatgggaggatgagagatgtaccaaatgggagagggatgcggagaagaaatgagagagacggcaaaagggagaggagaaagtgatgtaaaggtgtctaaaatcgggttaaaatctcagttttttcaattcctgatcgcctaaacagcattatatatgtgatagaagtgattgtacctgataatttgattgtctgtaactttttgaaaaaaccattaattattcaaaaaacataagtaatgtcctaatatactagtagattactatttcttaattttaatgctgtttaggctaacagggctttaaaaaattcaacttaaaatccgatttttaacataggcgcattt

SEQ ID NO: 25842 - DNA, 1285 bp, Heterodera glycines
tcaaacggcacaaagttctcgccgtctgtctttagccgattcgaaaagatggtcacccccctcgggctggatgatgtagtccagctcaacagttccgcttctacagctcgagcaccgcccgggctggtcccatggcacaaaccgaggcgtttgcaggtgccgcgggcagtacaccgtgacgccccttgtgttgacggcgaactcaatctccgggaattcgcccaacttttccgattgccgcacacgcttcattgatcagtagagtgttgattgccacccactgcgaaagttcaagtagtccaggtagtccgtttcagcggcaggtctttcgacgggttgactctccccgccttcctcaacggccaacaactctgaaaatgattattgattttttccggacaaaattgtatacccaatgggtagtatttgcagtggcccttgttgtggtactcaacaacgcacttcagctgtgggtacagtaggcggatccggtgctttatgtagaaatactggtggactttaacctctgaacgcatatgtgttagaccgaaactgaatttttggaaacttgccaagaaatccctcaaaggcgtaggtttccgcagcgggtttcaccgaaaatgtgccgaacttgacctctttggtcttggaatcacgaccctggtaggttgttttgagttttttgccggccaagtaagcgttcgctttgttcactgcctcggggttgttcaaatattctgctaaattttcgggtttacagcttagcagtttggatagggcagcagtcagagggagtaccataatctgtaaaaaaaatcaataaatcggcttggggattcactgtgtgtttgaattggcgcccttttgtatctttctctaaccactactctctcgtctatgtgtttgtggatgggcgtggcctatcgattaagaagggacagcccgtctggaggtcgctgcgcgctaacacccctctcactatcaatcaataattacgtgtttttttcgcaggttcattttatgcttttaacaattataatcataaactatttcttaatcgtaatggccccgagaaaaatcaatgatcaattggtgtttgagaacaaaagtaatcattttttgagttttttataataattttaaattttttttaaatttaaagaaatggatgagtcgaaacgggaaaatttttcccctcaaaatgatgatgacgtcatcacaattggagacaacacaagaacacctaaacactgcttgacctggcaaccgggccctcaaaaggggg

SEQ ID NO: 25843 - DNA, 2342 bp, Heterodera glycines
ccccccccctatttaatgcatgttgacgtctgcctctgcccaaatcgtttattattaatcatttttgatttatttgcctaatttgtcaggcaatggacacgggcggcggcaacatcaaaaaggcggccgtccagcggacatcaccgacgcccaaattgggcttaacccaaaggcacaaatcgctggaggaaatggccaactgccgattgggcaccggcaccggcagcagtaacggcggcacaaagttgggcggcaaactgttcagggcgttggccggcaccggcaatggtggccatggggacagtctgcagcaaaagctgtcattggcaccgccggcggcggttaacgatggggccactaatactgtagctgcggctactgtaaatgatcgtaattataacaaccgctatcaccaccactatctgcagcagcaacagcatggcggcaataatgaccggaacatggtgctgtccggtgaagtgactgtacagctgaaaaaggtgatgggctgaccatccccggccgagtgatcgctgatcagaagagatcactcgagcgatgactgatccgaaattttattaattctcggtcagacagtggagaggatactgatcattagtgctactagagattattctcacctttcagtctcgggatcaagctgcccggggtcttgtgccgtgttttggggtcaaacctcaactctctcttgttttttgggctctcgggcccttgtcgagcgcgttttttccgtctagagcttcgggacccgtggaaaattttcggtctctggcagcctggtgattgctgtgtgtttgtaatggtgaaaatttggcaaaatgccataaaacggttgtccgtccgacactttcgtccgcccttaaatttttttaaattcttttcacgggcctatgacaaaacaccaaattaaaagccattcaaacaatttttgagattagggccaacaaatgccaatgtttaaaacccatttaaaacccaattttttggattaggaccagcactttttggccaacgaggaaaggcggcagcaacggcatccatcgtgctttaagtccgcctttttgggcaccaatgacaacgacgtcagctatgtttaagcagcatcaaaagcggatctaatttgaaagcggaggatgaggagatatatatttgatcagtgccgccttttctttttctaataattttatatgttccgatcagtgcggcagaacaaattggcaattttccctttccgatcactgataatgattgctaataattatgatgataaccatcgccgaagtcatccaaatattccatcacacaacaatcacatgccatatacataacatacatatataatttgaaataaataaactcgtttattggtgttgcaattatgctaatgagatggggttgccagattataattccaagaaaattaatcaatttagatgccaaaaacgagttaaatttgccataagaatatatcccataaagctttaaattaaattttgtcaaatttaaatgaaattactgaggtcggtcggcacttttcaaaaaatttaaaaatttgaatttttaattcataaaaaattcatcttttataaatacaatacacaaaaaaaattttgcaaaagtttcttcataaaaaaagtatgtcttttatcaaattgtcataacagaaatcaacccgcttttgaaactaaatgaaggcttaaaaaatgagaaaaaattaaaattaacgaaaaaaaataaataattaaaacccgatataatagagacaaatcaacaaatgccaaaaacaacttacctaattagacaaaaaaaatttaaaaaattttttttctcgtaacgccaaattgtcgtttgtctgctcgaattttgtcgttttgcccatcagcgaactcttcccatttatcagttatcactccgtcccataattcattatcattattatatttatcaattgttttttcgttttgtttttcggtgtctcctgactctgatcaatcactccgttgtatcattatgaattaattttcatttgctttgactacacatccaaaaatttctgtaaactttaaataataatatatttttattaattataataaataatagttggttgtttaattgcagtttaaatgaccaataaagaatttaaaacttttgtatcaatttttgtgtgactgtaaaatttttggcaaattataactttttatcaagttaatcaatctttttattaaatattttaataacgctaaaattgctctaccattgtaccattgcaattcatttttagacattaatttttttttagtaatttaaaattaatatag

SEQ ID NO: 25844 - DNA, 628 bp, Heterodera glycines
aaaattaggcatatttgtggacaaaattctcttaacaaatcatactcatgtttgaaaaaatttcccggcggcgcctatcggcaccgccggaacacatccccccacctcaagtttccaaaaagttgccgtcggggaaaatttggaaatttaatgcaatttgttaacagattttgtctaaaaattgccccaattttggtgatttttgagctaattttaatgaaaataaaatggttttagcgtccggcggtgccgatggcgccgccgagggaaattttgacagattttcaacaaaaaaggctggtttttgagattactaggctcaatttgtatggattttctttaaaaaatgatacaatttgtgtcaattaaaaaaatatgagggaaaaataaaaagaatttttttaaaatcattcaaaaaaatattttgtcgataggaaaccaatgaatatacaaaaagaaaattcaaaacattttaatttctgtatagggattgaacaatgggaaagaagtagaaaatctagaagactagcctctagaccactttcataattgtgtgctttacttttaaagtatatattaattattattttttaattttttcctataattcccaatttcttccctaatt

SEQ ID NO: 25845 - DNA, 1217 bp, Heterodera glycines
tttttccccccccccttttttacccggggggttttttttttttaaatttttttttttcccccaaataaacttttcaaaccccccttttttgccaccgtgaatgtttatttttattgaatttttggaccgttttgagtagatagactagaaaaaaatgaaaaattttgaaatcatgtttcccactccctttttcccaggggtattattttgtaaagtctttttttccccaataaacttttcaaaccccatttttcgcaccgtgaatgctatttttatcgaattctgaaccgttttgagtagattagactagaaaaaattgaaaattttgaaatcatgtttcccactcccttctcccaggggtattattttgtaaagtcttttttccccaataaacttttcaaaccccatttttcgcaccgtgaatgttatttttattgaattctgaaccggtttgagtagattagactagaaaaaattgaaaattttgaaatcatgtttcccactcccttctcccaggggtattattttgtaaagtctttttttccccaataaacttgtcaaaccccatttttcgcaccgtgaatgttatttttattgaattctgaaccgttttgagtagattagactagaaaaaattgaaaattttgaaatcatgtttcccactcccttctcccaggggtattattttgtaaagtctttttttccccaataaacttttcaaaccccatttttcgcaccgtgaatgttatttttattgaattctgaaccggtttgagtagattagactagaaaaaattgaaaattttgaaatcatgtttcccactcccttctcccaggggtattattttgtaaagtcttttttccccaataaacttgtcaaaccccatttttcgcaccgtgaatgttatttttattgaattctgagccgttttgagtagattagactagaaaaaattgaaaattttgaaatcatgtttcccactcccttctcccaggggtattattttgtaaagtctttttttccccaataaacttttcataccccatttttcgcaccgtgaatgttatttttattgaattctgaaccggtttgagtagattagactagaaaaaattgaaaattttgaaattctgtttccccctcccttctcccaaggggaatattttagtaaagcttttttttccccaaaaaattttcaaaccccatttttcccccc

SEQ ID NO: 25846 - DNA, 1468 bp, Heterodera glycines
caaatgccgaaaattttaaaaattcttgttttattagacccactctgctttgactggccatatctcgccagggagtggcggtagaccctttgttgatacatttgaaagggtagagcgcgcctagctcattcgaatagcatcaaattggtttgcatttgtcccgaaacaacccgcttatgacacgtcgaaagaaaatccgttaaaatttgcattcacaaaactccattttttcattggcaaacgtgtaaagcaaacccgaaattgataggaaatatatatttctcataataaaagtacaatttttatttgtcccacgccattttctgggaaaactttttcgcgaaaagccgaaaaattttccatcggcctcttccaacggcaacagatgcgtttcaaacaattgacaatataattatgattgaagtcaaaaagcctctttagaaaatgcttaaaaaatttttgttataaatgttcacaaaatatttttttgttactgacaattcatttccattcaataacggcaacagatgcgtttcaaacaactgacaatataattatgattgaagtcaaaaagcctctttagaaaatgcttaaaaactttttgttataaatgttcacaaaatattttttttgttactgacaattcatttccattcaatttaaaagcgataaataatgtattgagatatgaacaaacatctagaaaaattatctcaacaatctgtcagaaacagtccaggaaaaactttgcgcgagaagccgaaaaattttacaactgcatcactgttcatttgatagggtcaatcaattcaaaaacataacttaatataaaatattgataaaaaaattattttccttcatctttagaaattgcccaaaaattgttgttgtaaatatactcaaatattcctaaaacaagctttatttttactgactatctttttccagaaggctataaaatgcaataaacaattcgtatgcttggatagaaaagaaatgggctaaaaatatttcatcacttagtcgtgaaccattacaagatttctatagcagggccatattggcaaaagaagcacacgtagagcaggctcgaaataagggcaaatgccgaaaattttaaaaattcttgttttattagacccactctgctttgactggccatatctcgccagggagtggcggtagaccctttgttgatacatttgaaagggtagagcgcgcctagctcattcgaatagcatcaaattggtttgcatttgtcccgaaacaacccgcttatgacacgtcgaaagaaaatccattaaaatttgcattcacaaaactttatttttttattggcaaacgtataaagtaaaaatgaaattgataggaaatatatattgttagtaataaaagtataatttttatttgtcccacgccattttctgggaaaactttttcgcgaaaagccgaaaaattttccatcggc

SEQ ID NO: 25847 - DNA, 1204 bp, Heterodera glycines
aattgatgagccggctcaatatgccaagatgaacttccgtggtgcaacggaagcatatgccattgttcattcaatgccatttgcccgtctttcgcatcatgttgtcaaattggcaattcatttgccaaaccaacagcccattgtatatagggcattccagctggtgagcaaagctcaacaaatccagcaaggcgaactgccagaaacgcagtgttcagcctattggaaacaatggcaaaatgagtggaagaatgatccaaagtttaaggacattcttttcgaaaaagtcccagagcggttccgatgggcaaaggacaaatgggtcctgtacaaaaggcagcaaattaaaaggccacctatcggccgaattgttcctgtacccccatcggacccggaaaggttcgcgctctattcacttatgcgtcactttcctggagacccagaccatcttaagatggttaatgggttgctttgtacctcattcactgaggctgcaataatgcatggtcttcttgaagacgacaaaatttgggacaaaactctggcggaggcagctctgtcgcgctggccagatcagatgagatggctttttgtgagcatcctggtctatggccagccgagtaatgccatagaattgtggaacaagtacaaagaccaaatgtacaatccgcaaggcattattactctggcacagcataaagtagcagagcttgaagccctagccgacattgattggcggctgcacagctgctttaacttaagctgtgtgcattttagcctgccagacccgccaacttcaattgccaaaaatactgacgcggcaattgaagagtttttctttggcgatgatgatttgaatttgcctccagggcaaccaaatcctcgtccacagccaaatacccctccgccacttaacagcgaccaacagaaggtctttgatgctgttttgttggcaatacagtcgaaccctagggattcgactgtcccccgccgtttcttcatatacggcgatggaggcacaggaaagacattcctgtttggccaaattattaggcgcttgcgaaaggccccatacacctacaaagtgcttgctacggcatccactgggtgtgcagccattttgctgccatatgggaaaacagcccattccacgtttcgtctgggtagagaagtgtcattagacaaactcccaagcattccgctg

SEQ ID NO: 25848 - DNA, 2061 bp, Heterodera glycines
  unsure (1)..(2061): unsure at all n locations
atcgaacctggtcttttctaatctctttcaaatcgccccaaattttttttacagcttaactaggcccaattaagcttatttccagaaaatctcgcatgaattctcattttnaaattttttatagatttttaaatatttggattttttttggcttaccaaaacttcatcgaacctggttctttctattctctttcaaatcgccccaaattttttttacagcttaactaggccctattaagcttatttccagaaaatctcgcatgaattctcatttttaaattttttatagatttttaaatgtttggattttttttggcttaccaaaacttcatcgaacctggttctttctattctctttcaaatcgccccaaattttttttacagcttaactaggcccaattaagcttatttccagaaaatctcgcatgaattctcatttttaaattttttatagatttttaaatgtttggatttttttttggcttaacaaaacttcatcgaacctggttctttctattctctttcaaatcaccccaaattttttttacagcttaactaggccctattaagcttatttccagaaaatctcgcatgaattctcatttttaaattttttatagatttttaaatatttggattttttttggcttaccaaaacttcatcgaacctggttctttctattctctttcaaatcgccccaaattttttttacagcttaactaggccctattaagcttatttccagaaaatctcgcatgaattctcatttttaaattttttatagatttttaaatgtttgcattttttttggcttaccaaaacttcatcgaacctggttctttctattctctttcaaatcgccccaaattttttttacagccacgaggccgcgaagcggccgagtgagtacattgggcgcaggaaaattattaaggaggagggttcattatttatttatttttgcaaaattaattcataaatttttttcagaaactgctctgaaacgcaccaaaatttatttacaagttgaataaggcactctgactcttatattatcaaaaagggagatgaataaatattttaaaaatttctaattctttttaaacaggccgaaaaagtttaggcttaactttttcagcgggtttaaaaaatctagaaaaattagtaagcttttgtagtgctccgatacgtatctctgcaaaatttggtgagcccctgatcaattacaaattatttatggacgatcaaattttttgaaatttttttaagtgcaaaagtggtgggtgtctgcaaaaaattttcaccgggtttaataaatctaggaaaattagtaagcttttgtagtgctccgatacgtatctctgcaaaatttggtgagccgctgatcaattacaaattatttatggacgatcaaattttttgaaatttttttaagtgaaaaagtggtgggtgtttgcaaaaaattttcaccgggtttaataaatctaggaaaattagtaagcttttgtagtgttccgatacgtatctctgcaaaatttggtgagcccctgatcaattacaaattatttatggacgatcaaattttttgaaattttttaagtgcaaaagtggtgggtgtctgcaaaaaattttcaccgggtttaataaatctaggaaaattagtaagcatttgtagtgttccgatacgtatccctgcaaaatttggtgagccgctgatcaattacaaattatttatggacgatcaaattttttgaaatttttttaagtgaaaaagtggtgggtgtctgcaaaaaattttcaccgggtttaataaatctaggaaaataagtaagcttttgtagtgttccgatacgtatctctgcaaaatttggtgagcccctgatcaattacaaattatttatggacgatcaaattttttgaaatttttttaagtgcaaaagtggtgggtgtctgcaaaaaattttcaccgggtttaataaatctaggaaaattagtaagcttttgtagtgctccgatacgtataggtgcaaaatttggtgagccgctgatcaattacaaat

SEQ ID NO: 25849 - DNA, 1252 bp, Heterodera glycines
  unsure (1)..(1252): unsure at all n locations
accccaaaagcatggatcgtgagggagctgccccttaatgttgggcagcgtccacaagtcatctcgaacgacctgtgcccatcagcggacgggggcatttggtggtgccaacgctagcccaacaggacagcaggtaggtgggtgaataggaatcacttgggtaatgatccagcatcaggttcacctacagctaccttgttacgacttttgcccggttcaagccactgcgattaaatcggttccggtctgcataccgaccgaagccggaacactaaccggccccgaatttctcgaaatggctcagtcccgggcagcgacgggcggagtgtacaaagggcagggacgtattcagagcgagttgatgactcgcccctacaaggaattcctcgttcacggacaataattgcaatgtccgatcccaatcacggcaaattttcaccggtttaccaacccctttcgggcaaggacaagcacgctgattttgccagtgggatcagtcagcttcaggcggtcaggtcaacgnttcaaacatcatcaatcgaatacatccccaatggttccattacccaccacgttcggtcaatctttgggccccaaattcactcttccttttgtccaaaaatccccccaaacaggtgggaaaagggggtttaaaaaaaataaaaaaaaaaaaaattttaaaaaggggggaaaaaccccggttttttgggaaaaaaaaaaaaaaaaaaacccaaaaaaggtttttttttccaaagggggggggtttttttaaaccccgggggtttttttccccccccccccccccccggggggaaaaaaaaaaaaaaacaaaaaaaaaaaaaaaaaggggggggcccccccccggccccccccctccccccccccccacaaaaaaagggggggggggggggggggggggggaaggaaaggaagagaaaaaaaaacaacaaaacacaaacaaaccccgggggggtgtataaaaaaaagaaaatttttttttataatagggggggggggggccccccccccccccccccccccccccccccctccccccccccccccacaaaaaaaataagaggggggggggggggggggggggggggggggggggggggccccccccccccccccccccccccccccccccccccccaaaaaaaaaaaaaaaaaaaaaaaaaccccccccccccccccctccttttttttttttttttttttttttttttttgtggggcggaaaaaaaaaaaa

SEQ ID NO: 25850 - DNA, 1854 bp, Heterodera glycines
tcggttccctttctttcttttttttctcaaaaatattcaccttccattccggttttgatttaaaagtaactaatggtaatttcttattttgccatattacaaattgagggcatactttttaaatgatcacattgattaaaatgcttaatggaaaaagaaattgtgcacttatttaaattatttgctgaaatgcaaaattatgcaatgcaaattgcgaagcccaaaaatattcactgactcaattaacgggcgcattgacctcccccggccccgcccaattttcgaatttcccttaattattgtatatctcacacaatgacacaaccaaaattgcctcgctcggcggaggagagaataggcgcccaaaattggaggacgaattagttggacaaaagagagaagtgaagagggagagagagagagagagagagagaagtcgggggagggagatggtaaggtgggaagggaaagtgagacgagagggagaagaggagagcgagggaaagaggtgaaagagagtgggacgagatagagaaaggagagagaaagtagggaaaagagatattggggcgaaggaaagagaggggagagagagaggagaaaatggaagagcaggagatacgtacacatatagggagaggagagggagagagaaaaagagagggagagagagagagagagagggagagagagagggggatgggaaagagagtgaggaagagagtgaggaagagggtgagagagagggagagagggaagaggtggagggagagagagggatagatcggaaagaaggagagaagcgagagggtgaagtagagagagagagaggggagcgggtcgcgaggaaaggaggtaatagaaaatgggcgaggagagagatggagaggctgagagaaagagagagggagagggatagcgatagtattggggagaagaagagggagagggaaagagaataaaaaagggaaaagagaaattggtcggaagggaggggtagagagaggaaacggctgtaattacggattaggcattccgtaatcgaaatccagttacgtcagagaaggagagatgggcgagatgtaactctaatcctccgcttctgctgctggttcggcctcattcaatcggccgtccatccgtagccaatttccaatttaatccccgacggcgatgaatgggcgcccatttcacccatttttgctcatttgtcggtcgtttggcgtggcgctaccacacacagcacaaaaagaataaaaatgaattgtattattattaaattgcacaaatcattgtacattaagtgacagacacccaaaataagacatttttcgttatttaaaaattgtccaattctcaaaagtcccgcggtttgagccccggaaaatttccattcctgacagcacactgaagcaaaaatgattaaaaccatcgagaaaaggaatcatttgaatttatttatttgtcaaaaaataaaattgccaccgcaaaaattatttttattcgggagaatttcctttaacagaaaagaaaagaaatttaattaagaaaaagggcgaatgagaagaagccgcttttcatttgcacgcacattgggccagatgctgggggggggcatttgtgctgcaccgcaagcggcgcataagtagtgcctccccacacaagaatattgctatcttgcctaggcgggattctgacttacatatgaacatttcgaactgtgagtgttcaaatcactttaaaaccacttctatcgtgtagagcatggtcgatttactattgccaattttcggcttttttggctttgacccccaaactgatcagaaaaagtgatcaaagttctgaaaaatcgat

SEQ ID NO: 25851 - DNA, 2415 bp, Heterodera glycines
tgggtacgggcaagacgatttgcgggattcacaagattttgtgaatggttacggtccaatgaacatagttttgcgtagagttgagcgggaccgggaaatttgacaaaaaccgggaccggcaaaaatttttttttgcacttgtatgttacgatattatgtcaagctaaaacaattaaaacgaatacaatatgcatatgaatttatcgcttatttcgaatacaacaaaagcgacaggagctgatcaaatcgaaccatgcgcgatttaatcattgttgcggtcactccttccgcagagatcgtgtggatgacaacgccccatccagtggatgcgtcgcgttcgaccaccgcaagcatcgcctgaccgaccgccaccgtcatttcttcggaggtcatatcgggtcgccagagagctaacaaaaatagaaatattcgttttgctgtattatgaaccagatatgcaataaataccttcacacagagacatcgacaagtcgccaccagtgccaccgaccgtgtagtcttcgggctcacttacgctaccgaccacgtccatgtgggaaatgaacggctcattttgttgattcagccccacaatgatggggttcgatcaggaacgggccgaacctgcgcttatagagcatccaagcgagataggaagtcaacgcctgaaaaatgaacggttagcaatagcttgaacttatgtgtctcgagaccaatttttcatatgaaggaccaaatttttctgagggtggcgcgctttttccaaaaacatttttgggaacaggggagggtccggcggtgccgataggcgacgctggggaaaatttgtaatttttaaagctttttcaaattaaaaaaaaattccacttcacccttcgtcacgacccaatcccccgcccccttagaaggggcggggtgtctcgagacatcccttgcacatatatgataatttggtgatcttcggggattctaaaaaatgccttggggtctttcagaattaaaaaaatctgtcgctaacaaataagtggcattaaaattcttgaatttcatttcaagaagaggaggacaaactaacaaacgatgacttaacgtgatctctcaattttgacgtctgataaatgcccaaaaacaccaaatattttaacgcaaaaatattggtttgcgccaaaacatgtccctagaagtatattgtgttttagctgaaaagcaaccaaatttttatttcttgatatgattcgatagccctaagtgttctctatcagtctacaaaattcaaaaaatttcaccaagtttaaaaagagttagggccaaagatgctcgaaaatcaaggttttttgagttcctctagccataacttttttgaaacttaacgaatttttttgaaattttgtagacttttagagaacactaagggctatagaatgatatcaagaattaaaaattcagttgcttttcagctaagttataaataatttttcatcaaatcataatgatggttttttaagtaacgactccgccccggttacaataccttgggagacattggacgctgctcgcgcatctcataaatggcctgatgtgtgcgcaacttgttaagcacagtggtggcgtccgcgttaaacccggtcaatccgataaaaacgttgtcagaaatgggatggatctgaattaaagattatgagatatgatagaatttattttccctctttctgtttagtatcttagtgacttaaaaaacggctctagtccagtttatgcgtccaatcgacttttgtgcatcccatcaatttttaagctccgatcaaactttatgcgtccaataaattattatcagctaagcgaagccgacttttttcttcgttcgttggcaaaaagaaagtctgtaattaaaaaacccgtataggaatagaaaattttactgttttgtggtaaaacctcgtcagattgggtcaatagcagttcgtacaatggggtttcgtacaacgtttcaatttgacgtttcgtagaatattaaattttaaaaaataagtgatagtgacagcgacacctacttttaatcaaaatgacaaaaataaagcaaattataaaaaagtaatgagctaatgggtaccaaaaataacaatattaatacgtaaacaataataattcattcgggctttttcggaggatttgctcacttcaactgaacttggccaatgaaagttttagacaatgatttcataacttaaatgcttgcttttaagaaaggaaatataatttattgtgttaatcaaacattcacaaaaattgcaataaaaacaagtagttaaaagagtttttaaagaaaaaatcgactttaatatatattttttctgtacgaaatccgcaattggaacattgtatgaaagtcccattgtacgaactgccatgaccccg

SEQ ID NO: 25852 - DNA, 1747 bp, Heterodera glycines
ttttaatgtaaatcagggatggtatccgtccttgaatggcaaggacgtccttgaaaatgggccctctttcttgaaaataaaaaatgtccttgtatgcaaggacgtccttgaaaatgagcatttggaaaagtttaaaaaagatcaaagaaatttgaaaaatctttgtaattttcaacaatatttatttaaattatggcattatgtcatttaaaaatgtaatttttgagaatttttgaaattttatggcattaagtcactagtcactatttttcttaaaaaattagccaaaaatcgcaaattttggtcatttttggacaaaaatctgtaaacaactcgcattaaaaattacaaatttttccggacccccctatcctcaaaaaaatttttaaaaagcgctccgtaaaaaacccattttataaacaaaaaaagtcgtcgcatggcttaaaatcgcaaaaattaggcagtttttggtgaaaatctgttaacaaattgcattcaaattttcaaaatttttccccggcggatactattataccaaacgaacccccccccccctctataccattcaaatttttaataaaaaatttttattataaaatacttttataactggttactacgtgtcaaaaacttacttacaattaataatatttagctttataataaatacatttaattatacattcctttctttacatatgtacgatttttctttgaattcatttaattttagtcttgtaaaaaacgtaaaaagattaccgttttgcccatccgcgaccgaccatttgctgatatgaattttttatgtacaattgcagcaaattttacttctcatttcttgtcacatataacttttttgatttagattatgtttgaatttatatgatattaatgccctaagcttttgctttcttccagtcttttattaaataaaaattataagtttaaattattttcagtaaattatattatttttttattaattagatttacagaatgttaaaaacattacattttgtgatatttaactttgaaaagtaatttaacaatttttcttattgaattatgttcaattattttattaagcaatgcaaaataaccaagcatgggcagttacaccaattattatataagacttttttataaaagcatttttcagtcttttcatacattctctttataatagtgttaagcataaaaaattattattgtgattcaatatttaaattattatgctcaaatctttatgttctaaaatgatttatataaataataatttagttttcttattaaggttgtagtgtcctttagagaattaaaaccgtttcatttattttaacaagtgttatggcaagaattaattggttttttcgttcctcttttcttgactgattcttatgtttttgatttaattaactgtattaattttttctaccttcaaaaattgggtataaatttggtatcatttgatagagcaaggtcgacttctattgtggttttttaattaaaattaactgatttttgcttattttcactaaagaaaaatatcatattcattttttagtctaaaaatgattttttaaattatttagttatattatacattaattaaaatttaatttcatttttcagttatttaacaatttcgtatctttttttatcttttattttatgaaaatcaaattttgttggactcagacgggagcttcgcgcccgtttttaaaattttgttgggcttggacgggcg

SEQ ID NO: 25853 - DNA, 1332 bp, Heterodera glycines
aaaatttttcaaaaaaatacacccctaagaatcatgctaaaatttttcaaaatatactcctatgaaatgaaaaaaaaatttctcaaaaatttactttcttggcaaaaatttttaattttaaaaattatttttttaggtaactattttgggttttttggtcttaaaaatccaagtcctactcatttgcaactgcaatcagtgaataaaaattattttggcttattttttggctgaaaattatgtcactattcgtcactattttggactttttgtcactatttcttcactattttgggatttttactcactattttagttaaatatttcgggatttttcgtcactaaaagttgctgccctagtaattggcgtttaattcaaaaaatacactggtcaataccttttttgctattgtttgttttgatcagccataactcacttgatttcaaactaaatcgaacgaatttggtatcaaaaagtttttgaaaaggaaataatttttctaaaagaaaatttcatgatttttaatgtgttagagatgtgaaaatagtacgccaaaataagaggaaaatacatatatttttttaattacaagttttactaaaaattgggatagaaaatcattaattccttatacattcaatgcaaaattttgttctctatcggtatgcaaaatttgaaaaggatttaacatcttgaaaaaaacttaccggataaaaataaatgctgttaaaaatatttttgaaattgaatttttagaaaaaaaaaccctaggtggttgggaaaattttctgtaaaaaaatgagcaagcctaggacaaaattctataacgaattgccttttggatggtggggctatgacctatacccacagagcgtgagaccgtgaaaaaatgattactgtaaaataaaatttttgtattttttgtgtgcccacatattcgatagggatgtgcgagaaatgatttataccgagaaccgagaccgggaaatgaccccgagaaacgatacgagaaccgagaccccaaaaaacccgagaaatttctcgactctggaatcgggaaccgagaaatgtaaaattttttagccgtttttcaccaaaaattactatttttgccattttggtcaccatttttcaaaaatatgataaagtgggagtccggcagtgccgttagccgccatcgagaaaaattttgcaaattttaaggacatttattacgaaaattgcataaaatttcaaaaaatttgctgaaaatttttactttttggtttcagggggggggtggggccttatccacctcatccccgcccctgcctacgcccttgggcgggggg

SEQ ID NO: 25854 - DNA, 1272 bp, Heterodera glycines
  unsure (1)..(1272): unsure at all n locations
gtcatggatttcgaagttctctgctggactttcnaatttatagaaatgatttatcaaaaaaagacaatnttacnnccaaacacttcgaaaatgtatntgatttgcgttgtatgggctaaaaatgataaagaatgagatttttgggaatttttatgcaaaaacacacttattttttcaatttttaacacatattttagcacatattttggcatttttgggggtttttagcacatatttcagcattttttagcacatattttattacatatttcaggatttttagcacataaaaatccgggccctagtaattacgttttttcctgcgcagaatttactttttaagcgatttttatgcaattctacttttaaaatacatccaattatctccataatttgatatcttgacacatttctcttaggaaatgaattacccatccggtagtatttactcaccactaataaacacaagaaaatatggaggcaatgatgaagaatacagacgagagggcagcagcagcaactcagggagccatgaccacagaaaagcacacaaaacaaacagaagtccggaaaaaccaaacaacaggtaagctggcaatgaggaattttttgaaatcaaatgcgaatttattgcttaatagggtaattttcgagaattcaaaattctaataaattacctactttttgttcgagttcggggtttgatggaaaccagattctgacatccgttttgactctgagctgaaccaggattcgaaaaaactagaaatttaatttcaagcaaatttttattattattacagcttatttattgtatcaaaagattgtgattttgtttcgtgaatttgatccggttttgttgcataaatgcgattttgacttaattcgaattcgggttcagagtccggaacgagtctaacaataagcggatctcacattcggaacgctttttccgactgaaaattcctaaaatgactttattgaaaaaatgtattttttcaaaaaaggggtggtatacattaccaggattttgttcattattcattctcttttgaagatatgtcaaaggcgacgaattgcgcatccaatcgctcagttcgcagttggcatcagcacagtcacaagtccttcaattggaggccgaattgtcgacgaccaaaacggcaaagaatcacgctgaacatcggcttatcgctcttcaacgcgacttaaatactctacaaactcgaaattcggaagtcatttcggtacataattagttaattgttttct

SEQ ID NO: 25855 - DNA, 1551 bp, Heterodera glycines
  unsure (1)..(1551): unsure at all n locations
ctgaggccgcgaagcaggccgaatgttctccacaaaattaaaaaaacgtgcgccaagcgcccgtcctgaagccacgaagcgtcctaatttccctgcaaagtttgaaaacgtacgcaaagcgcccgtctgaggccgcgaagcggccaaatgagtccacaatatttagaagcgcaaagcgcccgtctgaggccgcgaagcggccgaatgagtccacaatatttagaagcgcaaatcgcccgtctgaggccgcgaagcggccgaatgcacttgctcatcacttaacaaacgcgcatgcactagcaacgaagtcctttgcgcgaagcgctcatgtaatgcatattcttttcatctctcacaagtatactgtttacaccgagcaactactgcgccacacgctagtttctactatatatagagaaaaggtgcaactcgtcttaaaaaattataagtccttacggtttgcccggaggggcctgaaaccgtgacatcacttaagcaactttttgaggcgcatctgggaaaaataaggatttttctgtccggcggccagttgagcgccagcggcgctgaaacggccaaataaaaaaaatcgtcgcggttttcgggctgtaacttttctcagggaaccgggagcggaaaaagtccgctgagagggcacaccccagacatgttggctacaactttgtcactgatcactttttcatcagatcaaatgccgagcctgcagaaattggcgactgaacggcgctcaaaatgccggttttggcttttcgtgaataactcgctgggggttaagcggagcgggttggcgccgcttgagcatttgtgtagtttttaaagctgcatccgatggcgttttcagattttgaaaattttcaaaatttttcgagctaggccccctcgaaaatttttcgtttttgaattttattattttttgcagatttttcccaggaaaacggagaccactttcaagcaaccgtttttcgagctctatcgattggtggcatttttgaaaaaatttcaaaattttccggaaatagaaaatttttccggaattgagctccccatttccgttcaaggcttataactcgtcaggggttgattttagcgaaaatttgtcttagagcatttttgtagagaattttaagctctatctaatgtgctttatctcatgtttttaccatgagttcaaaaaaagttataaaattaattgtgattttgaaactcaaaaccataggggggaccccatggttttgcatttcatgaaaaatttttttactcctaaattagccaaaatgcatttttatggcataatttgaggtgctgaatacgtatatacgctttattttgcgtttcagattttttggaaggtgtttaaaattttttgaaaaatcgtcaaaatttgagccccggaaaatccagtgaaatttcgaaaattcataactcacttcgcttttggtcaaatttagtggaataaagctttaaaaatagagaaaaattgggagaattttatgggatttatttataatttctatcttccaaaatanaaaa

SEQ ID NO: 25856 - DNA, 1174 bp, Heterodera glycines
atttaaagcggctgttgagcagcttaaacaaatcaatgcctttgttcaaagggctaatcccgaacagactcatcacacatccataagagagaaacataagagtgaagaaaaagaatcaaccttaaacttggctatcagatacaaagaccaagagaaaaaggctaatcgacaaacatcgggtgctgttaagccaaagccatggcgtgggacttcaacttcatcggaaggatcaagctcacgctcatcctcacaatcgagccgatacggacgatctccgggaagaaaacagaagggaaaggaaaagaggaacagaaagagaaacaggagaggaatagagggaaaaagaggaagagaaagtaagaggaaaaagaggaacaaaaggcgaagaggaagagaaggggaagaggaacagaaagagaaacaggaggggaatagaaggaaaaagaggaagagaaagagcaacagaagggaaaggagaagaggaccagaagaggaagagaagcaaaagacgaacagaaagagaaacaggaggggaatagaaggaaaaagaggaagagaaagaggatattcccggccattaaaaaatctaattgccctcttataaaagctttttggcgcgtagcgccctctagagacagtgtttaatagcgaagctatttcaattttttaaaaataaattaaaatcgtcactttcagtgcccgtagggcactggttattatgaataaaaatttactctaaattttcaaaaaaaaattaataattcgcattctgacttaactccgagtagttgttcggtctcattcctttttcaattacattagtttatataatttttccattaatttatatatatatatatatatatgtctttttgaatattgaaaaaaataaattcttattaataattttgtatatgattttctattttatttagaaaataattttgttgcaccgttatcaaggtgatatttaaataaatgtcttataaaaatatatttatttatctcagctaatgtattctgttaaaaattacatttttttcgatttgtatatcgtttttgcatttattttttttaaatctcaacaatttcagttgcgccggggatattggcgccgctccatttgcgccgcgacacttgcgtcgcctagcaaaaatggacatttgcgccgctc

SEQ ID NO: 25857 - DNA, 1258 bp, Heterodera glycines
ataattaaaacctaaaataattttcgtatatttttcacctccttaggcaaaagacaaaaaaaaatgattcaattttgaacctaaatagtgcacaaaagggagggatggttagacgaaaagaggaatttttagaaaagagcgcaccccatctgatattcccatttttccgttccacaactggccaaaggcgactgtgctcattgacacgtagttgtccaataaggtacttggactttccacagtaaaatgtggtacaaaattttggaactgtcccgcctcacggcggggcttaaaagcattgtacagcataattaaaacctaaaataattttcgtatatttttcacaatttatttcaaaagacaaaaaaaaatgattcaattttgaaacgaaatagtgcacaaaagggagggatggttagacgaaaagaggaatttttagaaaagagcgcaccccatctgatattcccatttttccgttccacaactggccaaaggcgactgtgctcattgacacgtagttgtccaataaggtacttggactttccacagtaaaatgtggtacaaaattttggaactgtcccgcctcacggcggggcttaaaaacattgtacagcataattaaaagctaaaataattttcgtatatttttcacaatttatttcaaaaagccaaaaaaaatgattcaattttgaaacgaaatagtgcacaaaagggagggatggttagacgaaaagaggaatttttagaaaagagcgcaccccatctgatattcccatttttccgttccacaactggccaaaggcgactgtgctcattgacacgtagttgtccaataaggtacttggactttccacagtaaaatgtggtacaaaattttggaactgtcccgcctcacggcggggcttaaaagcattgtacagcgtaattaaaagctaaaataattttcgtatatttttcacaatttatttcaaaaagccaaaaagtccggaaccaattttaaaaactaaaatagtgcacaaaaggggagccgccgcacggcggggcttaaaagcattgtacagcataattaaaaccgaaaataattttcgtatatttttcacaatttatttcaaaaagccaaaaaaaatgattcaattttgaaacgaaatagtgcacaaaagggagggatggttagacgaaaagaggaatttttagaaaagagcgcaccccatctgatattcccattttttcgttccacaactggccaaaggcgactgtg

SEQ ID NO: 25858 - DNA, 1111 bp, Heterodera glycines
cctcagaatctccaatcacacagtgattctgaggtcttaaccatgtctaaagtaaaatctgattaaatattcgtgatcagcggcccaaataacccctaaagacatatttttggaagatttttggtgaaaaaaattttccactcaaaaatcctggtcacacccctttggtcccgaatcccaaaatcacttttatttttatatctttttttaaaaatgtgttaaaaaggtcaaataaatttctctttatagagaaaaaaattgcggattttatgaatatttaaatattctttagcgccttttttgaaatgagttataaatttatttctgaaaatttaaaatttttgagaaatccaggcctaagtttgtgaatttttaaaatatggaaactcaaaaaacaacttaaaattctccatatttttctcgatttttaatgctttaaatgagctgaattggacaattttgaggcgagttatgaatttttaaaatttaggttgaattttcaagggccaaaaattattgatttttcaaaatttttttaccaccctccaaaaaatccaaaacgcaatataaagcgtatatacgtattcagcacctcaaattatgccataaaaatgcattttggctaatttaggagtaaaaaaatttttcataaatgcaaaaccatggggtcccccctatggttttgagtttcaaaatcacaattaattttataactttttttaaactcatggtaaaaacatgagataaagcacattagatagagcttaaaattctctacaaaaatgctctaagacaaatttccgctaaaatcaacgcctgacgagttataagcctcaaacggaaatggggagctcaattccggaaaatttttctatttccggaaaattttgaaattaaaaatgccaccaatcgatagagctcgaaaaacggttgcttgaaagtggtctccgtttttcctgggaaaaatcggcaaaaaataataaaattcaaaaacgaaaaattttcgagggggcctagctcgaactctatggggaattttcaaaatctgaaagcgccatcggatgcctcggttagggctacacaaatgctcaagcggcgtcaacccgctccg

SEQ ID NO: 25859 - DNA, 1281 bp, Heterodera glycines
  unsure (1)..(1281): unsure at all n locations
gggggggggggggggggggaaaaaaaaaaaaaaaaacaaaaatctttttttttttttttttttttttttttttcccccccccccccccccccccccccgggggggggggggggggaagaaaaaaaaaaaaaaaaaaaaaaaaaaaccttttttttttttttttcttttttttttttttttttaaaaaaaaaaaaaaaaaaaaaaaattttttatatggggggccggcccccccacccacaaaaaaatataaaaaaaaaaaaataaaattgtttttttttttttttttttttaaaaagggagagaagaaaaatttattttataatattttttattttttttttttcccgcccaaaaaaaatgggggtttttttttttaaaaattttttctccccccccccgcgccaaaaaaaataaattttttttcccaaatttttccgcgcgcctttccccttaaaaaaagggaaaattttaaccaaaaaaaaaagccccccccggtttttttttaaaaaatttttaaaaaattgggctttttccccatttttttttttttttttgaaaaaatttattaaaaaattttttttaaacggtttttgaacccccccaaattttaattaaaagttaaaaaagggtttttggaagttttccttttaaaaaggggggggaataaaaaatttaaaaatttttaatttctttttaaatttggagaagaatttagggtttaattttaaaaagtttcatggaacctagcgcattaaattgatattatttctccaaattttgcaggccttctccattgtaaaggataactttacctgaaaaaatggcaacgcttgttgtttttaaaatttttcgaaattctgactttttcattaattatttattattttgcaaaattaattcataaatattttttagaacgtgctctgaaacgcaccaaatgttaattaaaagttaaataaggctctctgatgctttcactatcaaaaagggagatgaataaaaaatctaaaaatttttaattgctttttaaatttgcgaaaaattttaggcttaactttttttttataaactgatcagaagcgaaccagattttgcgagggcatcaaaaagacaaggaaaagcactgctatgatgctaactccagtaattctgaatttaaaattttttattaatttttaaagcttcactattttatttttttagcaaaattaattcataaatattttttcacaaactgctatggaacgcaccaaattttatttacaangttattttaggca

SEQ ID NO: 25860 - DNA, 1779 bp, Heterodera glycines
ctgaattattacgatttgtcctgaattagagaaaggcactattaaaaatataaaatgtcctgaattattacgatttgtcctcttttagagaaaggcaatatgaaaaatataaaatgtcctgaattattacgatttgtcctgaattggagaaaggcaatatgaaaaatataaaatgtcctgaattattacgatttgtcctgaattggagaaaggcaatatgaaaaatataaaatgtcctgaattattacgatttgtcctgaattggagaaaggcaatatgaaaaatataaaatatcctgaattattacgatttgtcctgaattggagaaaggcaatatgaaaaatagaaaatgtcctgaattattacgatttgtcctgaattggagaaaggcaatatgaaaaatataaaatatcctgaattattacgatttgtcctgaattggagaaaggcaatatgaaaaatataaaatgtcctgaattattacgatttgtcctgaattagagaaaggcaatatgaaaaatataaaatgtcctgaattattacgatttgtcctgaattagagaaaggcaatatgaaaaatataaaatgtcctgaattattacgatttgccctgaattggagaaaggcaatatgaaaaatataaaatgtcctgaattattacgatttgtcctgaattggagaaaggcaatatgaaaaatataaaatgtcctgaattattacgatttgccctgaattggagaaaggcaatatgaaaaatataaaatgtttttttttgtttcgaaaatagtttaaaattaaaatgcgcattaaaaaagaaatttagtaaaattttggaatctcaaagtaattttcttaaaaattttttatttcaattgcctcttttgcaaaaattccagcaaaataaaagaaagttttttcaaatgacattatataattttgaaaattaaatttagaattttatgttccaggtcacctactactccatttttatagagtacagtaagatttaaataaactgttttttataaagaaaatatattcaaatgagagaaatagtacagtaaccatttaatattttacggaaaagaaacaagcgcagcggagaaatagtgcatggatttagttgccctctgccacccattccatcgctcatcaccccagcaaaaaatcagaaattcaatttctatcatataaaataaatgcgaggtggtttatctcctccatatttgggggtagtccaaataattaaaataataatcttctcaactgataatatattgggctagtcagttttataaatccgcctgcacatgcttagaaaaattcactaatataatttcgtcacaagttatttttattcagcacaaataataatataatttcttcagaaattattatgtacttatcattaatatttttaaaatttatgcaacaattgtcagctatagtaaaataatattattccctatataattttatacgaaattctcaaatataaactccttatagtaattagaatccaattttagtcaatttttccagcagtttttcaggttttttttagataatgataaactaatgtttttttacaccatcatatgatacgaatttttcaaaattaattcctaaaacactataatttaatagcaaagttattaagtatgtgatagtttttgtcgtgagaatttgatttcaaaagtttttttttcgggtactcgctcaatctcctcaaatgcattggtgccattacaccgattaatttcttactttttgtcttta

SEQ ID NO: 25861 - DNA, 2481 bp, Heterodera glycines
  unsure (1)..(2481): unsure at all n locations
gatatttttgatgatttgtggacgacnatggaaagtgacggaaaagttgttcatatttaaataactatttcaatattaattttaattaagcaaaagcaaaacaataagcaaccacaatttgagggacagaatcatttgacagcagaaaatacggcacaaaaaataaaagaggagccaattgaaattggaaacgaaatgccaataattaatgaaaaaatgaaaataaaatacgaacaagaagaagaattcaatgtaaaaacagaaccaaatattggagaaattaaagtcaaagaaggagcaaatttgaacaaaaaagatttgacaccaaaagaaagtgaaggaaacaattcatcaccaattaaaatgggattattatatcaagtcaatatcattctacaaatttttgaggataatgaaaatgcctaagagacaaaattttcttggtttttagcaggccggttttatgtcgctagaccaaagtgatcaatattttgtctaaatcttcgctaacgagtcacctaagctcttcaagctcattaaaaaatttctaagccttttttattggagactagagctaggaaaattataaaaatgcgcttactttgtttgattggatttagtaaaaatgagcaaaaagttattaatgtattcttaattgatttacatcaccttatattcaaatttgtagagaatgttgatcttattaatgagtaccttagcaaaggaagtgaacaaatttctttaacggaacccgaaaaccctgacaatgaaattagcgttgattttggagatgaaaaaatggacaatttttcatttaatgaaactgtagaaaacatttttgaacatttaaatgtggaaaaggataccaaaataaattgtgaaaataatagaaaaacaaaaaaaggtgaaaattaattagaaatatttttaaaattcattaaacgaaatttggaaaaaaataaaaataatttttaaattcactattaaggcaaattatctgttgaagagaagaaacaaattgttcagcaatatattaatgctaaaaaaagtttggacaaaaaattagaaagaaaagaaattaaaaatttaaatgaagcaattgcccacaaattgggagtaagcacaagacaaatcagagattggaagcacaaatatcaaattggtatatatttgttggttaatagtatggcttttgttattaggatcttctataaatagtcaaaataggcaaaatttatacaaaattggtaaaaaaatttagccaaattagtagggatgagattttaggcacaaaaaatcgcaaaataggcattaaataggcaaaaaatatatattataaaaaaacaggttcaggactaagaaaccataaaatctttttaatgataagtagggttaccaaaaaattcctgcctttaaatttcagatgctcataataccgtacttttttaaatacaataataacctacacattcttcaactaacagatttttcagtcagtgtgtaattttcgcgtttgttttttaatctttattttattacggtaaattataatttttcagaatccattcgcaaatattcgcaagaaaaaaagctcaaaattattagacaatttgacgaaatgttaaaggaacataagagaaattcgagcaaaaaatacacttacaaaacagaaaatcaaatcgcaaaagaaatgggcattaaccgtgcaacaataattcgttggagaaaggaattttgcttatcaagtaagaaaaggaattatttatctttttaattttgctcccgccaaaaaaaaataaattaaaagaaatttttgaagcaaattttgaaattgaaaaattgcagattttgggtaagacattagcttaaaacatatgcgattctttttcagtacttaaaaataaccaagaaaagaaaaattttaggagtagaggaggggaaaacgaatagacaaaaattctttaaatttaaaaaatgcatgaaatgctatttaattaaactaaaaaattcgaaaatgttacattaatggcaaaatatgtgtaaaaaataaatatttgttttctaattcaaattgtgatagaatttatgctcaattaacctaattaagaatggaaaaaacatagcgaagaagaaaaagaaggaataatcaagaaatatcataaaatgataagaacgacagaattcacagaaaaagaaattgctgaaatgttaaaagttaatatacgcacaattttacgttggttaaaagacaaaggtaaacaaacgatttgcaaaataaaaaaataaagaaaaaaataaaatgaataattattaaattgaaaatttattaattttaacaaatagattttatgacttataaagagcataatgcctaagatttaaaacaaaaaaaattgtaaaacaaatttttttaagtattcatttttaagaaaaaaattanaggaatttaagtttttctangaataanttatactttttcca

SEQ ID NO: 25862 - DNA, 1055 bp, Heterodera glycines
ccggtaaaggactaacttacactgaaatgagcgccgaccctttttggctcaaaaaaattttcgaaaatctgagtctttcgttcttttttattttttgcaaaattaattcttaaatattttttcagaaagggttctgaaacgcaccaaattttatttacttgttagtttaggcactctgatgctttttctatcaaaaagggagatgaataaaatttttaaaaatttttaattcctttttaaacaggccaaaaagtttaggcttaacttttttttcagaaactgatcagaagcgcaccaaactttgcagggatactgaaaggaagagaaataacctattttaaatattatctagtcagttcatttaaataatttttatccaaaaaatttttttttgggttttcggggcagtccccctgaaccgatgcgcccagatttatggggagaccgaatccttccggaatagcttcactatagcctgtactttaattctgcgttggatttttgctccccataattgtttgagtaccccaaacggacacttgaaaaaatcgatttatttttgttttcggggcagtccccccgaaccgatgcgcccagatttatggggagaccgaatccttcgggaatagcttccctatagcctgtactttaattctgcgttggatttttgctccccataattgtttgagtaccccaaacggacacttgaaaaaatcgatttttttgttttcggggcagtccccccgaaccgatgcgcccagatttatggggagaccgaatccttcgggaatagcttccctatagcctgtactttaattctgcgttggatttttgctccccataattgtttgagtaccccaaacggacacttgaaaaaatcgatttttttgttttcggggcagtccccccgagccgatgcgcccagatttatggggagaccgaatccttccggaatagcttccctatagcctgtactttaattctgcgttggatttttgctccccataattgattgagtacccccaaacggacacttgaaaaaatcgatttttttt

SEQ ID NO: 25863 - DNA, 2491 bp, Heterodera glycines
aggtcattgggtaattggttttggcggtaaaatgcaagaaattcatctattaaatccttataaaaaaaacaattttttcgggggagcaccatatggaaaacgcaatgttttttaaattaaaaagtaaaataaattttgtagaaaaaatctttgcctttttttgtttttttgattttcgatttttttgtgttaaaagtgccaaaatatttgacacggaacattcaatctcttccaaggaatggaaatgtgaacaacgaataataaattcccctgagataaaaaaagttttttaatgcagcggaggaaaaggaaataaatgctaagcaattgaccaactttggctacttaagcttaatgagaataaaatttgtgcaaattaaaatacaaattaattttttctaataaattaaatttcaaatgactattttaaaatatattatgaattatttaccttgtcaaaattttgtgttgccattattaataatattttgttttcatctaaaaataaaatgaaaaaaatggaatggcacgaatggatttttttgccaaaaaagcagcggcaaaattggcattttgattgtgcaaaaaaaaagttttggagccctcttcaactgaagagcaaatggactgcatgcgaattggttaagacggaaattggcataaattatgcaaaaataggcattttattcgtgagaagatgttttagtgttagcgtgtgaccaagaaattgaattatggacaatttaactgaattaactgaactcggtgccaaacatttaaatggtgccaaacaaaaaattttatctaaacccttggccagcgacacatttttaaaataatgccagacttaagtttttatttaattttgaccaagaattcccaacccttgaagtagacgccataattttataggtttcattggacacttttagtttcaaatagtataatttaaatatggaatcttaattttttttttttgatatttttatatcaaactttgggtttttgccatagagaaggtggcgcttcgtctgttgcgctggtctccgcaaaattatataatgctttatcctcgcctcgatgcccccggccccggacattttgcctaccgaatcttaatgtattcgctgtttgcgattgtcagagaatgggtgttgaatgtttgtgagaaaattcttttatacatctaccagggaacgaaaaattgtggcattaaatttcaaaattggcagaaaaggtggaattgttttttttaaatgaaattataactcaaaagcataaaaaattgttagatagatttgttctaatgggacagtgttctttttgcgtcccaatttatttttgtttacaaaaatgcatattgaaaattataaatctttacccatccatacagaaatggattgccgaaaattctaatgagagaaatttttatggaaaattttcaatggagcagaattatgtaattgtttcattccgctattgttcaacgaaatgatattgatctgaatgctaaacaatctctgatcatctcgattaacaataatgacctgtttctgttcacttttggacttttagaatttaattgttagtttaaatatattttttatttttttgttcataaaaattaaaatatttccattttttggacatataaattgtgaaaaagtccagcaccggactttcaattaaaaaaaataaaataaaaatagaaataggaaactccagaaattgtgaaatttgttataaaaaacaaaaaccaagaaaaatgccacgaaaaaggtgactaaatcgcattcctgctgactacccttgagggatgtcaccacttttgtgaatttctcggccggcacgccgttcactgtttttgacaacaataacttccagttgctgcatggaagttgtttgccatgccgcacttttccttctaaaagtgccaggaattgacagccgtccaattcctcacacaaattgtttgtcctgtcaatgtgtttcgactcatttggtatgggggggatttcattaacgcacacccatccatttatctgtcatcattagttatcgcattaacgcttgcgggtccgttacaattaattaattaattaattcaagcgagcggttgctgaaaataattaatgtataaacactttggataaacaaattaaaaagagagatgcaattttattaaaacttaaaataaaaattccatatttttgcgtgttgagatgtttcttaatctgtcagatttcgtatataatttttttttgtcaaaaatgagtcatgaattttgctgaaattaattgcaagcattccatggccctaaagtgtttctatattttgacaacatattccaaaaaatcttcaaataagaaaaaatcacactaagcaagaaaatgcaaagtataaaattattccgttacttttaataagatacgaaattttgaaaattccactcggacgagattcgaaatacctaagcaatgcctgttcctag

SEQ ID NO: 25864 - DNA, 1234 bp, Heterodera glycines
  unsure (1)..(1234): unsure at all n locations
cgtancatttttgtataaaaattatttcaatttttaaataaatattttaaaattttaatccttgtctcgagactctcgaagacatatccagacaatgtaatcgggattcataagcggaaactgacttaatatgtgggaaaatgtccaggaagcaagtgctcatgaacacaccgcccgcaaaacaggacaaaagcgtcaaaatgtaatccgattttctgctccgctgctcatcattttcgtcctgacgacgtgtgatcgcgtgaagaagctgaaaattaattaaaattctgatcaaatgttttgattaaaattggatttaaaataattaatgcttattctattcgatttttttaaatttatatttctgttaaatttttgtaaaaatccattaattcctaatcaaaattggtcaagattatcagcagtcctataatatacaaaataaatttcttctaaaaattctctcaattaaaatccacgattaataattttggatcactttgatcggaagcagtccggccaacgcagtggtggcaaacatcgcaaatgcgagcagtacttgcagagaaatggtgtccatcagcaaatgtagaatgaaaaaatgaaatagtaatgaatgacccgtgttaaataaaaaaaaacctttaattatttaggtaattagtttcatttatgccggtcagccaagcaaattcttggatccctttggtattgtcactggtcttgagattaaggggtataaaaatggttgataaatatattcgagactcaatcaaaaattacagagactcgacacactgaaagcaaaaatttctcgggtcgagactctcgagcagcaaattttaaagaaatatatcggtcagagcagttcaaaatttccgctctccttaaagatacagctcacaatcagtaatttttcctcaaaaatctgccgctattttatatacagatatatggtagggacgtaaaaattgcattttttttttccccctaaatttgggacgaatggtcgccgggaaccaattaattggcaaaaaaataaataaaataaaattgcttgtgaaatgcttgttttaactgtggtgacttgcgatcaaattgggggcacttattcactcattncgttcgtcgtttttcgatcgggcgcccctttgttggttttgcggtgcggcattttgcaaacataattatgcaattatcatttttatgatttgtgtgngacattcattcactg

SEQ ID NO: 25865 - DNA, 1003 bp, Heterodera glycines
ttttatcatttacctgggaaaatcacattaatagggctagattatttaaagatttagttacatttaattaataaatcaaataataaaaatgttgcaccaaattttggcgaaaaaattagccaagttgcgcacgttcactggaaattgttgatgatgtgatcaacaccgcacccaaaaaaagcaaaagaatgtaaaatttcatttctaaattaaatgcgatgaaatttttcaaaaatgaactgaattctctgatttttttgtcttggcacatgtgcccgtacctcgttttatttatatacaaatatttaaccgttaaattgtacaattgtactacaaacagcgcattatttatgaagaaatatgaaaaataaattaaaatgaataaaaaaaagtttactatttttaggtacacaaaaaatcaatcttttttattttggttgtgccaagaatttcaattaagacaaacttacgtaaaaaaaactgtcaagaaaatataaaatgaacaaatttgtacttttcatggcatttaaatatattaaggaaagagcaaaacctctttgaaaaaaactcattacaaaaatacgacgaacttaaaacataaatgaaggagccacagatccaattaatttctataaaactatttttcaaaaaagttataaattgacaaattaatctttcattatcaatattagattttatttattgaaagtttatttaattaaaattgtacttacaagtattctcactattttcaataatttaaaatttttaagaaaaaagtgttaagcatacgatatgcaacctttaattacacattaactaatggaaatgcttacatttgccattcgtggattcatatcagcaagtgattaaggtttacaaattcctgaaaccaggaaaaatcgacaagatttaaccgttaaacaaaatgcaaattatggttgaaattactttgaattttctcatttgctaccatatcacattaaacaaaatgttgtgcttt

SEQ ID NO: 25866 - DNA, 1817 bp, Heterodera glycines
cccctcccttgccctccgccatccctctttccctctcccctccctttcctatccctcttcccgcctctccccccccctctcggcactttttgtctcccttcccccaatttctccttgtatttgccatttcttccctttaaagttccaaaaatggcttcacaccaacaatatcagcgttgatctgatgcatgaacccaatttggtgctgacaaagactgaccctccgctcgctttgctcgcctccctttggttttatatgacccctcagcccccaaagccgtcaatgcacgacataatcactggtgaggaggcaatttgaaatggattcgtgcattttaataataatttccgtcaaaaggacaatgggaggcgggcgaaataaatgaagcggcgggcttttcgggcccaatttttgggccgacgagtttagtgattaacaacgaatgtgcgggagaggatgaaaaagcgccggggggcggcggcgaaaaccgacggatcaaagcattcaaatggctctgtcggcattttggagtttcggctggaaatcagacgactttgagttgcaaaagtgatttgactggtcaagattccttgtcttcaaaaacagtttttcgcagaaatgccgcggcacttcgatgagatgatgcacaatgtcagctggcagcccgactggtcctccacttggcgggaggatcggccgtgcgtttgtgcccccgccgcttacgggggttggctgcatgtgccgttttacaagtggcatttccccattatcaggtgccattccctacttccagcctggcttttacccttcccaatttgtggaagaaaatgaggccaacaaagcccagtgtaaaaagatgctctccgaacagccgcaaaacttcggcatggatccgatgaccagcggctgtctgaaccacacaaaggtggcggagggagcgaaagtgccaccggggacaacgacgctgacggaaaaagtgccaatgagtacggcgggcacaaaagtgccaaggatggcttacggaactgtcagctatttgcgaccaaatctgacgataattgccttgggatagggcggaaatgcctttgtatttttaatttaaaaataatttatcggttgtttcctttaagttgtcattagtaaaatatcacttccttaaatttgggggaatgtaaagattgtcataaatttgtttttcattttgcttggtaattttgtcacgttcaattttgtgccttcgctgccgctggtcgataaatgccacacttcgcctgcctttcgtgccacccttccctttcctctcccattttatttataatgattctttttacaattttacatcccaaataataattaatcaaatgcttttttttctgttgctcctctctctgtccctttttctgctgctcgtgccaaatgtctgctgtcataatgccgaattggtgctgctcgacccctctcagatcggcttctttctgcccaattattttgttaaaaaatttgagaaaaaacttttcgtgaaatttgccagagaatttcggcctgtttttgtcgcatttgcaatgctcgaaccgccttatttatacgtggaccaatcggaaaacattcgatcggtggaccgagcggaggttgagaaattaatgaagttcaaattggtgtcacgactgaggaaggagaagaagctgatggagacggcacagtttaatctgacgctagcacatgacatccaaggcgcactgttctcagttccggttccgtcggttgaacgatcgcgggaacaagaaacatttggcatcactaaattaccatattaaga

SEQ ID NO: 25867 - DNA, 1696 bp, Heterodera glycines
catgtattccgggtctcacaactttgtttaattagattatgacttgttcgaactcgcgccccaacgcaaatcctctgaaatcggtgtttggaaatgcgcttttttgcgagcggggcttgtcgaaccgttgacagaaaaagttacgaattgtttgtccgatccgaaccacgtctgaagaggcagcctaagggaagaaaagggaaacggagaaaaaacaaataaataagtaaaagtacaaacatttcttttctcttcggcggagtcggctgctgattctccgacaatggtaatcgttttttagccattttacacgattttctgctttataaagaaaattgaatattcccaagctattctttttctaaagaaaatcttaataaatattgaatgcattatggatcaagcccagtagagaccggactaacccggcgaggcttttaccttttcacggacggacggtaaaaaagaaacgcacaaaatcattggcgtagaaaacaaaatgccaatattcaaattcaaatgaaaaacaaaggtaatttaatccgatgaatattttaaaatcataaaaattcattacaaacaaagaaatttattatgatttaactgtaaattaacaattttattattaaatattaaaaattgagaaaagaacaaaaataagaattttaaataaatattactgaaaaatatgatagaaaatcattaaaacctatttttggattttgttttgttttacaatatgtacaaaagaacaataggctgagttctcaggatgcaacggaattccgagttcagattacaggggataacgggatgaaaacattctgtataatactaaagaaattaaaaaatttcaattaaattctacatttatattatgatttttagggctattaatgccgaagcatcggcatttttaggggcagcgattttgactgagtagggcgggcaatcgtcggcaaataatcattgaaataatcatcatttttatattcatgcatggtttcaagagagaaaaaagtgtagcctaagggtgcttaattgccaagaccattgaattgattgtcactgttttttgggcttactttcatttcattgtttggaaccataaaaattacctaattcgatttattattctttcttcactatgctttactgttttaaaatggacaatgtttctttcgtttgttttcttcggatgaatgattttatttccgactgtttctcttccgtctctcattttggcacttttccgctgaatctcttcggcttttcactgtttctaagctttgtccctcctccgtttgccattgcattttcctcaatttgtcctccatttccaaattcgtttcccgtgccattcccaaaactttgtccaattcctgcgcatatttttcccttaactttcgcacattttcttttttgtttcctttcaatggcactttttgttccatttcttccgatttctccacacttttcattaattttgtcgtttttgctgtttcagtgccgtctccgccttttttcaattcttccgttgccaatttccgcgcattttttctcatttttttgtaattatttttaaattgattaatttgtttaacatattttctctcaaaatctgttcaagaattgtgaaattgttctcaataatggcatttaattcttgtcgtataagcgctaaattttctttaag

SEQ ID NO: 25868 - DNA, 1259 bp, Heterodera glycines
caacggcggcacttgcatccgatgcagctgttcacgggctctctaaccctatttttattttttctgatctctgctctgaaaggagttataacatttttcacaacagttttgcatatttcagacacattcaaaaatttttaattagtatggtagtccaagcctattattattttttttgactagtctctgaatggggttatcaattgaagttttagtatcctttttgaaaaacaaaaattttaataactgatacggtagcccaacatccattgccccaatgtacccttcggttctccaacgggagctaacaattgatttttctatctcttctctgaaaggagttataacaatttttcacaacagttttgcatttaacagacacattctaaaatttctaattagtatagtagtccaagcctattattattttttttgactagtctctgaatggggttatcccagttttagtatcctttttgaaaaacaaaaattttaataactgatacggtagcccaacatccattgccccaatgtacccttcggtttgtcaacgggagctaacaattgatgagtttgtttggtttcttttttaagcaattttccgtcattgctcaccaactgttaggcgtacagcaacggcggcacttgcatccgatgcagctgttcacgggctctctaaccctatttttattttttttctatctcttctctgaaaggagttataacaatttttcacaacagttttgcatttaacagacacattctaaaatttctaattagtatagtagtccaagcctattattattttttttgactagtctctgaatggggttatcccagttttagtatcctttttgaaaaacaaaaattttaataactgatacggtagcccaacatccattgccccaatgtacccttcggtttgtcaacgggagctaacaattgatgagtttgtttggtttcttttttaagcaattttccgtcattgctcaccaactgttaggcgtacagcaacggcggcacttgcatccgatgcagctgttcacgggctctctaaccctatttttattttttttctatctcttctctgaaaggagttataacaatttttcacaacagttttgcattttaacagacacattctaaaatttctaatttagtatagtagtccaagcctattattattttttttgactagtctctgaatggggttatcccagttttagtatcctcttttgaaaataaaaattttaataact

SEQ ID NO: 25869 - DNA, 1982 bp, Heterodera glycines
  unsure (1)..(1982): unsure at all n locations
tatcggaatttgcacgagaaatcgtttggagtgaacgtaaatgtgaaactgcntgtgtacataaagggaatgccatggaaaatatgggcaggaattaatacgaaaaatgaaagcactgagaaatggttgggctttttccttttgtgcgatgcttctaaaaaaggttttggttatcaaattattaatagaaataaaaattattttttctataaaattggtgtaattaattattgaaaaaacttatgtaaacagtaatttttaacataaaattaaaagtgattttttaaaggaaatgcgttaaaatataaatttgattattatttaatttgctttaagatggaaattggagccgcaaatgttcggcaacatttcgaattgtctctcaaaagagcggtgtggaggattttaagagagaatacaatgaaacagtttttaacaatgaagcgaagtcttgggggaactatttcatttcttttgcggtgagtggaaattaattagttaatttacattttaatattgtaatggcaaattaaggaattaatggacccaagcaaagggttgtacaacaaagacgaggacaacgtcaccttggcaattgattttacatgtgaatagcgtaaacatttcgagaaggattgaaaagggaaaggaaggaaatcagcaggatgagaagagagtcttggagggcacaaaattttcttggtgcttaaattttatatttttttatgttttgtaaagtattttggtttcataaagcaacatattccaatgatagggatggatttttatgtgctaaaatcgagaaatatatatacctaaagagttgataaaaaaggcagaaaaatttgctaaaatgcagaaaaatgccaaaatagttttcaaaaaattggaaaaacatgtcaataaatgtgtgagttttccagaattgcccggattcatgatcagctaccctgaaaaccattcgaaatacgctttcatgattttggtaagaataatttttttgaaaatatgttcggatgcggggttcggaattggcagaaaaagaaagcctaattcttattcagcactccaaaacgcgccttgaaacgttttaaaaatttcgagaccagtaaaacacattattatcgtttaattttagctgcaaaagaaaaattcaaaaataaaattaaaattaaaaatctgagaaagaacgaattctcgtcaaaaaccaatttacaaagcaagcgtccggagggccaataggcgctccgggaaaactgaaaatttatgttcatttgctaaataaatttatgaagaatataaaaagatgtaacttattgctgatttaaggcttgatttaaaaaactaattgaggagagaaatattttttgtttttatgagatttggtagaagattttgtccaccaaaaagtggacatccgaatgctcagctgtgctcagtatcaactttatctcatcaatcactgatttggacatgataaactgaaatatttgttagattatgatacataaaatgatgacaattatgtcatcttttattgtctcctcgaaaatctccattttttaataaaaataaaatttttaaaaatggtaaatatacaaataaaagtacataactaaaaaagtgtatttggaaaaagagacacaaattggagacattcttttaggggagggcacaaacaaaaaattacggcaaaatgatgacctaaaaaagaggctaagaccagaaaagaatttgatggattgaattaatctctttttttctaataaaatgaattgaaaattaattcccttcatttttaacagtgtaaaaaacaacatttgcttcttctctccaattaacttttttaccatcaataccaatttgtacaaattttgcatataaatagagaaaaaaaaacttcggtcaacaaaaagacgtgcaaaaaaatttttattttgcatttaggtatataaattaattgcaaaaaaaaatatttctca

SEQ ID NO: 25870 - DNA, 1604 bp, Heterodera glycines
tttttctgataattttttaatcagccattggcaattccttcgttcaagcaccgcactgctcctccagaggcaaccgatgagaatggccatggattcattgaggatagttggatttccgactcaacggaccgtgaggtagacccctcagtttaaaagttttgaaattttttctttaataaaaattcaagctcgatgccggtgttacgagtgacaaaaacgtcgttgatggtttgccgccgaagccgaaggaaagaaaatacaagtcccattacggtaatctcccacatttctgatcaattaataattacagtaaaaatgtttacagttttgacccccatccccgaagaggaggacaatgaacaggaggacaaggaagattaagaatgagggactgatggtcgacggataaatgaatgaattaacaatatcatactcaatacattaaggagatcgaacatttcattttaataaaaaaaaaatattcaaaaaaaatggccatcaccaattataaaattaattgtgtaattcccatcacccccaaaatttaccacgagaatccaaattgcacttttcactccccacattcttcaatttcctccgtaaatttttgtagtcggtcacgaattgaggccaacatgcataggcttgagttctgcttggccttttcctcaacggtcaaaaccttcgcaatcagttgcatttttaaatttttgatttcttccagcaaaaaggcttcgcctaaaaatgttgatcaatcagataagcaattttaaaacttgatcaccgaatgtagtcgggccgttcgacggaccgccaggtaacgaggcggatagttccattctttcgaaccccatcgagatgtcatgcatttgcacttgatgtcgaagatttcgtcgttgttgctttttcaggtgccgacgaatacggaattgggaccatagataatcactgttccgttttgttgggtgggagttgaaacgacggtttggtcgcattttagaaattgcgtaatttataaggaggacactcaaatgactcaattcaaggaatggatggaatacacccgaaagggttagtcaaaacaaaagctgcgcagttgcgtgactaggaacccgccccattgacacccagttgctcaacgaattaaactcaaaaataatttattaaaaacaaaataaattcaaaatagtgggagtgattattaaaaatattaatcggtaaaaaacaaattcattccggctttttctggttctttttttggccagcgatcagatcactgacacaacaattaagtttagcgcattcttcacacatctcgagtccaatcgccactcgcccatcttccagccgacgtgccttgtctttgttgtgaaataaattgttccagtcctctgaaagctgtcaattaatttggtcgtcaaaaatttgattaacctgagcacagccgaatcgcaagcacaaattggcctctcgtgattttccaaagaaatcgctcatcaacgtttggcttcttagctttcacttgttgctcctccgcagtttcatgttgtacaaattgttctgccatttgatgatgattttgcaagaaatgatttgattgtgcg

SEQ ID NO: 25871 - DNA, 1511 bp, Heterodera glycines
actcagagtgaaatgaatcatagccatggcttttgattttctatttacggagtttaacatttcacaacaccgaagcattaacattttcatttctcgcttaaatttgaaccccccccccccttctttcccaacagtttaaagtattattaccttgatgtgttttctgtccctgctaatcaccgctcaattataaggctccccgtcgaaactgagccccgcctcggcagtgttcgcacccaagccgttgtgcgtgttccgtgggcacaccgcggacgtgttggacttgagctggtcgccccgcaattatttcctcctttcttccggcatggaccgaactgccaaactgtggcatttgcaccgcaacgaatgcctgtgctcctttcagcacattgactttgtcacttgtttggcatttttgccaaaggtgtgtttgttttcaatgatctataattggctttcaatctaatggtccaattgcttttgatttgttcgatttccttttcatcgcccaatccattttcaggatgatcgttatttcatttcgggctctttggacggcaaaattcggctgtggcacattcccgagaagaaagtggccatttggaacgaagttgagcaggtggaggacgaaatttatatgactaaaatcacaaattcctaattttcaggttaacaaattcatcacggcaatgactttcgtgaagaatggcaaatttgtggtgatcggaacttttctgggccgatgtttcttttattcgaccgatgtatttattttgtttttttttagtatttttaaatttaatttcctcatttagcaactcaaatatcacactgtcattgacgtgcgctcgtcccgtggcaaaaattcggttggacacaaaattacttcgttggccgtccacggagacaaactccttgttgcggtgcttccaataaaaatttaattttaaaaatttcaatgtttttttcagtcggatgactcgcgaattcgaatatacgacttgcgtgacatggatttgtgctgcaaattcaaggcattcaagcgttcattgctttatccgtttattttggccattattttcatttttccctttttagggtgcccaaatcagtcagagtttaatccgcgctgccttttcgcccgatggttcgcatgtgatcagtggtaaatgtgtttaaatattgcactttccgttattcaaattccccacaaggctctgaagatgcacacatttatttgtggcggaccggcccattgccaagttcgttgggtgtgcgcaaggatcggaaccacgcatgggaacgcatccgagcgcaccaatcggcggttagctttgacatcttttaacatttatctaattgtgagaatgggtaactcgaggtattcttgtatcatcacgaaccggagcagttcgtcctccacccaatttttttttcaaacccttaaaattttccacaactaaaaaaatttgttgtaattttctaattaaacaaattttctgaattttttt

SEQ ID NO: 25872 - DNA, 1352 bp, Heterodera glycines
  unsure (1)..(1352): unsure at all n locations
aaaagcccaaaaatccggatccaaatgtaaaaagaaaaatagtgcacaaaaaggagccgcctcacggcggggcttaaaagcatggtacatcataattacaagcgaaaataattttcgtatattttttcacaatttatttcaaaagacaacaaaaaattgataaaatgttgaaacgaaatagtgcacaaaaagggagggatggttagacgaaaagaggaatttttagaaaagaacgcaccccatctgatattcccatttttctgtttcacaactggccaacggcgactgtgctcattgacacgtagttgttcacagtagttgtccaattaaggtacttggactttccacagtaaaatgtggtgcaaattttggaactgtcccgcctcacggcggggcttaaaagcatttgtagcgcaataaaaaagtttattgttttgaatttttcacaatttatttaaaaaagccaaaaaatccggatccaattttaaaaacgaaaatagtgcacaaaaagaagccgcctcacggcggggcttaaaagcattgtacatcataattaaaagcgaaaataattttcgtatattttttcacaatttatttcaaaagacaacaaaaaattgataaaatgttgaaacgaaatagtgcacaaaaagggagggatggttagacgaaaagaggaatttttaggatgggacgcaccccatctgatattcccatttttctgtttcacaactggccaacggcgactgtgctcattgacacgtagttgtccaattaaggtacttggactttccacagtaaaatgtggtgcaaattttggaactgtcccgcctcacggcggggcttaaaagcatttgtagcgcaataaaagttttttgttttgaatttttcacaatttatttaaaaaagccaaaaaatccggatccaattttaaaaacgaaaatagtgcacaaaaaggagccgcctcacggcggggcttaaaagcattgtacatcataattaaaagcgaaaataattttcgtatattttttcacaatttatttcaaaagacaacaaaaaattgataaaatgttgaaacgaaatagtgcacaaaaagggagggatgcttagacgaaaagaggaatttttagaaaagaacgcaccccatctgatattcccatttttctgtttcacaactggccaacggcgactgtgctcattgacacgtagttgtccaattaaggtacttggactttcacagtanaatgtggtgcaaattttggaactgtcccgccctcacgcggggcttaaaagcatttgtagcgcaataaaaaagtttaattggttttgaatttttncaacatttattttaaaaa

SEQ ID NO: 25873 - DNA, 2239 bp, Heterodera glycines
  unsure (1)..(2239): unsure at all n locations
tcatcagagggggagagatgcgaaaagatgaaaagaactggagagagagagagagagagagagagagagaganaancgaagtaggagaagggaagagttgtaatttatgttccgttcgttttatgcattacaaatataatggtagtattaaagttgaagtttgtgtttaagggaccaagatggggagggaaagtggcgggaaagataagaagaagaagggtaacataacgaagtgaagttcaaaaagggacttcgatgcgaagagagagagagagagagagaggggggaggggaaaagaagtcgccttggggtagtcgccttccgatctcacgtggtggaaccggtgacgaaagagaaaaacagaggcgtgggatctctcttctgtggttgttgactatatacacagcagcagatgcgaggaaaagaaatgttaggacggtacggaaatggggacggggagagagtgttgtgaaataaaggaagtatgacaaggccctaaaaatatagcacatcttcttaagaaatacagcacttttcgaaaacactgaaattgatcaacccatttgttataaagttctgctttttcaaagggcttaatcggtttttctgaaaatctatccattcgaagatttttttcccgtaaagtttaccgttttttcatcttttgggtttttctactcattcatttttccgagttcaacaaaagaaaaatcaaaaatcatcaaaaaaggcattatgccaacctgatcaatgtaagatgtaattacttaccgtattaaagggggcgggggggggggttctaattcagtggagttctatttcaataaatacggtacttaagaattacggtacatcaaaatatcatacggtataggtatcaacgaagagacctaaactaataaaagcatataaaagccattttgtgctttttctgtttcctcatacaatacataacaccgtccgaaaaaacgtgaggtgaacaaataaaatgagtgtagaaaaaaacgactctcatttttgcatattctttcagaatattaatgacgtggagcggattcgaaccttcattccttctccattgacaaccttacaaaaaccactaattatgagtcacagttctcatcttttcactagaggggggagtattttccgtacgctgtgtacatatttgttttcgcggttttttctatcctaaaaactcttaaattttcccgttttttagcgttaaaaatggcgagatgagtagaatttgcttaaactgagctcttgtacgaaaaaagattgcatgtgtggctcagtggtttttgtaagatagtaaaaggacaatgggcggaggttcgagtccgttgtgcaacatgaatatttttatttatttttgtccaaaaatttaaaaaatacaatttttaaatttatttttgaaggtttttttttttttttttatttcaaaaacggaaaaaaagtttcttagagagaataatgtatgtattagaatttttcatgcatgtaacaagaaaattttgatttctgctgctgaacaaataagcagggatgcaaaaaacatgcaaatgcatattttttcctggcttctccatgctctaaatagcaggaaaaacactttcttttttgtgtttgcgtataaaaatcgggacttttatttgcatatttatgcatatttcgccattttttggaaaatttgttaacaaaaatgcaataaaaacggaaaatacacccctaagaatcgaccgaaaatttttaaaaacacaccactaagaattggaaattttctcaaaaattcttcccccaaattttttttttcatgagaaaatttttgatttaaaaaatgtcaatatttgctaaagagaattttataaaagaaatgtagcagctcattggcaagtgcattagtaaaaaaaaattttttttattgaatttgcactcctaattttcaattttttagtgcatattttacgatttttgtgcatatttggtgcatatttcacgactttatttgcatatttatgtgcatattttggccacttttcgtgcatattttttgcatccctgcaaataagggtctggtgtgagttaagtcatactgaaatgtcagtactgaaatgactgatctcagaagaaggtgatttttcccatttctcttccttttttttgttttattcgccatcgccacgttcacgtttaaaaatgtttctacaatgttaccaaccagcatctaaaacattt

SEQ ID NO: 25874 - DNA, 1320 bp, Heterodera glycines
aggttttgattgatgacgtagataataatttttacgatttgtaatttaaataaaagctgattaatttagtttatgttttagtcttaaaagtaattataaagatttaaatttaacaccgaatttaactttcccgaatattttcaatcttgttcgctattcgaagtatttctattatctgatgattaaacgtcacgtaaattaacagttttgaatattttacagcaattttactaaaaaaatatgtaatattagcgatgaaaattttttaagaaaatttgaaaaatatgtaaaagaatccacgaaatatgtatgaaatatgtacaaaatgccagaaaaaatctgaaggcaagacagtatttcgtgcatgccattttgaattttgggtacttttccgttttgcgcctacaccataaaattttaaaaatttatgcgaccgaattttgtcgaaaattaaatttggggtttttgtttgagccgcatattcgtgatctgcgcattttttaaccccaaattcacaaaaaatcaattacttgattaaaaaatcaagataaaatcaatgattttgaaaaacccaagctcatttttctagcctagaaaatatgcttaaatttttaaatttatttttcaaaaaaaacacaaaactttaccattgccatttccaaatggtcttttatgtcaggaggggtcggtttagtctgaggtgacgttttagtcagggggtcgttttagtctggcaagctgattttgtgccatatggattctaatctgattttttttcaaaaaatgtttaatttaatactagaacatatttatcaatgtatttccaataaaaaaaaacattgaaaaatcattacgggcacatttcataaattcgagataatgtaccaacgagaaaatcgctgatgatatcgggattaacattgacagtggcatgcccgtaagagttgaagaattctcgcatcggcgatatcaccacctcgaagtccaacgaaaagtttcaggcgaaaaattcggtcatctttgacaatcagttgaggcatacgtgttcaacgcttcacacttgaagtgagaaggcagtacgtaataaaaaatccaattaattcgccttaaaaaccaaaaaaaatatgaaagaaattaggcttttactttgcgaggacataaatttacctgaaaaaggtggcgccgactgaaagtgccgtctgcgtacacatttttcataatacaggtccattgtaagtcgaagatcgagcaaacaccaagccttaatacagaatttagtggaattttaggattttcattttttcacctttgtggacagcg

SEQ ID NO: 25875 - DNA, 1484 bp, Heterodera glycines
ccttattttccataagtataaaagcaccaggaatgctgccttttagaaccaaagagctaaatgtgtacagctgtcgaagatcctttggagagacttaaaaaaacaaacaattcaaaaaaagcagcataaaaacttttaaacgttccatcgcatgcccaattccgatatgtacgtagtcgctgaattccagcatccgaacagaaaatgaagaaaaccggattttcgggttcagcagtgcgagagtcgaccaatagaaatcgattgccatgatgatcagttgcaaaatagtcgtgaaattcgagctcagctaaatttcggtcaaccaactcttgtccaggaattagacggtgtctttccattgtccgttgtagtgaccgagacttgggcaacaacacacgtgcatcatcactaagagtctctcggtgctctgcaattgaagatgatcaccgataggaatgcagaagggcgacaaggataggtacaaaaatggacaagattattcttcatgccgatctttttttaactcttgctatagatattccaaatatgtaattaatatacttagttttattatattcttttttatttatcatagcaaatcttagaaatttttattttgtgattacattgtgtaatcgattgaattgtataaattaaaatataatcttcaatattttgatttttatattttccggaatttatttatttattattgttacacaaaaatatctcttttattaaaaagcgatctctaacaatgttaaagagacttttaaataattatgaaaaattacgaaacaaaagttaaaagaatttaaaagaagaaattcacaatttcgaaccaaaagtcaaaaattcattttcaaaaaaattcacatttcctgcaaaaatcgttttagggtggttttcagggtggaaaatacaattatggtatctattttggttctcttcgagccaggaacctgatttcgacaaaagtaggaaatcccagtttttcagatttcaaatttttgttcaaatttggtctgcacttttgttgaaaaatgaatttgtacttttttcaaatattgttcgaatctgtgtcagggttcgaatatggacaaaatagatagcagaaccggttttccgaccctaaaatccccctaaaaagcgtttttgtgcaatacatgtgaattttagtgaaaaatgaattttcgacttttggttagaaatcgggtccgcaattcgaattgggctaaaatcaatgtcagaatcggtttccccgaccctgaaaacccccaaaataagtttatccccaaaaaattgtttttttttatgaaatctaagtacagttaataaaaatggacttattcaaacactttttatttcatttaaaaaaactcattaattttttaagtatctttaaagttaaaaaactatattttttatttaatatttttttttaatatatatttatttaaaaaaaattgaacttttttcaaggg

SEQ ID NO: 25876 - DNA, 1706 bp, Heterodera glycines
  unsure (1)..(1706): unsure at all n locations
attttttttaattaaaatgaacatttttaaattaattttttattaattataaaatcattaaaataaaaatttaatcatttttttcggtaaagtaatagagtttttcccgggatcccgatcccggcttttaagaaaaaagggacaggatcggggtcccgacaaaatcgggatttgaatcccggtaatcctatcccggcctgatgccaatccgggatcctgatcccgactttctcaaagttccgggctcagtaaggaatataaatttcagaaaaaaaagtttttttttttactatccagaaatggttaaataatttctttctttataataataatctttttatttccgctttcttttttttgttaattcaacttttaagattaagctctcaagtttgaattcgtgccctttggcttcaattactacaatataaaacatttaaggaaagtgcgcaaggattagttgatttatgaatttggcgtcgtctgtcttttaaaagcgtgctgaaaaaatgaaataaaaatataaaaattttaatttaataattagggtggggatttttcagtttttttaagggtggggattttttggttttttaactattttttctgcggctttgtttcgctgagaaatgcgagaaaacttattgtcagcctggaaattctcattttaacgcaattagaagttaatttcgagaacatttcaaaaattgacccctactaaatcaggaatttgaatttttaattgttttctattgcaaaaattctatttttttttgaaaaaaaggaaaaatcgctttaaaatagagctgccatctgtccttatttcgaagatttgtccttatttggacgggttgggtcttagaatgctctaattccatccaacaaaaatttaggacagaataccgaatgtgatgtgtttgttggctcggacggcaaaggggggcaatttggcaagggcaaaatgggagagagtgcgggaggaattaaaataaaagaagtttatttaataaatataatataaagatgtgagtaagatgtgagaaaacgcggatgcttatatggagagagaaagcgtaggtggagcaattttagcagagcgacaaacaacaaaaaagagtgactaatactaagcacagaaatcacatattaaatacggaaatatcacagaaatataaaattaatcacaattattcaaaattatccaaattaacaattaaatttctcttcctcaatttccttccatttctctctctctctctttttccctcatttcttccttttctccactttcttagtcgctttggcgacagcccttgggctgagacaccccttgtacatgtatgaatggcacacaattaatcggaaacagtcctaattggttctaattaagcacacccttctgccggaccaagccctcgaattggccaaggccgcttctcaagtgacgacagcgaacgcaaatcgcaatcagcgaacggcacaacaacagctgcaagcgcccactcaaaatggtggggacacttcctcctcttccacgtcttccgttgtcagtgagcgaaggacatcacaaatggcttatttcgaatttcccgaggtaaataattcatttatttanaatccagaaacaatttgagattanatgatcccctttcaggctgattttgacagtttggaagcactcgtttgagtttgcgtacaccgcccga

SEQ ID NO: 25877 - DNA, 755 bp, Heterodera glycines
ccccccacctcacctcttttacacccccccccccctcgatgcgaaatggtcagacattttgtgccctttgcgggtgaatgcgatactggtttggggcgaatgaatttctcacaaaaacagccaaattgcagaaccccggttttttgaaaatggaaaattccggaattttttttggcctcaagaacaatgcccgctgtttttgggcactgctgactgaccacaatggcgtagtcggctccgtcaatttcggcatgtgccatggtcagcagttgttggcccggcatgcgcgggtcgaccagcgtgtggcgtcgactgctggtcaccagcaccgtctccagcccaatgtccacggtttgcacgcggcacaactgatcacgggccaccagcgaggcacggaactcatcggagaaggggccatcttcaccaacggcatcgctaacaaattgtttgaattttattttttctaaaaaaaatttttacactaaaatttcttgaaatgatttttaaaaaagtaaaaattttcagtaaattttttttaattttaagcaattttcttaacaaaattgcataaaaaactcaaaaaattttcccggtggcgcctatcggaaccgccggacccgggagcaggacataacgtcgccgcaaaatttttttaaaaaaaattatcaacatttttttagttacctagcctggttcggaaaaattctagaaaaattcaaaaaaatttttttttattaagaaattcaagggaaaaa

SEQ ID NO: 25878 - DNA, 1350 bp, Heterodera glycines
  unsure (1)..(1350): unsure at all n locations
tattattctctgaataagagaatttaattttttaaccttttttataatctcttttcgaagtttaacagagggcggacttttgggtttttaattgtctgatactcacattatccatcattttagacaagtaatttaaaacgatgaaaattaattatgcatacggcaatttgttaattattttatttctgttcctcaatcattttatattgagttgcaactgcagaggtttaaacaatgaaaataatttaatgaattaatatattattaatagcgatcgatgtcttaacaaaggagcgcaaatctaacggaagaagccaaaagaaaggaaaaagccaaatcggtaaagcaaattttaggataaaactatttaaatttttgttttttttctagagcaagttaaaattttaaatcttttttagcgaaataaaaaaaaatttttcagaaaaaataaatttatataatttaattttatttttaaataaagttaaaattagatatacggaatattttcagaaagtaaaattttcagacggaacaaaaatgaaaacgcaaaatgaggaaatgagaagcgatgaagccgagagacagacgaaggagagagagcaggtgaagaaactgttggacgaatataagcgaaaggtgaacaaagaaatggaaaagaatgtcaagaaaatggagaaggacgaaaagctaaaggaagtgctgagggaaatcgaagaagcgaaagcgaaacacccgggggagaagagaaaagcggcgaaatccatcacagagataaatgagaagcattgggacgaattgtaccagggggacattgtactgagtgtggaacaggcacagtatttgctggatactgtaacaaaaaatgagcaggaaaagtcaaatagttcaccagcgggaaacggagcggagaaaaggaaaaagcgcggaacggacgaaaatggcaaaaaagaaacatttcctattttgaaatggccacttctcaccatcccattctcattccacagcataatccgtaattgaaaataaataggcaattaaatggaagcccaaaaatgttaaagcattttagccgacaaattgaggcaggaaatacattttgcaattcaattgtggaaccgcaacacctgcttgagcatggttgaacatcgtccttcatcgccgggcatccaatttataaatatttcgggcaaagggtgcaagtcatgggttgggaaggaagtcaggggcaacccatcagcagttgatttacctggaataatcccggnntgtatcaggtaatggataactaatgtcatttttacttattnnaccagtcgggcataattgcacacganattggcatgcctt

SEQ ID NO: 25879 - DNA, 773 bp, Heterodera glycines
ggctgccaactgaaaattttcaaaatcagcatttggggtcaaaaatcattaatttgtaaaattctattccaaatttaaaaaatcaaaaaaagcttttttgaggcgcttttccataaactttatgggaagagggggctggcgggcaccggtaggcgccgccggagaaaaattaatttgcgaaagcgaaacgcgaaagaccatccctgccgcccccccccccccctgccccctgggaccgtccctgttttaatcgttattcatagaagatgcgtcaaccaacggtaattacacattggtacccaaagcgggggctcattatataaacacaattggacaaagatttggtcccagttttggcgatttcttgcagatgaacaagtattactgcggtctgcaactgcttccggatgggtcgagcataaacacgggcaagcacttggaatatttttggttcaaaccttttcgctacaattcactggagtttttgggtccctgatcccaaatttgacatcaatttttgaccaattcctagtccctaacctgaactggaacaaaagtcgtaactcgaaaaatgaaaattttcgttagagtccgggttagggataggatgtcagattcatgatcagggaccaaaaaaacacggggaaaaatttgatgactagaatttaaaaaatgtaagccaaaaggtttttaataaagggtgccggatccaggcccgtatccagaaagaaatttcggggagggcacccgaagagcttttttttgctcttcgg

SEQ ID NO: 25880 - DNA, 907 bp, Heterodera glycines
  unsure (1)..(907): unsure at all n locations
catcagttttggattagactgacaatttcgagtcctcttttcagggaannagaagggnnaaannngnnnngnngacctttaagacgcngngnngannnnananaaannggcannnncagnnggcgggggcancaaaaaancgggcaaaaaaggagncgggggagaaaaacgccggagggaangaannnnnggacgcaaaaagggcncagaacaaaaagagaannnanangaacggagnganngcgacggnncngnnnnganncccanccaannnngnngnnccannnnngcngngnannnnnangacgganannnncgccaannanncggcacnnnnncgncannnngnnnngnngnngggncagaaccagggagggcannnnaaaaanaaaacnnnaaancaaaaanaaanaaaanncnnggccattggccgagaaattcccggttggactcttgacgaagacatttcgagcgtggcggtggtaaaggatgagtcgagagttgtgagcccaatagcctcgcttccgcctcaagtttattttcccgactgtaacagctatgcactcattaaatgtgcaatttttaaataagaaattgccgaagggcgtgttaattccgcccttcaaaaaaaacccaaacaaattccattattataagttgccaagtttttaaatccactggcaaaaatactccaatctgttgttgggtctctgtttaaatcctagctattaaaattttttttttgccaaaagcggtgcttctccgtttttgtcggtgccgctggcggtggttgcgcgcacaatttaaccgagcagcggcgtgtgccaaggaatcggcacaacacaaaattgtccctttgtggcccaaatggtgccgacaacgtttttctgtgtttgcggtgtccccc

SEQ ID NO: 25881 - DNA, 1580 bp, Heterodera glycines
  unsure (1)..(1580): unsure at all n locations
ccgacgattcagtgccgacgattcagtgccgacgattcagtgccgacgattcagtgtacgttgaaaagccgacaattcagcgccagaaaatttggcaaaaaattttcaaaaaaacaaagtgaaaattttattaattgtaaaacataaataacaaatcatgggttcatctcataattgtgggatattccctgaagaaattcaatcacataattaaaatttgggccgggatttgcaaagtattggggatcgtaatgaatgggcactaacggattttggactcccatttcttgggcgtatcgttcaacaagagtaagaattcggcgatcggcgtctctgtactgcttccgcttctttgaaggttgttcgcctataaagtcagctttaaaaattttgatttatttttgaattacctatcgaaaattttgcaaaatcggcgtcgataattttctgacactttcggagtctgtcgataaatgtccaaattgacggatggtcacagccaaatgcgcgttgaagtgatcggtgtgcggcttctgcgtaattattcgtcctgtctcgtttttggatggttcgcagatgaacactccagatcaccggatcaaacagtgcagggtttcgagttccgtcaaaacgcggtcggccagtgtaattgttgatgaacctgtatttaacatttaagcaactttcaaaattgaatttttaccagtcaaaaactggctgaagttcgagaggaagttctctttcaagtgccatgattccaagcgtcaaatgttcaattggtaaaaaagccaatgatgtaatcattttggcatacatttgaaagaccgggtcagaattgtagcgctaaattggaatggaaattaaaagtgacacagcgttgaaggaaaaacctcaacaaggtgttcagtagcaagacgctttttgaaattacggacaagatgaaaaaagcatcctgacagttcacaatccgaaaacacttcttttacagcaccgatgattcctgcttcaaagtcaaccgaaattgagtcaggacgaaaattaggccagaaagacacaaccatccgaaaaaagcgggcataggtctcctttgtttttgtagtaagtagcccgtacaaaactgggaaaacccattgttcacgcctaaaatcattaaaaaataattgtttataaattaaaatgtacctcgcaagaactgcgaacacctgataaaaaagcggtggtgcgattgtaaaagtgccatcaacgtacacagttcgcatttgctgtgcccaactgccattcgactattttccgaaaattagaattctaaatttttaaattataaacggataatgggttttgtttccttaccgttcagttgtctgtcgtcctgcttctctgtaaatccctgaatcagcgagcaaaaagttcctcccgctcatcacttcttttgtagcgcgtgtagtcgtcacgaatctgtaaagcggcaacattgtctggaatgaccggttggagcgttttccttgtgccggacacgcttcacaacctaaaacattgattgaaaatgacanaaattcagtagagtttataccaagcgcata

SEQ ID NO: 25882 - DNA, 1216 bp, Heterodera glycines
agtcagagtctcccaatcgccaatcatttactatacatcattttgtctattcactcggcaattagtcttaatgtgtctttccgcaggctgttttcttcacctccactttgctgaccaccatcggatatggcaatttggtgccggtgacttcggccgggcggatgttctgcattttctacgccctcttcggtgttccgctgattctgatcactgtctgtctgtttctgtccaattttacgcattttactcttttttaggtcgccgatattggaaaggttaattgatttaaaacgtaatttgaaattgaattactttttgtttaaaaagctcaatcttttctctctgtggtaaagtgtttcgagattggttttcggaatttcgagctacaaaatgttgggcatttgttcaacttcttaaattcagtttttctccactttaatcgtccttctgtacacacattacacacgcgcaaagcttcgcctgcggcaacggctgattggccacggcggcggcgcagacgccgcggggcattcgtcgacactaatgaaggcgcacctccacgaagtgattagtcataaaagcaattaatgacccctctcccctcaatttagttgggtctctacaacatttccatccccgtcactttggtcgctgccattctactgggctatatgagcatagggtaataagcaaaattgctttttatttttataattttcgattaatcggggttttaaaaaataagaggggaggtaattagctcgagaattaatgtgtcgagaagcgaaacgcacccttaagctaaacattgttttgattttcaataatttgatctgtttttcttttaaagtgccgtccttttggccaagtgggaacgatggcctttgtaagtgaccacttttctgtcgattattaaaaacgggttaagccaattaaaattcgacgtcccaaaaaaggttcgacggcttttactactcattcattacgatgacaaccgtcggatttggcgacattgtgccggccaaacacgagttctttttgttcgatttattctacataatcgttggttggtaaatgaacggtggcacattttggcaaaagtggcgccgcttttcctttccaggggtggccatcaacacaatgtgcatcgacttagttgacattgaatacatcgaaaaggtgaccactccgttttttgctaatagccccaatttgg

SEQ ID NO: 25883 - DNA, 2091 bp, Heterodera glycines
ctctagagtcctattgagcatgtggtattatacatcgagtagatgtttctttcacatatgcaaatatgcgtatcattgtgaaagtccataaaaaatggtatcctatgctatgctacttatctgtggcaattggaaaatgaccattttatacgcaattatttttttcaaagcctgatgggacaacacttatgaccatgactggatttccgaagtccaataggacccaacctatttcctatttcggaactaattcagattgcgacatcttttggctctactgttctttatgagtccaatcaatagtttttgagtccgattactcagcttaggatattttttcattccacaataacatgaataaataaaaaagttcactttgatttgcgcaagcgactataagacattgtgcttgttctttagataaaagtgaaggtggcgatctcacgttaagttaagaaatgttttaaaaattggaactgacaacacaataaagtcgtttgtttacactaagcgattaaaatacgaagagtttcttgcttatttaaagcatgtttcttttgaaaaaagttacatttaaataaaaatgctttttttcttcattttcctggtcgcaccaattaccgtaatctctcccaataattaccaatcacctgaaacgcttaatggaagttgcatcgcttattttgactaccgtaattcgaaaaaccaaaaaataactgtattaccatcaacatcaatcgagaatgacgcagaatatgcagattgttacgtttcttgttcttcgttttctcccactgtcgctttcaataaaacttgtaatccagcgccaattggaaatcctgcttgttggattgtgtacaacagaagtcgaattgacatgggaggagggtgtccatcattgttttctggatcaaggggaatctcgaacaattcaacaaacgttggaactttaagtggtacaactttgtttctgaaaaacgaaagcattgacatgatcagaagtgaaattgatcattattgtgactacttgcttgttttacgaacggcttgaaaatcaattctcgtcgactttatcatggatgatttggtgaaattaatcagaaagtgtaattaggcattaaaaatttagttaaaagcaattaccgattaccgtcctgccaaactttgttcggtttacttcaaactttgtttaccagaccaggatcattttcttcatcgactaaatgatcagcagattcgccatgaacatgaacaccgtcatcgccatcatcatcagcatcgtgagcagcatcattgtaaacagtgttgtgccaaagagaaacaaaattttcaaaactttactgcgccgcgatcaaggatcagcattttggtcgaaaatgatggagctgtcatgcctgcgggttcgcttgctgtgatggatgaaatgagttatgatacattggttagccaatttcttggcaccgatgatcatgaaggtgtgattttccactttttggaaatcttttataattataggaatggaaaaaacaatgaaatttctcgcaagatatgaattgattgctaacatgcttctctgtcctgaatgccaggagaaacaagcatcattggtcaaatataaacagtttcctgaaggttatacggtaatttaaatttaacgttaaatgaatttaataaaaaaatttagtggcgctgtaataaatgccgcagggatgaccatgagagtgaagctgccagccgattttctgtccgttttgggtccttcttttcttcatctcacctttctttccacaaaattatgcgaattggctatttctgggttagtcaccctagtagtcacctagaaactgtcatgcgtgaaactatcattcgttcaatgcatacgatcatagattttaatagctcttatagagatctttgccaagtgtgggcagaaaggcagcaagcagaagggcggctgggtggccaagaccttgtagtggaaatcgatgaaagccatttttttagagagaaatataacaggggaagaatgataaatagagcctgcgattaggtgtgtggtctattagaaaggggcgctaccaaagttagatt

SEQ ID NO: 25884 - DNA, 1165 bp, Heterodera glycines
caaatgttccttttcgctagaatcaattcactcggtgggcggggagaccataaaatgtaaatgctttttcagagagtctcattgattcctatgcgagttattctgctgacaaaaaatcggcttttccactcatttgtacaattcgaatgtcgcggagggggggggcttctttcaaccctcgggtaaaaatttgcatttcccttgataaatgagtgtcctttcgcatttctaagtttgattggatttgcgttggcgcagaatcgggctcaattttcgatgaaattgctctcaacgaattgccaagtttttagcgcattttttaagcccttttttgattaggaatgggccgattacgatgagaagaattcttccgctcgttgagattaatggcatttcatttcgatttgttagagtttaattttaaaatatgaaaaactttcattaacagaatgtgaatatttattgcccaaagatacagtatgcatatgaaaagggacggtattcgactgagagaactaataaatgtgttagttgcaagagattcctttgcatcgaacactaaaacggatactcaattgcggcctggctagaaacgactcaccgattattctggcaactgagaaataatctaaatgaactactacacgtgaggcgacagagcgatgatcgcctgatcaagttaagcaaaaaatattgaaaggaaacgaggagccgtttgagcagcccaatggccaaaaagatgaagagacaattttggttatcgttaccgataaaaaaggggaagtatttccatctaaccaatatgagattgaagataattatccatcgtcatcatcatcatcatcatttattgcccaaaacgaaccatcggtaacgaccaaaggtggagaaggattgttaacggtccaaattaaaaaaaaccaatgacaggggataatgagcaaaaaaaatacaaatggtaccatcagattttccttcatataatgacgatgatagcagagatactattatcaatgaattgtcagaagaacagcttgcttctactgttcccgaagaagatatgccgaaatcggagccttatgatgtagatgagctcccagatctgcctgatcctcaagcgctttctgccaaggggagaggaggtgataaaaaaggagtaacttct

SEQ ID NO: 25885 - DNA, 1072 bp, Heterodera glycines
gagaggaggagcagcacaactttttttggcggcggggtgggggggtggcgggaataggggatgctctctctttctctcccctccctcctccactctctcgctcaatcgccgtgttccgctgctgcccttgctgcaacgattgcgcatcgttggggggagagcggacgggggacaagtttgaagcctttagccacagggcgagtcgcgcagcaaaaaaaaaggggggggaagagagtcaacgccaccacaacaaccaacaaccccccgccgggcggcgaccaaaatggtaggagaggagggaaagtgtccgccgcgccgactgatgcgcaacggtggcgagaggggggcgggggggggaacatatggctgttgctcgggatggcgaataaaaatgtatcggaaggtgggtgattaagcagccctatggcgcattgggagctgcacagttgagaaatggagagaaagcatcaaaaagtgggggaaaagcattgccccagggcacttgggctttttgggcaaggcaaaatgctaatgtcacttacaacagcagcagcaaaggtgaagcaaaaatagggagaaagggatggtaatgaaaaacaatcacttttgatcagaaatgctgatcaataatcgttgaacgcaaaacaaaactgatcagaaaggaagaaaagacgatcaggaattgtgatttgtgggcgaggaggagaagttaattgatcagacgatggtcaaaggacgcgaaaagatcaaaggtagggggcgaaaagaggtataaaaatggaattgatgtaattaaaatcaaagtgatcagaggaacacaatgtgcagcagcagcagattgtttggagatgggtaaaatcagtcaggcgattgtatgtgtaattattatttggtcatggagatcagaaaaacgagggcatcaccgcgagggaggaaatagcaatgtgatcaagtgcgatagtatggaggaaatagacaccggaagacggtgatttgagtttgtaatttgatcggaaggcctcagctctgagagtgtgcctgatcagttcatttatgataaaagtgatgaatg

SEQ ID NO: 25886 - DNA, 1242 bp, Heterodera glycines
  unsure (1)..(1242): unsure at all n locations
aaaaattccacagtttcgcgcacggtgccgaagaatgccatgtgctggttgttgttgtgctggtgacgttgctggtcgggctgtcgacttttcgacttttccacaacttgtttcggttgttgttgttgttgttgttgttgttgttggtggttgcgcgaggagttcagattggaagtagtcacaacaatttgtcctaatgccgttgctgttgtgtcgtcgtcgtgccgttcttcgtcattcgccgtccgggactgctgtggcagtgcacagttgggcagcgatgtgctggccttaaaaaactcgaagattgctttcagttaatgtgaccaacaatgatcagaatcaccgagaatgatcaggatttattgattttgatatcagaaagagtgagcgggcttttttcccggatggtttcgtatttttttaaattttttcagagcgagcctctgttggttttagttgaaatgtccacattattcgggattaattgcaattctcatatcaatttcatgatcattatttgatcagccttttgtttacccgcaatcgccgatcacttttcgtctcccttttccgcgactgcctaatcggttgttgataatgtttttgttgatgtgcagcacataaccacgggttggtggtgctgataaatggtcctacaataagggtttattagggatttaaataatttcgaagtgctggcattatgtcacaagggataaaaaaaatgttccgttgttcacacacaaaaagaaaacaaacaaaaattctaccagtttaaagtataaaagaaaattcttatagttttattgtaacaaattatccatgaaattttggctcaattacactttatgaagccaatagaacctggaattttgaaaaaaaacggaatcggatttggaattggaattaggccaggaaaggattagcgggattgaaatcccggttttgtagaattttaagctcgaccccatggtttaaatcccattttccccccggattccccgatgggcggcggcacttgcagccggaatcgggatcccgggaaaaccaggcgggatctttgaagaagttttgaataaataaattctcagcgctcagaaatttctaanttttttttttattaaacagttgtttttggactcataaattgcaaaaaattcaaaagcaaaatttaaaaatgccgantccgattgatctcaactgctggcatncatgggtcgtaacagtttttatctaatc

SEQ ID NO: 25887 - DNA, 838 bp, Heterodera glycines
aggaagcgccaaaatcggcattgaatttttgggaagcgaatttagcggaattaagttttctattaatattactgattaaaatttgataatttaataaaaatttaagaaaaatgtttattttgagtcaattcccaactcataaaaagcaaaattggttaattacaatagaaagcatttttttttgctaattattacaactttaatcatccattttataataacattgctactgaattttaactttttctggataagaaacctaactttttctcagatcattttcagatttataattctcccttcagaaaagggcagaaggaattggaacagaaaacttcgagtggatataatggtggcattgtgcccgtccgctatatcggcctcggccaatgatcgctactacacaaaatacctggcgacgtttcttctcgttttcagccaggcatccattggttctttttcagtcttctcgcgccttatttgagggtcctcttctgacagtgcttaaatgttgaatttcgtcagctgactccttacgcaagcgcctggcggatacctttgtcgtatcgaaaaatgtcacagtgcaattgcgattggggatgatcattcatgacagaaataagctcatcaacgagcatgaggaaaaaagacaataccattgtcgtcactaaaacaagaccccccaacctcgttcagcgcgaagaccagcagaaagccctcacccgtgcgcatgtactgatcccgcatcgctgaatatggggggtgcaaaaggatggaaataaatttaaaaagccaagaagggaaaaagaatttttttttttggtcgcgtctttacgca

SEQ ID NO: 25888 - DNA, 826 bp, Heterodera glycines
gaagcgccatttgcttaaatcaagtgccattctgtgagatgaagtgccattcaatgaaataaagtgccattcgatgaaatgaagtgccatttgctgcaatgaagtaccattcgatgaagatgaagtgccattcgctgaaatattgtgccattcactgaagatgaagtgccattcgctgaaatgttgtgccatttgatgaaataaagtgccattcgctgaaatgttgtcccattggatgaaatgaagtgccattcactgaagatgaggtgccatgatctaaaatgttgtgccattcgctgaaatgttgtgccattccatggaatgaagtgctattcactgaactggagtgccattcgatgaatgaagtgccattcgcttaaatgttgtgccattcgatgaagatgaagtgccattcgctgtaatgttgtgccatttgatgaaataaagtgccattcgctgaaatgttgtgccattagatgaaatgaagtgccattcactgaagatgaggtgccatgatctgaaatgttgtgccattcgctgaaatgaagtgccattcgattaatgaagtgccattcgcttaaatgttgtgccatttgatgaaataaagtgccattcgctgaaatgttgtgccattagatgaaatgaagtgccattcactgaagatgaggtgccatgatctgaaatgttgtgccattcgctgaaatattgtgccattggatgaaataaagtgccattaactgaagatgaagtgccattcgctgaaatgctgtgccattccatggaatgaagtgctattcgctgaactggagtgccattcgatgaatga

SEQ ID NO: 25889 - DNA, 829 bp, Heterodera glycines
gtgccattcgctgaaatgttgtgccattccatggaatgaagtgctattcgctgaactggagtgccattcgatgaatgaagtgttaaatgttgtgccattcgaggaagatgaagtgccattcgctgtaatgttgtgccatttgatgaaataaagtgccattcgctgaaatgttgtgccattggataaaatgaagtgccattcactgaagataaggtgacatgatctgaaatgttgtgccattcgctgaaatgaagtgccattcactgaactggagtgccattctatggaatgaagtgtcattcgctgaagatcaagtgccattcgctgaaatattgtgccattggatgaaataaagtgccattaactgaagatgaagtgccattcgctgaaatattgtgccattccatggaatgaagtgctattcgctgaactggagtgccattcgatgaatgaagtgccattcgatgaagatgaagtgcaattcgatgaagatgaagtaccattcgctgaaataaagtgccattcgctgaaatgttgtgccattggatgaaatgaagtgccattcactgaagatgaggtgccatgatctgaaatgttgtgccattcgctgaagataaggtgccatgatctgaaatgttgtgccattcgctgaaatgaagtgccattcactgaactggagtgccattctatggaatgaagtgtcattcgctgaagatcaagtgccattcgctgaaatattgtgccattggatgaaataaagtgccattaactgaagatgaagtgccattcgatgaaatggtgtgccattccatggaatgaagtgctattc

SEQ ID NO: 25890 - DNA, 1942 bp, Heterodera glycines
  unsure (1)..(1942): unsure at all n locations
ggttgagtcccgtgattnggaatgttgtgggttgagtcccagtgattgaatgtttggtggattgagtcccagtgattgaaatgctggagggttgagtcacagtgattgaatgctggtgggttgagtcccagtgattgaaatgctggtggattgagttccagtgattgtaatgttggtggattgtgtcccgttgattggaatgttggtgggttgagtcccagtgattggaatgttggtggattgtgtcccgttgattggaatgttggagggttgagtccctggagggttaagtgttggcgattgaaatgttggtgggttgagtcccagagattggaatgctggtgggttgagtttcagtgattggaatgtcattgaaagttggtgggttgagtcccagtgattggaaagcctaagaattgagttccagtgattggaatgtcacagaattgagtcccggtgattgcgatgccgaagtaccaggtgaggttaggtcccagtgattggaatgccggagatttgagtcccagtgactggaatgctggtggattgagttccagtgattgaaatgctggagggttgagtcccagtgattcaaatgcaagagaattgagccccggtgattgaagtgctggtgggttgagtcccagtgattgaaatgccggagatttgaatcccagtgattgaaatgcaggagaattgagtcccagtgattcaaatgcaagagaattgagccccggtgattgaagtgctggtgggttgagtcccagtgattgaaatgccggagatttgaatcccagtgattgaaatgctggtgggttgagtcccagtgattgaaatgcaggagatttgagtactagtgattgaaatctggtgggttgtgtcccgacgattggagaaaaagcaaaaaaaggatgcgaggccacgaagcggccgagccagtcgattttatcaaacataatcttacaatacaatcgtactacctagcgggggatgcgccgaaggcgctgaccccgctaatattcagcaaaagaacggagtaaaattgaaggaaaaatagcaaaaaaattgggcacaaatcgcaattatatttatgaatggatcaaagaattgggagtaaatcaaaaaataaatcattcaaaattaaaaactgacgaacaaaaatttgaaattattcgaaaattcattgaaatgtcaaatgaatttaaacaaaaaggaataaaatattccagaaaagaatggcaacaaaattatgaagaaatttgtaagaaaatcggagttagccttaaaacaattagtaaatggaagaagcaatttggaattagccgaaaatttataacggaaaaagaaaaaatggagaaaatgaaaatgtattggcaaataaaaggagaaaagccgaaaatgagtgaaaaggaaattggaaaaatattgaaaattcatcaaaatagcattttcaattggaagaaacaatttgggaaagaatatgtaatgcgaaattaaatggatgagaaactaagaaaattggaacaattttgccaaaaatgaccgaagattaaataaataaattaaattatttttatggaactataagtatttcaaaaatttcaccaattaatgtttaataaacattacagttttgtcatataattattatattaggggttcctttttttgggcaaatgcctaaattttctgcgcaattaatacgcactgagaagcacgaaaaacgctttttcagcttggtttggaggtgtctacgatgacttttctaatgcctatttttgcttanaaatttataaatttattttttttttttcttacaagaatttttgttttgaaaatttgtccttattctanataatttanaacatttaataatttcatttacaaatgaaatattatcaaaaaaaataaggaaagttttatgtgttttgctacctaaaaa

SEQ ID NO: 25891 - DNA, 1337 bp, Heterodera glycines
tcaattaacgggtggataccattttttgggaaatggagaatattcggtttcggggcagggtctttttgtcattgaatatttaaggcgaatgaatattttaggcgaatgaatatttaaggcgaatgaatatttaaggcgaatgaatatttaaggcgaatgaatatttaaggcgaatgaatatttaaggcgaatgaatatttaaggcgaatgaatatttaaggcgaatgaatatttaaggcgaatgaatatttaaggcgaatgacaaacaacattgtaagccgttgccaaaactgaaagcgccctctcaaacacaagattataatcgttgtaaatttgcattctacagtacactctgtatacaacaacaattaattaggaaaagtaattttgtcaatgagataaattttggcaatgttaaaatgcccgctcatttgcaccaattcttgttttcttcattaataaaagttaatttttaataattaattataaaacattgctgttttattttgttccaacgcaatcattttgttacattagcaattcataagaccatccgagggtactcatggagtttgtatccccctttttttgggtcgaattttttcaaatttttttttcttttttattgtcgcaattgcttttagattaatggaaacacttaaaaattttaaacttgatgctttattcaaagttttggctctaccagacaaagaattcgaagaatggctcagagaacttaagcttctacacaccactcgtttttgtgactgtggcaacgaaatgagctacaaatggattaaggaccggaatcaaccgctttggatatgcaattcaaagaagaaccacgacggaaaacgtccaactattggcttttacactggcactttttttgaaggagcccatttgtcgcctaaattttcaagtttttttaaaaggccaaatttacatgaatcaattttatattaaggtttttcaattttcttactactgggcccacaaatttggaaatgatcaaattatgtttcaggatcctgtcactggtcagcatacaaactcaattgaatcgacgtggcagaagttcaagcagcaacacaaagcgagatttggcagtcacagatcacttttttccacatacatttctgattttttgtggcgtaagcaatttggaggaccggacattttttataatttgtggacccaaatcgcggaattgtacccaataagcacgtaaatctccttttatttgttatttaaagcaattgcgacaataaaaaagaaaaaaaaaattgaaaaatttgaaaaaaaaaaagggggatacaaactgaattagtaccaaa

SEQ ID NO: 25892 - DNA, 2373 bp, Heterodera glycines
  unsure (1)..(2373): unsure at all n locations
gagcatcaaatgcccacgtccattggaaaacnaaaaacggcacactgtgcccactgatgcatggcacagacacagcaaacaaatgtcaatgcctttctcagtgcgtgcgtcaacgcacgcgtcaaaaaagggaaaaagcaataaaagaaaaaaggggagtaaaagtgtcggcattgacaaagaagaacaaaagcagttatttcctcaaaacacggaaaaaataaattgattaaacatttcaagtgcaaaaaaaaagaattgatattttgcattatttttattcctaatttacatgcgaaaaaacccaaaaaattacaatatgcgaagagattacaaatgaaaagacgcgggcgagtcgaatttgggaattgagtaagcgacggcctaagcaaattatgaaaatgacattaaggcttcagaaggcacaccggagaaaagacaaagaatggtaagaaatgaatgactaaaagtcgaacaaagctaagaaaatgagcagtcatcgaaaatcgctgctaataattcaaacgttgggcaacaatttgggctcaaatcgcggcatgaacaggccgaacttgtgctcaatgccagaaaaggttgctgcagccaatttgtatccaccgatgtggtgggggttttccgatgcttggtccaatattgtggtgtgggtcgaaacctgtcaaacgaaatcaaattgaatatttatttcgggctgggaattttgtaactaaaaaagtgataaataaaaaacagacttccgaaccgcttggccgagtaccaccaaaatcgacgtaaaaaatgcgttgtaacagctcataagtgaggagagtcaccgcaaattgaggactggaccgacaaacacgagcttaaaaaacaattggtacaggagacggctattaattaacattaaatgacacctgccgcgcccttccaaaatgccgaaggtccctcttccctaagaatctgttaaacagaaaattgatcaagtctaaaggagcaatgttagtccgttagcacctttcttgagcagtcgataagcccgttgtacgtcgtttggcccgtccgagcggccacttgcagccgcgttttgatcacatcagcttaaatgaaaagtgcaagccgtatcaaaacccaacaccagtaaatctaaccgggggtgaccaaagcagcggcgggcgccccggcaataaaagcggagacaaacaaagaccaagggcgattgtaaccctaaagaactgagtttgatatacaatcattggactgaccatacgacctgttcatcggctgttttcattttcatatgcgcataaacggggaaataaatggcggagaaaggaatgtcgcggagaaagcacgcctgggcacctctgtagaggccgccgaagcccaactcgcgcagaacggtgaaaacattcacttttgggccgttgatgatctctcccgcagtttgcagcctaattttcacaatttccaacggatttgtgaagacaacctcaaaatgagcaattttaaatgttaaaattttaatactgacagtgaatgagtttttatggcaaaaaaaaagaaacttgggatccggcggtgaaaaaattcgaattaagaatttttttgagtgaaatttttgaaaatttaaagatttcgatcttaataggtaaatttttccaaaaattcctcttaaattattaaaaaaatgctttttattaaatttcgacaataaaaaatatcattttttgaacttcttggaaattttttaaacttaaagatagaatttaaaataaaatttcaaaaaatggaagtaaataaatttattttattttgaaaaaacaaaattataattttcaaagaaatgaaaattacaaaaatgagcaagatgtttctaagttatttaaaaattctgaacagcctccaattaaaattatattttagaaatattttatacaaagattttattttccagcgatatgactgggaccgtccctggttttccccacctgactggccccagcacagccaccagccaaaatttcggacgaaagcgaaatgcgaccgtcagaagttaatttgtcgcgcataaaatcattcattgtcagtttaatggccttctccggcgccacgccaataatttggggcaaaagtccgcggtaaagaccgagaacacctgaacagattaataggtaaaaaaaggaaggaaattctgtagaaccttcaaattttatcacttttttgaagcagtcataactgaagaaaagagcaattgttggtgtcaaataacaacaaccgatcactcacctgtttttgtacatcacttcgccaaggtaagagccggtccgctgattttgcatccgcgtcttcaccaggtcgatgngatacacctga

SEQ ID NO: 25893 - DNA, 1168 bp, Heterodera glycines
aggccatacttaatcagggtgccccggtggggggggggagcgcgtcggctctgtccatgatgaccaccctcccctccccccccccctcatcaatccctccttttccaaccagccggccgctgcccctcccctcaatccgtccacccgtgtacttttccaccgctccattttttggcggacggatagggaaggaaaaggggtgacccagtttggcggaggagagcgcgttcagccgggaggggaaataaaggaaggaaaattccagcggaagggagccaacggacggactgtcttctggactgactcggacacggcgcagcccccgcccattgaaagcccatggatttagttggtcagatacacttttagaagaacagatctacaacatttgggcagtcataagcattgtttagcttttagtagcaccgatgtttctttatcctccccctctcccctctctcctcactctctctccctctctatctctctctgtctctctctactgcgtctctatctctctctatctttgccccctctctccaccctcccgtgccattgccatcactgtaaatgcaaatccgtcgcacatttatatttttggtttgtaccgtcgatgacctttccatttgcctgaaggcatttcgttgatactggctgggacagaggcattggcattcgtcgcaccgttcactgttcaatcgttccccactaacagtttattcctgcccgtcctcttcgtcctcgtccatccttatctgccgactcttttccttcagctttcttcataatcctccaatggcacatttaactgtccatttttgctcataacaatctgtttctgttaataatacaattttacctatatgaatttaattttaaagttaatctgctgctgttcccattgtccactttttctccttctctgtcctgctttatccttttggcttgtctccaatggtcgcagttcggtcccgtcccttcgaaatcccccgaggggcgttgacccaaatctctccccccgcccttcgcttcctttgcttctccgggcgcgatttaattgtgctagaatgaatgtggaaaaagaacagagtgctgccgcagcagccaactgcgacgtttgagctttctgagccactcactcattgcccgcccgtcacagccgaccctt

SEQ ID NO: 25894 - DNA, 1141 bp, Heterodera glycines
  unsure (1)..(1141): unsure at all n locations
agtccctattaaaaatgggacatttcaattcgatttttcacttgaaatggcaagttcgcccctaatttgcatcttttcgttttgggccgtccgttttaaatcggtagaacctaacaaccatgacattgtgtgatttcggatttttggagcacttggggatatagtaaaattccctcccagccatgcttagagcagtataatttaaaaaaaattattttgggtatggatataattttcaatttctgcgttcggaaaaaggcatttagttgacttggtgttggctcagatgggaaatcgcatttttttaaacaaattccatggttaattcgggcactcgtgaacggttgacagggcgaagaattggggaagatgaccaaatttttgattgaacggtgtctaatcgttgtcaaaattgcggacgaatggaacgaattgggccgagaaaaagcatagaaaatgactgatggagaaagaagaagcattgggtgttggaaagtgctcgaatttggcactcctttcgttaatggatttatttggatcaattttacgcataatggactaaatcctcacaactgttggtcggaaagctttcaccaaatcactcaaatttatcctaatgattagggttgcaaccccgacgtcggggttggaaaattcggggttcggggttgtcggggttggaagtgtcggggttcggggtcggggttgccaaatcgttcggggttcggggtcggggtcggggtttttcaatttttgccttatgccaaatagtcaaaaaactttataaatttttgcttaaaaatatttaatttcgtaataataattttatgtgctttttattattttttttatcataaatattttgtatagaattaattaaaaacacatacctaaagcatttaaaatgggcaattttcagcgaaaatctgaataaatctttttttggtcttttttttgcggcgctccttatctaaagacgtttaggagaaaatgggttcggcgggtgccgataagggcccgccccggaaaatttttgaaaatttggaaggggcccggttaaaaaatttttgcccaaaaaatgaaaaaatttttctgaatttttgggcccatttttttttaanaaaaaaaaaaggtttttttt

SEQ ID NO: 25895 - DNA, 1205 bp, Heterodera glycines
tgatttacattaatttacatggccggagaccccttcgcaaaattggaaaattggctgctgaccccttgttttgcaataatctgaattttgaggtctacatctgaattttagtgttctttatcctgaatttgaaaaaaaaacttggtcaccctcaatatacatatacttctgaacaattctaatgctaaaaaacaggcactcgcgcgaaaactgaataaaaattttgtatttgaaaaattttgtccaaaaatttttacgttggaaaattaccggtttttaccggtaccggtaccggtaccggtggaaaaagttggtaccggtaccggtaccggtggaaaaagttggtaccggtaccggtaccggtttttgcattaccggtcagtaccggtaccggtttttttacaattaccgattaccgctcaactctaattttttgtcataaatttttagattagttttaataacgtaattaatttatgaaattcgtctcaaatagcacattcccctccctaatgtaatcaaaaacaaagtgcagctgataagaagcaaagacagcattagcaggaaacgcaaaccttttattttgggaatgcgtttcttcccaaaaaagcccatttaaatgttttattaattaccaaaattttaataaaataataattttaatttgtgaccaaaatacaaacatcacttttgaattgtgttaaatttctcgtcttcgtcaattttacgtcatgttttgagtttttcttaatggacaaagtctggtggttaatcaggcgtcttttcattaattattttttgaatggaaaattattggctaatgaagtgtcaaattaaaaacaacagcaaaaaattggacagcaaaaataagataacttggcaaattacgacttgacaagaatctatgtaaataacgattgaaacaatagcaaaattcttaaattagcaatttgaattttgtttatcccatttaaaattggtttttaatgtccctaaatcataaaaacggccaacttaaaacaaattggactttagatcaacacatggtcaaatttggcgcaaaagtgcgacaattttaatgtgttaatggactgtttttttcggtgttaacacccgtgaaaatacattcatttggtggcggcggcgaataaaaaagatggccccaaaagccattcattgggctgaggacagaccgaacggaatga

SEQ ID NO: 25896 - DNA, 1732 bp, Heterodera glycines
ggaagtggatagtggcgtaaaaaacacgtgtatactcctctataataaaataatatttttacgtctggaaaattttatcaaaaaaggtaaatacgtataatattttcatttattaggataaggcatcaaagtgcaaaaaaacatcgtgtaatataaccataaaataatatttttcgtgcctcgggaaattatgtaaaaaataggtaataatatctataatattttgcattgattatgttaaggaatcaaaaacaaataattcaaaatatttcgtcaattcattttataaaaattgaaaactgctaaaaaaataagcatatattggacattattttgttttgaagtttgcctgatgtaggggaagggacgggtgccgtgagtgattagtgaggttagggtgttggtagtgcttaattactttgtaagaagctgtaaaaagtaattaatgaggggagggggggggggggcgaaattgatacgaattgtcatcggtatcaaaaaaatatctatttaattatgggaagatattgatcggacttattggtccgaagggtgggcaagggttgtttagttagttattgcttaactttcagatgttaaaagtctgtgaggctaaccatcaaagtaactaactcaggtcaacacaatgatcaccaaagagggcataactcattagtgtattcgcttcgataaactaagtttgtgccgttggaaatggcccacatgaagaatgggtgccataagtgaaaacaaaaagctgtactcgagaattggttgagcgggcactgctggctcgttgtgatacacgatgggggtgatggaacaaagtcataatgggctttgtcaaaaaaccatcaaatggaaaatttttaacggaaaattattcataatttcgccaaaaataaaccgaatttaaaaatgttggcaaaggtgtagaattgtgctcccgacggaaaaaaattgtaaaatttcaaaaagcattttttctagggtaaaaaaatgtgctgatcacaaatctgaaccctgatttgaaaaatcattgctattatctattacttttgatcgataaaaccccgaaatatgtaaataaaagtcccgatttttgttcgcaaaaacaaaaagaaagtgtttttcctactattcagagcatggagaatccaagaaaaaatatgtatttacataaaattggcagccctaattatgatacactaatttcagttccctcctcttcgggtaaaactcaatttttcgaaaaatttagtgttgtgaaatagtcaaaatttcgaaattttctgccggcggtgcctctcggcaccgccgagttccccgaaacattttttcataaaaaattggatcaaaagctaaaaaatttgtcatttttgatgaaaacctgttcactcattgcataagattttaaaccgcctaccggcaccgccggacccttaccccaaaaggtttttttttgggaaaagcgcgccgcaaaaaaaaacatttttggattttttgattgtaataaaattttcaaaatgatgattttggaccccaagaagctaattttttttgtgcttctatgcttggaagatcttaattgtactatttccaagattgtacttggaaatcagcattttggcacatgatcttaaaaaataacaattttatgaaaaaaagtttaaaatttttggcattctataagaaataagcattaattttgctacacatttttgtaattggt

SEQ ID NO: 25897 - DNA, 1616 bp, Heterodera glycines
tgattttcacacatgcattccttttttggcttccccccccgcgtattttctgaatttccattaaaatttcattcactctaattgttcatttttcatttacttagtaacactaattttggcattaaaaacggttcaacatttaaacctgttagcatcacataagacaaacaacaacaaaaaatcacacaatggctttatgccttcaaattcacaattcatttttggcattaagcccttggcacatagtcattttaagcacacagcgttacctgccattttcgcttgacactaggagcacacagcttcgactagtccatggcttacgctcatttcacccattaattggtctcttttctgggagcacacagcttcgaccagtctcgtggcacacagccacaacggcactcagcccagctaggagcacacagctgcgactagcttttatcttttcatgctcaaaacctttgcacttatcctttcgaaaacagccaaaatcacaaaaattaacatattatcacattaaaacacaccgcattgatcaatcaatgatcacaaaatatgccataaggtttttgtattaccgtactcagccaaattagccacagaaaatttgccaaatttcttttgcaagacaatgcatttttgttggctcatttacgttttactgaaaaatagcaatttcccattgctttagtccttttttttgttgccaaaacgtactttaatttactcttcctatctccaacaaggaattaaaatttaaccagattaaaactgcttttgggtctgcgtccctttttaagtctgcattgttcaaattagcctttaatggcctcagacactttttgtctggaatgctctggaattttaattctctctctctctgtttaacaaaaaaattttacacaacgggtcgtggcaccaaaaagggtgttgtgtccccgggtttaaggcttcaagccatttcaaattaccacttttaggagagaggaatttattataaggaaaagcattgacaaataattatgaattgaaaaccgggaatatgtttgggtcaacaacaacctcagagcattttgggtgggtcagtgcaattggttatttgggaaaggattgccaaaggcaagaaatggcacagactgacccaccgcagacatctcgcagcccccgagggggaaattgggaggacttatatactgacacaaaggggatggactttggataggatgaggggtatggcggcaaaaacataaagggaataagagaaatggatggcatatgcaacagaggtgaaaaatttgaatgctgcggatacagcacattggaaccatcgcaattttccaaaataggaaaagacgtcaaagagacggacaaaaagggtgggttagtcgaattcccctctccgaattttttcctggctataggcctgattaacggtcctttttaaggtgccgcccgatgacattgcctcggtgttttacccgtcccttggcccgtacagcagttgggatgccaaagtgattgagcggcacattaagtggatgtccagcgcgggcattgacgtggtcgtctgttcatggtaccccaggaaatggcgaacccgaatgtttttttat

SEQ ID NO: 25898 - DNA, 1374 bp, Heterodera glycines
gaaataaaatttggattaactaactttcttcacccttttcaaaatggggataccaaattaagttattaattatctaaattagaaaaaactgaaaacttcaattctttatcaaatcattttttgtgccattaagcagttttgtgttgcttttgttcataaatttgtgattaattttataaaaaagtcatttttgtatgggggttattagtgggcaaaagtgctgaccggcggacggacggacggacggagggatttattaccgtccccccccccaggcatcttgccctcctcccttcccatctgttccaaattaatttcatccatcaccatcatcccatcctctcctttttacatctcctccgttccgttcaacattttttaatttaattttcgcattgtctttctcttttctctcaccctctcattagtattttcactctctttctttctctcccttttctcccctctctctcgctcggtctctctctctcattagtgttttcactcactttctttctttccctcctctcctttcctccctctctatctttcttttctctttctctctctctctctcattagagctttcacttctttctttctcgccctcctcctcttttttctctctctctctctctcctctctatctgattaattaattctccattctgttttcctcctctcttcctggcactgtcttcctttatctttctctatccctctctatcgccccttttcactcccctctatttctccgttctcttctccccttctatgtacctagatttttttgcattgtgtgttatttggggcttctgttttgtgcgcaatgtgatcacatttcacatttccggcgcgctcaaagttcgatcattcattgcgcgaaatcggctaaatccccccgttccataatgatcaatcaccacaataaatgatttaattgcccggcgggaaaccaattaagccccgcggagagaaaaatagtccaaattttctaaaaaaaaattacaacgaaatctttggaatatttcggcattcattctgttacataagaaacttttagttgtctgatcacttttgctaattactttgctcagaaaaagtctttgttaattgaatttgccgctccctttattctcccttttttctaattaagaaactgattaaacgtttttgttaaagaaggactgactaattaatcaatccctataatgctaattaagtaaataatgtgactgactaatgacttgtttgctaattacaaaatatactaattgaggggatcttgcaaaaaactttttactaattagtaaatctgtctgctcatttctttcaattaagaaatttgcccaatttgttttttgctaattaaaa

SEQ ID NO: 25899 - DNA, 1190 bp, Heterodera glycines
tgatgatcagaaaaagagataggcgtttttcccaaaattttcgacatcaacctcgcccagaaagaaattcggaaaaaattaaggtcggcgctatcattcggaaaatgtggttggaattcttcagactgatgatcagaaaaagagataggcgtttttccaaaattttcgacatcaaactcgcccagaaaaaaattcggaaaaaattagggtcggcgctatcattccgaaaatgtggttggaattcttcagactgatgatcagaaaaagagataggcgtttttccaaaattttcgacatcaaactcgcccagaaaaaaattcggaaaaaattagggtcggcgctatcattccgaaaatgtggttggaattcttcagactgatgatcagaaaaagagataggcgtttttccaaaattttcgacatcaaactcacccagaaagaaattcggaaaaaattagggtcggcgctatcattccgaaaatgtggttggaattcttcagactgatgatcagaaaaagagataggcgtttttccaaaattttcgacatcaaactcgcccagaaagaaattcggaaaaaattagggtcggcgctatcattccgaaaatgtggttggaattcttcagactgatgatcagaaaaagagataggcgtttttccaaaattttcgacatcaaactcgcccagaaagaaattcggaaaaaattaaggtcggcgctatcattccgaaaatgtggttggaattcttcagactgatgatcagaaaaagagataggcgtttttccaaaattttcgacatcaaactcgcccagaaagaaattcggaaaaaattagggtcggcgctatcattcggaaaatgtggttggaattcttcagactgatgatcagaaaaagagataggcgtttttccaaaattttcgacatcaaactcacccaggaaagaattcggaaaaaattaggggcggcgctatcattccgaaaatgtggttggaattcttcagactgatgatcagaaaaaggagataggcgtttttccaaaattttcagaatcaaactcccccaaaaaaaaattcggaaaaaattaggggcggcgctatcattcccaaaatggggttgaaattcttccaactgatgatcaaaaaaaaagtaagggggtttttccaaatttttccactccaaactcccccaaaaa

SEQ ID NO: 25900 - DNA, 387 bp, Heterodera glycines
taaagctgcattgttagtcagctgagctgttcccagctgattggtcctggcgcgggctaaatgtactctaaaaagataagaagtaatcttggtacttatacagtttgacccacataaaaaaaattttttgtttctaatgataaaaacgtgtttctaggggttttcggggctgctgatcacgaatatgaactctattggacgaatttccgaacccctaacccgaaattcgaactttttttcgaaaaaaatttttttttttaatccgtttaaaatgtgtcaaaatgcgtgctccatgattctccggtgagctgctcgttcaacacatactcaaaaaataaataaaatttaacaaatttctaaaattaaacaaaatgccaaaatatgaag

SEQ ID NO: 25901 - DNA, 1820 bp, Heterodera glycines
tccgaatgttgctgaaaggaaaaaatggttgccgaactccctgccaattaattcaaaatcaaaaagcctttccaataaaaatataaatataatttttaggttccctgacactgaaccgtcaccaggcgtctgtcctattggccaatgcgttcttttgcacttttccggctgaatttgggcacaaaggccgacgctttccgcgctttgatttcaatgcgttggtttaaatttaaaaataagcatttgttaaatcctttccatcttcagacttttccatttgaacactcatcgggcggttgaaaaactcaaatttttgcttcattactttgctcaaatcagacattgtccgcccatcggcactttgtcctttattcgccaagccgtggaacggttgccggacggatgggaaagtgagcggacgaaggcggggggggggagaagcaggacaaaacatcgtcgcatttttttttaattttagaaaattaagaaaaaccaaattataccaagccgaatttgaaaaaaaattctaacctaacgaaaattttataaagaaattcaaggaaacaagcaatttttacaaaactttcccttgagaaagacgacccattgacatttttgtgcccggcaataatttgttgttttgtctcaaaggtgccccgctggacggccatttgaccgcactttgcgatgggcgcattgaggacgaaggcgccgcgcacacgcaaatggattttgctaacgaattcattggtggcggagtgttgggacacggcgctgtccaagttggtcggacggggagggaataaaaatatatgcaaataggacacacaatctcaaaaagttcgggcgggtgtgggaagttcgtttttaacaaattttctcccaagactagtcaatttttaagatttttagactgtttttagaatttagttgggtaccggacaagaaaatttacaattctgtcaagtaaaattcctcattgcttttctgactggtccaaattatttgtagaaattgtttcccttttcaggaggagatacgttttctgatctgtcccgaattggttgttgcttgtctgatttgcgaaagggtgggtaagaaacgctgctaaaaggggtgattgagaaaaccaaaaagattatggtgttttatctggaacagtccgtccccacctcagtatgatttaccgcaaaaaattttaatttttcagatctaaaaaattgtaccttttttttaggatttttttttttttggaaatttgtaattttgttttttggcgggggagagaaaagtagtgcacccgtgttatcctcttacaaacaattagatggacgacaacgaggccattcttttgctgggcgccgaacgcttctccgactatcggggctattgtgacacgctgcggtgggtgtaccggaaatacggcgacgacaacacaaaacggtgggggaattcaaaaaagaaatttcaatactaattcgggtccattttcattagggactcaatgggccgtgcgattgacaccgaactgttggccatcgacgcgctttgttttggcagtacaatggactttttgagtgaccaattcgacgcggatgccatcaaacgcgagctgctcaaggtgtatgggaagaggggacagcagcataccaaggattaacgttgattgggtggactctgtttctgtattttttcgagaatggatcatccccccccaccgaaaatttcctaattttttttagagtttttaaaattttcaggcttacgtcggcttttccctacaaagactggagtcaccgcatggcatttccaccggcaat

SEQ ID NO: 25902 - DNA, 1574 bp, Heterodera glycines
ttcctccacctgtcactttggtgacagacggatgtttgatgaccttctgcggcactgcacggcgcggggaggggaaatgaaaaaacatccgcgaggatttggggaaattaaaatccacaaagcggcagacttcaaagtaacaacccctcacataggtttcggtttgcacgcacccctcctataggcttgggattgtgcgggaaaatgtccggggcggcaacttcaaaggggtccaataggcacgggtttgtgcgagaaatacccgcaataacccgcaactcaggatttgaaaaataataccgcctaaaaggtttgggatttaatttgcaaagaaaaaaattaatttcattatctgccactttggtgacaggtggatgattgatgacctttccgcggcgctgcgcggcgcgaaaaaaaacacccgcgccaatttggggaattggatttggttgggcggcaacttcatagggagtccaataggtttcggttcgtccccatcctggttttttttgatggggcggcaacttcaaaggaaaacacaccttcaataggcgcgggattgtgaacgggcggtaacttcaaaagaaaacacaccttcaataggcgcgggtttgtgcggtaaatgtccctggcggcaacatcaaaggggtgcaccccttccataggcacgggattttggaggggtcattccggtacccgcgccgttttcgagccttatactacttataagtaaaaataagaaaattattttatttttaataaatagggaccggatttgtagggattttttcgcgcacttatttcggcctaaaaaccacgtaaatagtatttccatattttacattcatattacggcacattcacaaaaaaaacgaaaaacctacccataaagatggaaaattttggaaaataaccctaaccgaaaatcttggcaaaattaccaaaaattgcgcaaaaaatttttcatcagcaaaattcgcgtaaaaattaattttaatataaatttctaccaaactaattatgattttttcttttcaaatttacatatattgtttccttatttttgcataatttttcgttattttggttttgtacttaaatttatttttgtgataaattaaatatttccaatcaatttcctttgtcatcgattaaagggaccatctccgaaaagaggatggcagcgcgagcccacatacccgagcagatttttattttaaatatttttaatcatatattatatattccattcccggaacttcttttaaaaattaaataattttatttcccgctcaaaaaattacaaaatcagatcattttcatataactggacagttcccaaatggtttattgtttagcgggagatgcaaaaatgccagtcttttaattgttaattcttcagatgaaaaaaaggatatgagagaaaacaattttttattatagagaataaaaaatatttatccaatataattatttctaatatttcgtaattaaaaattgtttgtgaaaaaaattattaatacagaatcattatttcgcgcattttcatagtcatttatttcccgcactaaaaa

SEQ ID NO: 25903 - DNA, 995 bp, Heterodera glycines
ttgtaaagctcgagctgttctttccaatggtcttatccctgtctcgatccctgccgaactcaaaaagttatgaagtgaaatgtgaaatattgttttcgccacaattgggagaagcatggggctgtggctggggacccaaaatggggccccattggggaattaaatatgatttctgaaaaagtccctgaaatgtcgattttttctttccatagcttcttgtagagctcgagctgctctttacaatggtcttatcccggtctcgatccgtgacgaactcaaaaagttatgaagtgaaatgtgaaatattgttttcgccacaattgggagaagcatggggctgtggctggggacccaaaatggggccccattggggaattaaatatgatttctgaaaaagtccctgaaatgtcgattttttctttccatagcttcttgtagagctcgagctgctctttccaatggtcttatcccggtctcgatccctgccgaactcaaaaagttatgaagtgaaatgtgaaatattgttttcgccacaattgggagaagcatggggctgtggctggggacccaaaatggggccccattggggaattaaatatgatttctgaaaaagtccctgaaatgtcgattttttctttccatagcttcttgtagagctcgagctgctctttccaatggtcttatcccggtctcgatccgtgcagaactcaaaaagttatgaagtgaaatgtgaaatatgttttcaccacacgggattttttctgaaacccatcggaaccaaaaatctagggtttggtataagcgttttagaaattgcggagaaaaaagcttcgatattgagaaaccaagtcaagtccagaaaagaatattttaaaacgaattcgttttggtttggcattatgataccgaataacattcggaaattatggaaacaaaattggagaaattcgaataaggaagtgacttcaaatttttcccagttttgattgggtttt

SEQ ID NO: 25904 - DNA, 483 bp, Heterodera glycines
gcgttgtaagggaaaagtgtcaaatcaaatgttcacccttctagttccctgtttttttgtcaacaattttcaattgaaacataacattttacaaattacagttgcttatcaatagggtcgcgatttttaggtttaataaattttttgctcaattgatttgaagaaaggagctcaaaaaaccatttctgcattaaaaattttcgattctgatgtcattatccggtcggggtcgttttcgcgtggccattttcgcgtgagggccattttcgcgtggccgttttcgcgtggttgcacataagcgaattttttacctttttatagtttggaaaattttttcactcccgttttacttctggtacttaattcaatatatatttagtgaattttataaactaaattaagactgacaaattattatacagtcaaataatttttattacagaattttttctatataaaattgagttatttgtgtggaaaatg

SEQ ID NO: 25905 - DNA, 1135 bp, Heterodera glycines
aaattattgttgaatttatttttaaaatgtttattttacatttttatgcttaaattaaaaaagttgtttttactgtgatttttcattttttgtacttggggccaaacgaccctggggcccaaaaacgagggcccaaacggcccgactctgattttgcgggatccggtttttgaaaattcataagacagaatgccaaaataaatgaattatacaataaaatcaattaaagataaacctattttctcttcgcaaatcccatcaaaattttgtgaaacttttcccgcggaacggtctccactctattaactctttagaaattgactcaaatttgatcggttttatggacaaaatcacttaaattttcaaaattttcccggcagcgcctaccgcactgccggaccccaaaaagttgttttattgggttcggggccggattatacagttctgacaaccattttgacctaatttgaaccccgaacccgtactcgaacaaaattttcaaaattaaatttttagcaatttctaaatacgcaataagaccagttcaaatgcatggccttcagaatcgtattattcattttattcgtgcattttgtcgtaatccgaatttttacaaaaatttaaaacagatttgggttcaaatttggtcgaaatggatgtcagaaccgtattctccggccgacttcaaaaaaatttttcaaaaatatttttttaaaggggaggggggggagtaccatccgtatactattaccaaaaattcactcactgtccactgtctgagttcactgtcgagatttcttactgttataatgtccgagagccctctccaacccacgaccctttcgaaaaatcttggtcaacccactaccccctttccatatacgccgccagtcccttaaaaaatttgagttccaatcctgcaatgggacccgcaaatttgaaatgtctggactctattaaattttcttaaattcatagcagagaaatttttaatttataggttttttatataaacaaaattctgaggtacagacaaaaaaaatgaattttgcttttttcctactgtaattttttcttaatgcctgtgtttgatttatatgtattttatttataaattaccgagactatctttcat

SEQ ID NO: 25906 - DNA, 1362 bp, Heterodera glycines
ttttatttttatttttttgcaaatatttatctgtcttctcaatggtcttctactttcagaaaaccggttggtatgtggaattctgaatttaaaaataaataaataattattttaattgaataataattattaaaaaataattaatttaaattttattttatttccctaaaaagtgatttcccccccccccccctccccccttttaggtgttgctgttggagagcatttacatttttgacgccacgaaggacccgcatgtactgcttgacgggcctttacgtgagtttttacaatttgtaaatgtgaggctgaccaatcactttaatcttattattattaattaatttttaatgactttcaagggcatagcgccagacgggtgaggggcagctaaaaacagctataaaattcttgatttttccctggcgttaatttttttccctataataatactttagaaaaatattttaaatttttttgttttccccaaagtttttttttgtatggggtgtcggtgtcttggagggttagtaagtaacaaaaaatactcaaaaaattataaattttctaccattaatgtctgttaattcagtgttaatccaggaggtcataagttaaatttacgagcggaatttcgttttgcatttttcggttttaaccaaatgaattcgtatttttaaattggaattttttgtttttaaaaaacaaaaaaaaaatgcgcgtaaattcacacaaatcctacctttaaatccttttttatttgtttggttatgctacttttcacttatggcaaatatttaataaatattatttaataataatttacaattttttccccgtggatcgttgtcaatacttttgccttacattttgaccattcgcaaatggaacgtatttcacgcaagcaaaccatatgacaaaggccgaccaccgggtgggattctcccttttcggggtgggtcgccaaacgacccacggggtgggattctcccttttgggggtgggtcgcctataggaggaactagctccggcccaccccacagggtgggtcgctggtgcgcacgtgactcgacggtgagggttatgaagaaggtcagatatggtcttggttggatgaaattatcttaaggtctgggagatgcgaccgaacgctcacgattttctgtttgtccggccactcggacgctgttgcgtcggtgatttgccaaggagtgaatccggtcgtgtccactggaagtcatgactcgaccattcgcctgtgggacttgcccacccgtcgcagcatgagcacgttgacccaccacaaagctagtgctatgactggcattgtttatataaaggggtgcgagatgaactccccga

SEQ ID NO: 25907 - DNA, 1053 bp, Heterodera glycines
tacaaatttaaaaactattaaaatgcgctttttggtcgtccgtggggcttaggagccgaagagcaaaaaaagtcttaggattcagaaaaatttaagccccaaatttttgacaaaatatctgattcaaaaatgcgcacaaaactcacaatcgaatcgcattggttttttgcgtgccccttcaaaaagtgtgtcgaaatatttggtaatttcacttcgacccggcggtttgatttcaacaaatgaatttggggcgttaaataattgttgaatctaagagagaaaaaaaaaaatgtaaaattgttaattttttatatttgcaaaaaaaaacagtacatcatgagagcaatttgtgtacaatttttgaacagacgcaaacaaaagcacagaaacaaagccggagaaggaattaagcgacgaaatcagctaaaaaataatatttaaaattattaggaaaaaattctttttaatttaaattctattaagataaaatttatttattttattttttattgctattgaccaatttcactccacgacaaattaagaaagtagttttttatattcttcgatacgttgaagaaaatatgaaaaaaaatttggaggggggtggggggtgggagaaaaaatttaacgcacccgcccccgattctgaccattttccatgtcccggttggcaacacggattcgaccatgtccaagtcgggcagcagcatcaatgcctggaccgagccgtgctgtccgacagtgcgcagcgcacggccaacaatttgggcaatgttttcctcgggcgtcgccggccccgcgaaaatggtctccacggagaggcaaaacagcggcaaatggtccacgcgttgacgaggacgggcaaaaagtgagtgaactgtcccagagggccatgtccatggagcaacagacgagttaattaggtgataattaattatttgattgtaaaaatggacaattttacacaattgttttttgtgatccgaaggctgaaactttttgcgcatatgcttaaaaatgaatcaagtctgtttagttttttaaaatttt

SEQ ID NO: 25908 - DNA, 829 bp, Heterodera glycines
  unsure (1)..(829): unsure at all n locations
aaagtgtcgatgaaagaaacgcgacaaaaatggcccggcatttgggcatggaatggagaggctggaaaaaaaaaattgtggagaaatcagacccaagtgacttaaacaggggagcagctctgtatttccaccccttatcccgacaaatttattgaaataattgaaaatttttttttaattttttacaattagattttntagtaaaagttaaaaaaaacagaattttttaattacaaaaaactacttaaagaatcaaatatattcgttttacaaaaaaacaaaaattttaaaaacttttttttaaaaaaggtttgtttttttaaattaaaaaagttgaaaaaacaaatttcttttgaatttttaacagatctttacaatttcaaaatgttagagaaaactataaaaaaaaatttcagttacttttttaatgggaaactcccaaaaaatttaaaaaattgtcgatgtggagagagacctagtgaacccctaaatagaataacaacaacagtataccacgcttggcggatggcttcacggaatgcaaagcatcggagaaatgcgcttttttgatgcgaatttttgctgggtccaattccaacttttccgaactgatgtacatgtgtggaaagcactcacgcattgcgaccagaaccgattccgtgcacaaagcctaaaaacatgaaaaaatttaatttgaagaaatttaaaattttttattatatgtatttattaaaaaagctctaaccaacaaagattttttcaattttgtctaattttttttatagatgctgttgaaaacgcgtacatagggcttaggattgactctaga

SEQ ID NO: 25909 - DNA, 1370 bp, Heterodera glycines
attcgtcctcctcatcctccgacagttccctcgccgttccgtcggcgttgaacaccaatattccgcttcgtcctcctctggccctctcgtcggcaacgaaattgccgacaataataataattatttgtgaatttcaaatttaaattaaaatttacatattttaagttcccaaattcgtgcatggcaatttggttttattgcttgcattttgttgaattcttctgccggatcaaatgcgattatcctttattttaacaggtcttaatttgtcaacaaaaatatattttaaacttttttcatttttttatttaaaagatttaaatttaattaatataattcctttttaattagtttcaatattcaaatataaaaaatattttatttttcagaaaaacgaatctcagatttggtattttatataacatacaaatatacaatatacaacacacatcatcatattctagttcaggcgctttcctcgtccttcttcgccttcttcggtgtgttgcttcagccagtcgtacaccgcgcccattgagtatcggttcttgtccttcgggtcccagatgtgcagcatgatgaactcgacgaacttctgcggcgcgtcatggggaaattgcagtcggtgtccattcagcatctggaaaaaagggggaaatgatcaaaaattggaactcttttttgggcttttcactcactctcggtggcgaggcgccatccatgaagacttcccagcacagcacgccgtaggcccaggtgtcgctcttctgggtgaagctgcggtccctcagtgcttccggcgacatccgtttggtgttcaaatcggcgtccatcgtccatcttcttcatctttcccttgtgcgccaagccgaagtccgaaattttcacctgttaaaaatgagcaaaattaatgttttataagaaaattttgttttcccataatatgtggacgatgggggggggggaatttaaacatactcaatgaattggacaaagcaaatgagcagcaaaatctacagtagtttgagaggaaaaacagcgtaaatgagcgtttgccattgttgttgcagctttgtgagcaaagaagcgaccaaagaattcatttacataaaaattggggaagaaaaaaaacagaaaaattaaattccattgaaaacccctctcaatcacttcactcttgaaaagcaaaaaaagtcaaaaaaattttttttttttcaatttccttaaattttggcaccaaatttttctgacccctccctcgtccatcatgttctcacccaccatgcagtccgagtgaaagcagttcctggcggcgatgtcgcaatggatgatgccttttgagtggatgtggtccagtcccggcggctgct

SEQ ID NO: 25910 - DNA, 1257 bp, Heterodera glycines
  unsure (1)..(1257): unsure at all n locations
gccgccggaaaaanttctcaaaatttccgcgccgtaatatattaacagaacttgtcaaaaaatgatcaaagttttggttaaatttgcagttttaggctgtttaaaaaaagaaaaaataataatttttaaattgaaataatttttattaattaaaatttcaattgaaaaataatttaaagaaattatttaaaaaattctgtaccgttggggaattgaacccaagagaaaaataatgaaaggcagaaggtttagccagagaccatatttgaattggagctatccaaaaatagaaaacattaaggaaggaaagaaagagatttaagattttttttcgcggaaatttgaaaatttttctggctgctcaaaagttcaatccttaggggtgtattttcaactctcgcctctcgtcccaaaaaacgagaggcgagagtaccaaaaatggcgagagttggcgagagacgagaggcgagagttgtcccacccctggtatttaggatggaaagcaatttttaataattttcaatttttgcaactaaaacccgcaccaagcccaaaattttgttcttttttttgaaaagtgcgctataaaattttgtttctaaccgttcggacttcgaaagttcactagatagctcattctaaagctattgatgaaattctacactttccagtgctggtagctcacaaatcagacggaaagagcactggtttgggtggaagcgatcgccgcaccagcagaggtcgagggttcgattccctcccacaggtctgccttttgcccaaatcttttacttattttataattaatttatttaaagtaatccctaataaatataatcaagtatttaattcaatcaatttggatctataataattgttaatatacataaatgtaattgtttgtagcccaaacccagagaaaaatagactttgggattcaatatgtttggtctctgtacacccctatataatctttatttacttcgaagggataatacattttcaagcgatcatagatccaaattgatttaattaaatgcttgattatttttgtgagggattactttaaataaattaattataaaatttttgcggttttcgcgcaaccccatttttgtctatagtagggcttatgaattagctcaacattatgagcttctccaagcgtcgcgaaagtcaacttcaaatgtggccatgaacgaactaatgaaaaaatcgaggcgttggccatgcaaaatgtgaggcatgcccccaaat

SEQ ID NO: 25911 - DNA, 1090 bp, Heterodera glycines
tctttttttcctaacccccccccccccccatttccggcttatcattcattggcacactttcagtcgcatgtgccgagtcagcgattggattggcaccgttcgcccggtcattccctgcgccgtccgtcggctgagcggtgggcgatggaaatggcgcagctgtgccacgacattgtgctgtagcagtgggaacagtgccgggtgcaaattttgggcgggcagtgaatgttggatggtcaaattggccaacgaccgttgcgtcttggtatttgctccgctactcttcggcgcgtaatattcgtcgttggacaaattgaacgggtctttgtccgctatttgcgcaatttgcgtttcgatttgctcctccacttcctgtcgctgccgcttcagcacttgggccaggatcagcttggacttcttcatgacgccctgttcctggagaaaaacagcaaaagcaaaatgatttttgattaaaataattcaaaatggcagaaaaacctttccgagtgcgcgagcaccgacttgctgctgttgttgctgcagaacttcctccacttgtgccgcgtcctccggcattccgaatgccctcgggtcgtcctcgtagtccaaggtcaacacccgcggttctatggcaggcaatacatatgggattcagctcgtttttactatcattttctcacccccacccctatcttccagacaaaaaatttcaaaaaaattttagaaaactttcaattttttttgttgaagttctcatagaaaaaaaatattaaaaaatcacttggaattgccggcatattcgcactgtcccaaatgatgtcgtcctcccactgagtgttctccaattcgtaattttcaaaagggaacagcgaatgttgcgggtcgattggcaaacgcgaatctgaaaagtgccaaaatggagaaaaaatagggaaacccaacacaaaatgacaaaagttataccatttgaaaggtcggccgaagtgttcaaaggcgacgagtaacgcgtggggttgagaaggtattcgaaaaaggttttgtttttccctaaaatttagaaaaaaagaaagtatttatttgatttaaattt

SEQ ID NO: 25912 - DNA, 2078 bp, Heterodera glycines
ttataaatttaactcattccaaattgtttcttccatttcataattacgtaatggctaactccaattttcttgcaaatttcggcataattttgtcgccattctttggttgaatatttttttcctttttgtttatattcatttgccatttcaatgaatttttttacaatttcaattttttctttatcagttttggattttttgcttttattaatttgtttattaagtcctaattctttaatccatttataaattttcattcgatttgtccccaatttttttgctaatttttctttcaattttattccattcatttgttgaatattttcttcctttttgctttattttttcttttattttataaaattttgcaattttttcttccaatttttcttcttctttttcttcccaattttctccaaatatttcgtcaaatgacttttgctgtaactttttcttttctgattcaattttgacaattattaaaaatataattaaaaataataaagggaataatttcatttttgtcgtcttaaaatgattttattttttcttcaattaaatgccaattcattttttgaggcatttaaatgatttttttctgattaaaaaactgaataaatcattattttactcaataaaataaggaaatcctgtttaatttcaaagaaataatgataataattttatcttaatgacaaaataattgccaattggtaaattaatgcctccatttttgataaaaaataacaatgaaagaataatttcattaattctcaaaaatgtattttattttttattcatagggaaatataaaacttctagtgtttttatacatgaaataaagaaaaaattgaaattgtaaaaaaattcattgaaatggcaaatgaatataaacaaaaaggaaaaaaatattcaaccaaagaatggcgacaaaattatgccgaaatttgcaagaaaattggagttagccattacgtaattatgaaatggaagaaacaatttggaatgagtaaatttataacggagaaagaaaaaatggaaaaaatgaaaatttattggcaaataaaaaaagaaaatccaaaaatgagtgaacgggcaattgcaaaaatgatgaaaattgatagaacgaacatttcaaaatggaagaaactgtttggataaaagaatcattgaagattgaaaggatgattataagaaaaattggataaatttgccgaaaaaattatcagaaaaactatgacaatttctagttttttttcaaattttttgtatttgtattaaaaaattattttaaataccctaagttttgaaatttttcttagtgaaaataagtgaaaacagtcaattcaaggattgggagggtatcattaaaactgaacaatgttggaactgggctcccagtatgcgtaaatttttgattttagaggccctgtaaaactccttggggttttgctagggtgaaaaaatggaataattgtaaaatggaagagaaaatttggcatttgtattagccggaaacgattaacagagcaagaaaaaatagagaaaatgaaaatttattggcaaataaaaaaagaaaatccaaaaataagtgacaaagaaattgcgaaaacattgaaaattaataaaaaaaaaatagcattttaaaatggaagacacaatttggagaagaaatggaagaggattaaaattattaaataatgaatttttttttcacttaaatttctttggcatttttattttcccatttcaatttgccaatgtaatttttaggtgctaaaaacatccaaaaaagttactaaaattaatgaccaacattttcaaaacagtcgtgatggtacgatattttcgaaaacaataggttccctggtctggcctctctcaatctgctcaaaacggtcaaacaagattttcaagtcgtgcagggtcgtttcgtaaaatccgtcattttagcgaatttttcgacaaaaccatggcataactttgcttaaaggcaaccaaattttacattattagtgccattcgatatccaagctttttctctataagcctgcaaaatttcaaacaaaattatcaaa

SEQ ID NO: 25913 - DNA, 2054 bp, Heterodera glycines
caacttttaaatataggcaggagcgatttttgcgcttttttttgctattgcatattgcttgtcaccgcttgaatgctattgacgaaatcttccattacatcaccatcgggagcagattcagttgttgctgcagcactgctgctgtttatgcatccctccctctcctcctcttttgacaatagctgttgttgttgttgttgatcaaaagttggcgagacatctgttaatgattccgccaaaagcaaattggccagcacattgatcgcgtttttggctttcttccagcgcgtcccatcctgcatcattgcgtctgccgctagaccagcttccactaagtcaagcgccacctttgccttacgcctcaaattcttctcctcctcgtcgtccggtgtccgttgatgttttgctgttgtcattggtggtggtggtgatggtggtggtagaggcttggtgcacctgtctgaggacgacagttcgctgtatggaacgctttacgcgcggcaacgcccgttttcctcaaacggaatgaaacggggaacagacaggcgggggccgctcaaagttatgccgcccgtgcttatagtgaggtccacctctgcgataactcgcttgaacaatgcttttttatccgacatgatgctgacaaaaaaactgacggtcaaatgtttgaaaagattaaatgggccgattgggacacgtgcacttatttatatagcgcgagcgcccacccacatttttcaaatgcttctaaatcctcatttaaaattttatctgatgccttcgttgtacctatttttagctttttataaattcctattttagttatcctattttcaaacattttttaaattttattttaaagtgaaaaatcgatcgattgattaaatggtgagtgatcgcttgccgaatcactaaaaatcgctgtaatcttcttcctcctcctcctccccattatcttcatcgcgcatctcgaccacgatgtcgctgtcaagcggcacctcatcgtacacgggctcttcgccctcctcaattgcaccatccgcgcggctctgccccgctgcctttaaatttaaattgtaattttaatgagtgagaaattaaaatatataaagattttaatttaattaaaattgcccacccggtccgccgtcaaattgacgcccgtcgggcgcagagaaacgccggccaatatagccggcaaaatcagcggagtcggcgcgcttgccggctggcggttgcgactagcggcgctcattcctgtacaaattgttaattacaatttgctaaaatgtaatagcgagaaactcacgctggcgatgtcggcgcagcatcccctttttgaaggcgcggtctttcaaaaatttgcgcactttgaatccggcgcgcacaagcttaattgaggaataggggtttagcggataaatgaccaaaattaataacagacctccgcaatcaccaaaagcgccaccagcgctgtgcacaccgcgatccacgcggtcaaatgcgcgggcggaggtgcgcattctgccgccgccgccgacacctccgcagttgtcggaagtgcggttgttgttgttgttgtcgttgcagcttcgtcaagctgaccggtgctcaaaaagtccgtgatgttacggacgctgggatgcgcacaaagcacaggctttgcgtacttgcgcggataaaaacaatgcagaccgatcggacaaagcgtgcagttaaatttaatccactgcatggcgcgaatattcggagaaatgaccagcggagtatggcccgatcgcttaacccccccccccttcccatccactttagttctccaaatttttgtttcttttgtcaatttgtcgtcttttcattgtagaaatggtcatacagatgttatctttctttgtttggctcggggcgatcagcaaagattagtgcagggaatattggacacaaaagaataagtgactttaagcgccccattgacatcttttggcggcggcaaaatttgaatttaatgaatgtgttataaaatttgttgaaattgcgattagggacggtcggggtaa

SEQ ID NO: 25914 - DNA, 1136 bp, Heterodera glycines
taaattttttatagatttttaaatgttgggattttttttggcttaccaaaacttcatccaaacctggttcttttttttctctttcaaatcgccccaaattttttttccagcttaactaggcccttttaagcttatttccagaaaattttgcatgaattctcatttttaaattttttatagatttttaaatgtttggatttttttttggcttaccaaaacttcatcgaccctggctctttttaaacatgccaaaaagtttaggcttaactttttttaattaaactgatcagaagcgcaccagattttgcaagggcatcaaaaagacaaggaaaagcaccgctatgatgctaacgccagtaactcttaatttaaaaatttttattaatttttaaaacttcactattttatttttttaatagatttttaaatgtttggattttttttggcttaccaaaacttcatcgaacctggttctttctattctctttcaaatcgccccaaattttttttacagcttaactaggccctattaagcttatttccagaaaatctcgcatgaattctcatttttaaattttttatagatttttaaatgtttgcattttttttggcttaccaaaacttcatcgaacctggttctttctattctctttcaaatcgccccaaattttttttacagcttaactaggccctattaagcttatttccagaaaatctcgcatgaattctcatttttaaattttttatagatttttaaatgtttggattttttttggcttaccaaaacttcatcgaacctggttctttctattctctttcaaatcgccccaaattttttttacagcttaactaggcgatattaagcttatttccagaaaatctcgcatgaattctcatttttatttttttaatagatttttaaatgtttggattttttttttggcttaccaaaacttcatcgaacctggttctttctattctctttcaaatcaccccaaattttttttacagcttaactaggccctattaagcttatttccagaaaatctcgcataaaggctcatttttaaattttttatagatttttaaattcagtgggggattggcttaccaaaacttcatcgaacctggttctt

SEQ ID NO: 25915 - DNA, 1499 bp, Heterodera glycines
aaatgaccacaattgggacgaggaaagcgacgagcaaattgatgacaatgaaaagccaaatgttgttggaagtgtccacacaaaggcgggcaaccaattggccattgttgttgatcatgccgttgttgttgtaactgttgtggtggtgctgctgaacatcatccggtgaaagctgaacagaggaggggggggggggggggggaagatagtacagtgttgtacaaagtggaggaaatttgaatacggtaaaataataaaaaagaaatttatttaatcaatttaaaacatattaaatttttcaaatgccaatgaaaataaatatttatcccttttttcgtgaagttaaaataactaaaaaaaatcgaattatatcaagaaatgttaagtttggcttttatttttgatacatatctcttttttaaagaaaacatttttagtggtataaacaaaaaaaaaaaaaaaatcatttttattaaaaaaattttcaataataaactcttaatatctcaagtagagttcgggtacgggccggacccgtatacgggtttttacgggcccgtaacccgtatttttttcggccgatacgggtttttacgggttaaggatttctagcccgtaacccgtattggtgtcaagcccgtaacccttacccttaaccgtattttatcaaaataccgatctctaatctcaagttaagaaaaaacgaaaaaatcgtgaaattttgaattttattttaaataaagaaatctcgggcgttatgttgacaaaacaaaatgccaaacaattgagaaatggtagcaaattcaaatatttaacaatcggcttctctctctctctcccacctgttgtccgctgatcaaatcgtacagaatttgccggtacacccacaaattgggcgacgccatcagcgcactgagcaaccaaatgcccaaaatgtacaggtggagcagtgaattcttcattttcagctgcctcaacggatgacagatggccaaatagcggtcgccggtcacctgtgccacgaagaaacaatttgaaaatgggcattttggcgtaaattggcgaaacgtctttgaaattgtgaaacggatagagtcatcgaatttgaacactgatcaataaagtctgactgatcagaccctggatcgagtcagtagtcttatctcacaggaaaacaacaaacttccccatttttcttggtttttccttatacatataattcagtttatgaacttttttgatcagtgatcaatcatcaaacagcttttgttttttgaaaatgctttaccccgacaagcgtgaaaatggaggcacatgatgtggtcgaattgacccaaacagacaatttgcaaccccaggagccgagctgccattctaaaagcaaaaaaaaatcggggaataaaataattttttttttgttggcattttctttttggtttttgaccctttttacatcccattctttctttctctttctatccccttttttgctttctccg

SEQ ID NO: 25916 - DNA, 1218 bp, Heterodera glycines
  unsure (1)..(1218): unsure at all n locations
attggctatctctttttctcctcaacagtaatagggatttcaacccgcattctcagaataattacgccgatactaatttttctggaatttgtttctcggcgcttttgtttgggaaaaatttggaaaattggctatctcttttttctgctcaacagtaataggaattccaaccgcattctcagaataattacgccgatactaattgttctggaatttgtttctcggcgcgtttgtttgggaaaaatttggaaaattggctatctctttttctgctcaacagtaataggaattccaaccgcattctcagaataattacgccgatactaattgttctggaatttgtttctcggcgcgtttgtttgggaaaaatttggaaaattggctatctctttttctgctcaacagtaataggaattccaaccgcattctcagaataattacgccgatactaattgttctggaatttgtttctcggcgcgtttgtttgggaaaaatttggaaaattggctatctctttttctgctcaacagtaataggaattccaaccgcattctcagaataattacgccgatactaattgttctggaatttgtttctcggcgcgtttgtttgggaaaaatttggaaaattggctatctctttttctgctcaacagtaataggaattccaaccgcattctcagaataattacgccgatactaattgttctggaatttgtttctcggcgcgtttgtttgggaaaaatttggaaaattggctatctctttttctgctcaacagtaataggaattccaaccgcattctcagaataattacgccgatactaattgttctggaatttgtttctcggcgcgtttgtttgggaaaaatttggaaaattggctatctctttttctgctcaacagtaataggaattccaaccgcattctcagaataattacgccgatactaattgttctggaatttgtttctctgcgcgtttgtttgggaaaatttgggaaattggctatctctttttctgctcaacagtaataggaattccaaccgcattctcagaataattacgccgatactaattgntctggaaattgtttctcggcgccgttgtttgggaaaatttggaaaaatggctatctctttttctngctcacagtaataggaattccaactgcattctcagaataattacgccgatactaattgttctggaatttgttt

SEQ ID NO: 25917 - DNA, 1326 bp, Heterodera glycines
aaatcaaattgtgatgcttgggtcccatggggggggagaaattttcaaagtcgtgcactttccgtccagccgatgaaggcaggggagaaagaagacaaattttgaatttgaagaaattttttaagaaaccaaaaattttttgaaaaggtttcgcaaaaaatcgcatttcacacacctgcacagttgccggaaacattcgtcgttccaccgggtacagccaggcgtcgagcagcacacaggcgttgaacagcgacggatattcagcgcacgcggacagcgacgaggcggcgccaaaactgtgccccatgcacacgcagcggtccaacgcgagacgattctgacaaatgggagagggaaattatattttatttttccaaacttttcgaaaacagcaattttttgtatgatttgctcaaaaatccaatttcgccgcaaaaaagatatgaaaacaataaaaaaatagtcaattttggctgaccccttccggcccggacgattattaaaaatttggttgaccaccctcactccgccattgagaatttgtaaattttaatgaaggtttcgaaaatgatcatttttccttttgcccccccccccttccactcactttgaattgcgtccaatcgaaagtttggccgagcaggatttgctgttgtccaaattggcggtcgttgttgttgtccgtcgccacattttgcagcaaattggcgtccatttcggctaagatccgtcgcatgtgcactgtctcggcaacccgtcgtttcacatgaatttagggaatttgaaaaaataaatgcgaaataaaatttggcaatggaaactccaaaaactatggcatttccccgtgatcaacccaaaaaaaaacgacaaattttgaaaccgcttgtggacaaatttcgggtaaccgacacactcggaagcagttcgttttgctccaaaaaaatgaaaaatttattcaacgatttttgaaaagcaattttttataaaatagtaaaaaaatggttcgaaaaattttcgtcatttttttgaaatttctgtataaaaaatccattttttaaggaggcaaattccttctgtaacccattaaacacataaggtacacagacatatcaaatgttcgaaattttggagtaaaaaaacgaaaaactccatgtttaagcgaattttatgcgttcgcgcaatttcataaattttctcgaccgccccggctttcccccggtctcccacctgatcaatgcgtgtctcgtactccgtctcgtcatgtggcaaaatgcgcatttccatcggcttcttcacatgcgttgtcgtcggcacgggcggcggcgg

SEQ ID NO: 25918 - DNA, 1298 bp, Heterodera glycines
  unsure (1)..(1298): unsure at all n locations
ctcaaaaaagcatcgtttgtaatttgcctgggcatttaaacgaatgttgcagagttcgtcgaggtgcaaaacaatcgaggcgatcatctctgaaataatgcgaaattggtttgttttcaacatttaagtgcataagttttgataggattattggaatgacttaaaatttggtcaatttatcaaattcaaaggattgtaaacagtcatcagagcagtttcataccttaatgagtaacttttgggtgttctgatttgtttaattatttcttttgtctcattcaaaactgacgaaaaaaggcaattgattcagtataaaattataattggcttttcaaaggttttacatttcgtagcttttaaagaattgcttaatatttgctgaccttttctgggaaaacctgccgaatatttgttgccatttgtcaacggggatgaaatgagtccgattttattgagttttcttgccacctcaattgtcatttgggggtccaattggagccggtcactcgctaggcaaaacaacgtcaatgtgttcattggagggggtggcgcatgttcaatgaattttgagccgaattcggagactgatgcttgactgcgtcgctgagtttgttgataaaaccatggtaccagatgcacaacaaatcactaattgatacctccaagtcgcggaatcgatgctccgtaaaaattttgtcagtccgattgaacgggcacaattcatgttcaacaacaaaacccaactgacccctggccacagccgacggactctgaaggcgacacgtaatctgaaggagaattaactgtcattccttagggcaaaaggacaattcaaaaggataaaatggaagagaaatgggacaatgaaaaattatgacttttaaaggaaaccttttctttgttctccccagaaccaacatgggccatcaaaatgtgaagtattttcaattgcaaagggaattcggccggcggtggtgcaaaattgaaaattggcgaagtcgaaaacaaaccaaaattagaagaggcggaagtacaaaactaaaaaagacagaaactgttaaggtctttggtcaacaaatgtgcttacctctgacgaactattcgaaggcaccggcggttgttcccgaatttgaacagttcccattgggtcgggtggaaaatttccgcaaccatttgctccatcggttaaggactgattggatgtcaaacaagtgctgtcctcagtcgattccagttgggcaacggtattttcaatatagcagctccattttgagagtgaccnntgcaggcccatgcaa

SEQ ID NO: 25919 - DNA, 1497 bp, Heterodera glycines
  unsure (1)..(1497): unsure at all n locations
ggagttgggggttggcgcgacagaattggccgcctcgcttctccccgccccgccccctccaaataccaacgcggcattttctcacaaggcataacgcccacttccttctcgtattatttggaaaatgattgcttcagggatcacgccggtgtttttaaatttgcgaatttaaaaaccaaaaaattccataaaataatttttatcataaatctctttaaaatttatttccctgtttttcgaaattttgaaaaggtcatttaaatttttctctttttattttttaaaattggccattcattggcaaaaatttcgtagttaagaaaaatgacagctaataagcaattcaacaacagcttccttttccccattacaaaacggcggattggtgccacggcggaaagggcacaaaaatggcactttaaaatgcggagaaacatttcgcggaagcgtttgttgaagattgtgtagatgatcgggttcaccttgagagggaagaaagtgtggtcaaatgccgcgttatttatttgcattttacggtggacgagcagtagccgaaccaaagggcacagagcgaagctcaactcggaaaaacgcactgctgcaacccgcagaggcccacaacgatgttgaggacgaagaacggagtccaaccgatgaaaaaggaagagaacacgacgatgagcacctcaaaggggccgactcattgccagcctaattaccccctaatactcaccctcgtcgccttttgttccgatgccaattccgccgtccgttttgccctcccccggcggactctgcgccggcggcgctgccgcgcgttcgccgtttgcgaatcgccgctgatacttccggttgattttcgcaataaacttttggaccaaagagacgagccgaaaagcgaactagttaagaagaaggcattttgttggtctgatcagtgagtaataataatctgatcactttttacctttttctctgtactttttgctgatttttttttttgcaaaaattcgtcgcattcattcgacgaactttttgagaccaaatgacgagaagcaccgttatttttactggacaaattatcctaaatttgttgactattatgattccgcttttttaaaattatttgtgcctcttttctcattttttcatcggttgcgactggcaaaattttgatgatcggtgagttcaaatcgcttctttgttgctgaacaatggcacattgcttttcccccattcgggagatcgttgcgggagtttgcggcactttggctttgcatccgccgcaggggcgaagcggcgcaaagggaaaaacgatgggagtgacctttgtcaattgtttaaactgatcagatcagctgatcactttcaatttaaaaggcgataaactaaagaaaagattacaattcatcngcctggtgggagtgggccggcttctgctngcactgannaatggaaantnngttcantaaaagactctccgctcgctatcactga

SEQ ID NO: 25920 - DNA, 1371 bp, Heterodera glycines
atttacaaaaataaaataaatttctctcccaacagccaccttaccgcttccaaccaccaccaccaactgtcatgaacaacggccgagctcctccaactcgtcatctgcgttacccccatcgcccatcaaatgctcaccactgtcacttgacgagcggctggccgcgttgatcaaacggcgttcatcgcttgcgacggcgtccgccgcgacgacaccaaatgccatcggcgctggaacgggcgatgtgtgctcctcccacgcactgctgctggtagtgtcagtgctggcaacagtgttagatcctcctcctcatcagcaaccgctgccaccgcttcctcatccatgtccatgtcgttctcttcgtcggttggcaaaatggtggcgcccgcggaaacttcggcaaccgaagcgtcggaagcggccaaagcggcgctggaagtggcatggaaagaagacgaacaacaactgctgcagcgacggcacgctgacgacagtgcattgttgctgccagcaactggcggcggcggcgccgcaacaccaccactggtcggcttcggcacaggtatgccgtcatcagacgctgtggcgagtgcatatcaaacggcaacgacgactgaagtcgtggtgccaaagtcgtcgttggcggcggcaagaagtagtagggcaccgttgacgcagtttggtgggagacacaacaacaacagcaataacaacaacagaggctggccaacggcgtggaaccacagcggcgccgatggtggtggtgccgttggtggtggtggtggtggtcgtgggcgctatcaccattatcatccgcaacagaaacggttgtggaagaacaacaatagttggcaacggaataatcaacatcgcaacagcaacgaccagttcaatcagcagcagtcgcaaagttttggtggtggtggccaaaaccgtccatggttcaacaacaaccacaaccagcagcacggccagcaacacaaccggcatcagacgctgtcgttctcgtcaagtggtgcaacgccaacaacaagttactgtagcggcaacatgaacaacaccaccagcggctacggtagcggttttggcggcgtcaacagcagcagatacagaggagggcgacaacagcagcaacatgaacatccgctgcaacaatcacaaattgactacacccagcaacagcataaccaacgagccacatccagcagcacaacaacaaccatggacacaaaaatggtaaggcactactggtgtggggagcgggccaggctgttttcgcgtggggcggagaaaattccaaaaaatttagttccgtataaaaaaagatcgagccaaaaaaaggtggaaaatttgtggtgatgaactcttctg

SEQ ID NO: 25921 - DNA, 1133 bp, Heterodera glycines
gcattatagtgttcattcccaaaaatggaggaccatagtcaacagcagcacacaaaaataggacagctaataaaagacaattcggactagttgtgtgcattggcaaggaccaaatcctctaaaaagtgtataaagatggtgtgtcacgcaaccagtgaacagctgttagcactcgtggaaatttgtctaaatcttgtcgcttcgcgtttccaactgactagccgacagaaaagaagactgatgccctacgtggaaactgtgcgacggatgagcagagcgagaagtgaacgcggtgcgagacgtgtgcttgtgcagaaaggatcaggattcggggggttgtttgccgccctcctaacacccgtgctaattgaagtagcaaaatcatttgtcaccaaaaacgcataaataccccacaatttgttgttcacgctcacatttttgcaaaatggctaataaatttttgcttgttccacaagaaatttaccgagggctaacctcagcgtcagatacgggagtcattaatttggatgcggtaaggtatgacctggaccgtgccaggcgtgaacggactaatccaacaacaaaaaatgtccggtacaatcaacagcttaggcgttatctgcaaatgagaagggagcttgccgatagacctacaaaagttgagttaaccaagggcttgagtgttttgctcaagcgagatgggggtgttgatgatgacgacggcgaagtcgtcaacactcagccacggcctcccgctccaccaccacctccaccaccacctcatcacccatctcaacaacaccaccgtcgccctcccagccttcccgatcagcaatcttcctcatctgacgatagtcatccgcctcatcctcctcgtccaccacgtcctcagagaacaaagaaaaaccatcaatcttctctgaaacatgatcgtttgaaccaatggcagcaaaggcgtcgtgacttacaacaacaacaacaaccggtagtacgtgatctcctcgctgaagcagcagctgctccgttacctgaaagtgacgatgacgatgaacaaatgttggaaggcgggtatctgctgccaacaccgtcacaaaattatggagacataccagtatgccagactatgcagatga

SEQ ID NO: 25922 - DNA, 1456 bp, Heterodera glycines
tttcaccaatcatcttttccatttttaaaattaaataccactcgtggtcgtagcatccgagtgaagcgattaaaacaacacaactcacgttttattcaaaaattattttaattaatattttctatatttttttcatgtaaatattatatttttagagtcataaataaaattgagttttttgctgtttgtaatttatgaaaattttcaattccatagatggaaataaaagtttaattgttcaagtttgaaatcgcatcgatagtttgttaatgaaaaaagaatattattattttatgattatgcactttaatagtttaaattatttattattttaaaataaacaattaactaagtaactttttataatatagaatgttgcattggcaaacaaaagaagaaaaatttagggccttaaaatgtatttttgaattattagaaattccagaaattgcttttgcattgaatatcattcagattttttcaatttattgagtaatttaaatttatttccatacattaaccaacgagcgatactaatgaaaagctttatattgctgttacatatttttcacatggaaaaatttctacggaaaggatgaataaaaattatttctttcagataagcggtatctggcagttaaacaaaaaatttaagaacttaaagtagaaatttagtttataatttttcttttcttttataacgattttcgtaacttttaaatggtaataaaccgatgatcgctgaattttagatatttttttgagttcaacgtcaaaaatatttatgtgatttaataaatttataaaaattcacttttttagatttgcaagtcattcttacaattaagaaatgataaggaaaataacttttcataatttgtaaaaattgtttaaagaaaaatgtcaactttaaaaaaatatacattatttaattaatgctaaaaagtattccttttttgcgttaaatatataatatgtatgagttaagttgaaattgaagtgaaacgcaaaatgagtgatgctcaccagcacaaccaactaagcaaatcttctccatttctcatcggttaattggcgtcactttccaaagcgacgccatagaacacctaatttaagaaagaaaaattagtgatgaaggaaatggtgagagacaaaaggagagagaaaggagaaaaggtgagagagacagagaaagagagagattgagagagaaaaggagagagataggacacaagcagaagagagagagagagagaggggagaaagaggagaagatagagagagagatagagagagagagagaaagagagagagggggggttgtttttttctgtgtgtaactttttattctttagaaatttttattgcttatgtttagggcataaaaaatatggatataaaatggcaaaatatggccataaaatattgacataaactttttggttatttttgacat

SEQ ID NO: 25923 - DNA, 1330 bp, Heterodera glycines
cccccccccccccatctgctttgccctttgtccttaatgcctgtgcaaaaaaatagaaggagacaaaagacgacaaatggatgcttgttctacatttcctttatttttttaaaactaatattgttacattttgggtagtaagagtgaaaacagctaaataagtgtgatttaggagttcgacattttgaaaatgcatgaacatgtatgtcgaattctaagttaacaaaatttattcatagcattgaaatttcatctcaatatttgcactttaattagccggacaattggcaattaacatgcacaatgcgattagacgagcagatccctccggcgattatgagcttctgcagagagtcggtagtggtaagtgcacgttgtgataataaataaatacttcaatttttggttatttcgaatcacttacactttggctaaatttgattggttttacattatcaggttcctatggggaagtgttcaaagcccgtgatgtccggtaataaaggtcaattttataaaacattttcagtttcttacaattagctcgggagaatttgctgccataaaaatcgtcaaattggagacgggcgacaacttcgcagacattcagcaagaaattctcgtgctcaaagaatgcgtacatccaaacatcatttcgtattatggcagctatttgaagcgcgacagactttggattgtgatggaatattgcagtggcggctctctgcaggacatttacgaaagtcagcaatcaaaaactgactgtcaacacaccgtccccttccctttaagtgatcggacctttggcagaactgcaaatcgctttcatttgccgagagacattgcacggccttaaggtacggactcaactgcttgtcagtcgtccattataacatggtacaaattcagtatttgcaccaaagagggaagatccatcgcgacgttaaaggggcgaacatccttttgacgcacaatggcgacgtcaaattggcagactttggaatcgcggcacaaattactgcaacgattgggaaacggaagtcgttcatcggttcaccctattggatggcgccggaggttgcaaacgtcgaacgcagcggtggctacggctcggagtgcgacgtttgggctgtgggaattacggcgattgaactcgccgagctgaagccgccttattactatctcagtccgctccaagtgctttcccaaatgacaaaatcgagctacaaaatccccaaactgaaggacaaaaagaattggttcccctcctttttatcctccaaaacacaacaattcgttcaggtcgtccgccttttcaagttttatcaaa

SEQ ID NO: 25924 - DNA, 1088 bp, Heterodera glycines
acaatcattgcaacacatatgctcgcaagacaaagcaatcgaaagagcaattagttgagtgttatttaaagcatcgtcaaagacgaaatagcaataatacagttaacgggtgaagaccctccaaatgacggattttgtacgacgacggtttccatttccatccaccggtggtgcgtatttcttcaaaatcttatggaatcggatcagcaaagcacaactgtgataaataggatttgctgttggtaatgccatcattccgaaactaaggaagttacaaagttaaatggcaaagtgaatggaacgacggacttgtgaaaagatgaaggattggaggatgccattctcgactaaccatttaaggaagtggcgagtctcagcacagggatgggcatgggcaaacaatttacgattactagccgacaaaatgttttgtccaaattttcggcaatgcccaaacagcttggcataccaaatcatcactttctatgaatataaaaattagaagaaacttgcgatcagaacacactttctcaattttgtgatccgctttctctgggacacgcacgggcaaacaactctttaaggcactgacaatttcgcaaacggccgaatgcggaaaacccatggacgaagagtgctggataattgctttgagaccaatgcgacggtcagaacaacgcgaaatcgacggaacgatcattccccggtcgacgtcgattaaggcaatgtcattgttggacaattcgtctttcgggaaccgttccggacaaatgagttcgtttattttgctgaggttgtacctaaaacagcgaaagatgcatagaaaacgagacaataaacacacctgagtataccacaaatataaggcgtagggttaaagcaaagttcagtttgagaatcgggcacaatcggaattaaagtgtggggccattccaacggggccaacaaacggacgaaagtctggacagtcgttgacacatccctcacctgaactgtttacagactaattcgaccaaataaatgaaaatcagaattgacatttgcaccggtcacaatcactcgccgctccgacagcaaacaaagaaata

SEQ ID NO: 25925 - DNA, 2411 bp, Heterodera glycines
atagatattttgaattttgttttcttaatggtcctttaaaaaatggttattcgcgaaattcgtttgatttggttcagtcagcggccgcaaaacaatcaataaaattttatttaaattttgccataatgttttattaacattgttaaaaagctacatttttattaatttaattttttatatctttcagtagaatagacaaatttagcgtgtaaatgtttataaaaataattttaaagaatttatttgtttataattgttaaatgtttcattaataagattaaactattaaaatttttaatctccatttgtctttcctctcggtcaatcccttttgtgtaattgtaatttttgggtttattgtaattaatattcttcactttgattttatttaatgttttttcatttcttatataattaattcgtagtcgataattttcgaatgcaaaattaacccttttttgttatatatttttgatttttaataaatcaagtattccgtaatcctaatttgaataaatattctttatgtttttattacctaaggccaaaatctgtcctttaaaaaaatatataaatgataatattttataattaagactatttacgaaagtgattattaaataaggattaaattcatgaatttttaatatgcatttaaaatcaaagaaaataaaaaataatacaaattaacccgatcattttaaaaatttcattataacatatttatgatatcaattttttttcaaaatttattattaatatcttgttttattttaattattagatttttaataataaaatttatcttatacaaaaaaaagcataaaaatgacggctatacatttagaatccggcaaaacggcaacgtatgaaataggtcattccaaaacatttaatataaaatactttataaaatgaacaatgtttttttaggttattaaacttgagctataaactcaaaaaactattattcaatatagtgtaattaaatttggtctttgaaactatatttataaataatagttaacttggtaaaccttcttaaaaatatattattaaattaaaaaaagtttatgaatacttatgaaagatttaaataaaaagaaaacttaagaattaaaataaatatatttcataaatatatgagagctaatttttttattaagtttaaattctaattaaaaaatttctattaatcatttttggactatattaattttataattcataaatatatttctgtggtaaatttattattattattattatttttcttagtattcatgaactaagattttaattctctttatagatttactctcatgacggattctctgttcctcatttttaaagattggaatgttttgtgctttttagtttaaaattataatttgttttatgtatttaattatgtatatttaaaaaaaagaatagtaattagttttatacgtatatttttccttactatttattgtttatcttaaaaatctttctttgaacatatttttaataaacagtgtttaattttcgttatatatgtaaaaattattgcacagcttttgcaaatgtttaaaccaaaaatattttaaaaaattttaaaattattttttttgtaattttcatttcgtttagcttatccatcgtttctctttgcttcatgaccccttcgaaaagtcgttgacttaccaacccctttcacagaatgcctcaagccccaaaaaatttcttttttcaaatattggctatatttagttttttctaaattttttttgaaaaaccgcaaattttaaatgcgagattaacataaaatgtaaatgaaaaaaagcagaaaaatgactaaaaatgaaaaattagtcacgcaatttcttttcctaaaatggattttcggggttcacagattttctcattaattttgactcacattttcagtctcaacttttgacagtttgtcctcctccttttgcttcgttcactctgtccctttctgcctatcagttattttttcaatcgtttttaaaaaagaaaaattgttttgcttccttttttaaagcaacccaaaaccaacgaaattaaccaaaaatttatcattttttggacaaaatcttattaaaagaattttcctcaaaatttcaaatttttcttcctgcaccgcctgacacgccgcaccttattccccaaataatattttaatttgaaaaataaaagtaaatgcaaaaatttagtcattaatataaattcattataatattgcatttaaatattctttattaccttaaaaacaacttttattctctgttgtaacttataaaaataattgatatgttatttagagatatttaaaagaaaaaataaatttgattatgtttaatttatgttgcgcatattttattatttaatgccttttgttttta

SEQ ID NO: 25926 - DNA, 916 bp, Heterodera glycines
  unsure (1)..(916): unsure at all n locations
ttctatgcgagggtttattaaccacgaatattgaaatttttattgttggcgttcatgaaccagtttttcaaaacagcaaccgggccaatttagaactcgcactacccagcaatattgacttcaaacatattttaaaactgataaatcgcacgtatcagtgcgctgtatttttaagattgtcaaaagtactaattgcgtttctcttattgctttcgtgtgcgatttttcttcatgaaattggggaatagaatggtcagcaatcaatttcagacgctttttgcaggtttaacgtataaataatgcttttccagcgattgaatataatcacaagcaatttcaattattgccaatgaagctttgcaagaaaaatgatgttgacttctatgcgagggtttattaaccacgaatattgaaatttttattgttggcgttcatgaaccagtttttcaaaacagcaaccgggccaatttagaactcgcactacccagcaatattgacttcaaacatattttaaaactgataaatcacacgtatcagtgcgctgtatttttaagattgtcaaaagtactaattgcgtttctcttattgctttcgtgtgcgatttttcttcatgaaattggggaatagaatggtcagcaatcaatttcagacgctttttgcaggtttaacgtataaataatgcttttccagcgattgaatataatcacaagcaatttcaattattgccaatgaagctttgcaagaaaaatgatgttgacttctatgcgagggtttattaaccacgaatattgaaattttttattgttggncgtcatgaaccagtttttcaaaacagcaaccgggccatttnagaactcgcactacccagcaatattgacttcaaacatattttaaaaccgataaatcgcacgtatca

SEQ ID NO: 25927 - DNA, 1127 bp, Heterodera glycines
  unsure (1)..(1127): unsure at all n locations
tcaacggcgaggcagatagcttcgntgagtacattcaaatcttctaataacaaaattgctagaggagggaaagagcctaaaatttgcgcaatttttattgctgcagaaattgggctcactgcgccataactgaacgctgaatttatgtgtataatattttatacatttgtaaatgcctcatcctaaaaaaacaattggactcaaaaaagtcaaagtcgcgcagtcacgattaaagactgataaattgcccaaatgatggtgcaattgcgggaggcacaatccacaattagcggataacccgtcggaaaatggcggacaaatggactaacctgttagcggagagccagtttattggatatctgatgagacaattggagagggagtttaaggaagatcaagcaccggaagtgtgcatgtgttagagttgtcggcgtggaaagtggagcggggacagtggtggtcgcggaggaggcatgggacgtggctacggcggagccagtggacgagggcgcatgagctaccagcagcacgcgggccaaactttggacactgaggctgagcgactggtatggaagcacgaaaaaggtccaagacatttcggaagggggaaggaatgttgcatccacaattttgaataataataattttcttatatgtaatcatccttttgctttatttatttatttttgccttaagaacggccaattatgttttttaattcattaaaaattccaaatttccggcgatgccttccggcagtgccgcctccctcccatgcattggatttttgaaaaacacagaaaaatttctgaagcaaaaaatataagcttacggttccaaatcaaattaccttctgtctgctcagttcaatctctgtggcgcatttctataatattagtcatttgaaaaaaataattaaattatttattttgaattattgattaataaagtttttaatttattttttgctttcgatttatttattcaagtaataaaagtccaaaagaagggacaaaggccgcttatactttcggaacagaatgatagtccgggaaacatgatggtgtcagatctccaacttgaaatgaatcttgtaaaatattttttacttttttcttgaaggtggg

SEQ ID NO: 25928 - DNA, 2226 bp, Heterodera glycines
agaaaaaggaaaaaagatagagacaaacagagaatgggccccccaccatgagaggcaaaaagaatcccattcatttattatttcgcttgggttggcttttgatgggtagcgaaggaactgccggatgagtgaaatgaaaaaaggaaaaaagagaaattagggaggaggaacacaaaagaaaacaaatgggcgggggcggggagaagttgctgggcaagtgcgtgccatcttcgctaataataaatggagtgaaccaagtgggcatggacggcacttccaaaaacctgccgctctgttagacaacggaatgagagatagcggtttaacgagagtctcgagtcttcctctcaagaagaaatggatgactaatagaaaatttggaaaatttaaaaaaaactaattaatttaaaagaattccccaaatcgaatggtgctgacattcaaaacatgtctatgtgcacataattgcataaattggagcttattataaataatgtcgggactgattcagtcggagcaaatcgatggacggaggccaaggccatttattcactcattacctcgcgcactcattgcccccccccctcccttttcttctcctctcaattggcctccacgtggaaaacaacaaaggatgacttcgacaattggaaacactgaagggtttcagacaaaagttaacaaaccaaactataaaaatcaaattttgccacatttttaaaatttaattccattaaaatattcgtcaaatattatgaaatatttaaaagattgggcacatttttgcgcgtacgcctcagtcaatgagacggacgtcagtcggtcggagggttggcgcgtgcctttcccagcggaaggtgccaaattaaaatgacaacagcagagcactgacaacgattgattttgacaccaaaaaagtcaaaaatttttgaacatatctatttattttgttcatcaaatggggagaagcaatgtgccattggcgtcgtaggcattttgaaattgttaccgtaacgtttttgtgcatggttatgtacagtaatctgccgttgtccagcgctttgtttggttggctgcaagggaagaaaaggggtactgtagcgccgggttggcgccaaatgcgcctaaattcgaattgccatttgaagttacacacgccgcggcacaattggacggtgatctattggaagcggagaaaactggcgaggaattggtacaccattcgtcggccaatcgacgcggcccggacggatgtggccacaagcttaagacggcactcgccgttgtcaaagcgtacggcgcctcgtttaagcattggttggtggcatttatggaactaattaggtgcaaaaatcgcttaattttaggcattggccatggcgaaaaaagaagaaaaccaccaaaaacaaccaaatcattggggaggggagaaaagggcccgaaatggacgaacatttgcgagtaattgaccattgtgcggcaattgcggagcgagaagaataccaggcaggcagcaattgccgtaaattcggcatttttaattgcatttccatagagaggccattttggccatgtgcagcgacgacggcgacaacggcgcggggcccgccccgcacttccgcgtccgcgcgaaatggacgacaaaagtgcactgaagacattgacgcgaatgctgaaaaagcggaagaacaaagcactgtcctctgctgaccattggacaaatatcggcgtaaatccgttaattaattacgatcccgactttcccagccccgccgaagaatgacgtgcaatcctgatcattttctgatgtagcataaattctatgtttaattagtttatttttagttgattcgttggggacgacgcacaattcgcggcattcgaagacccgcaagtaattgtaattaatattagtgatttgcaattgctcctcgaatgatatgccccataaaaacgaaaattttatcttcagaaatcatactttcggacattcctacgaaaaacctaaatattcttattgtaacattttcagtacatggaaaaatattaagccttaaaaaaacaccgacaaaaagcaaaaaatggaaaagtcagcagaaaaaaagggagtaaaaacatacgacgacgaagaataaaacgaggggacgaagaagaagaagaagaggaagaggagggagaagcgacgaacgacgaagagggggacgggggaaggtcatcatcagaaga

SEQ ID NO: 25929 - DNA, 1098 bp, Heterodera glycines
ttttgcacattaattttaagggaataatttttttttggcctttttaggagtaatttaaggggaaaaaaattaattaccaaatattttgggctttaaattattttccataataccccaaattttgtttgttatttttctaacaatctgtatgcaaaatttggtgtagatttacatagggaacaaaagctacacatagaaaagtaaatgttgttctttacattattaagaatgaagagacagtacataaaactgagagaaataaagataaaaagtaaaggtgacagaacgccaatttttttttataattgtccataaaatttatttatcgccgtttttttttcttttttaccatccatgacccgaaccggaagtcacttaatggattttcggcatgaaaccacggcagcacaaacattccattaatttttgctttgctgaagaaactttttcatataaatttcaataaatttttaaaaataggaaattttgcataataaatgattaccagggttaaaaaatgttttgattttgcatattttttctgcgcatatgctacgaagaaaggggctcaaaatagcatttctgcgttaaaatttttttaatttggtgaagtttttagtgcatataaaagcatattttgggggttttcgagaataaatgcatattttgccatttttgcatttttagagcatatttcggtcatttttggcaaattttcataagaaaaatgcaataaaaatgaaaatgcacccctaaggattgacctttttgagaagttcaaaaatatactcttgaaaatcgaaaaattttgaatttttgggagaacttttgaaaaaaaaattgttgatataagaaaaatataattttggttagcatatgataaaaattttaaaaattcgaaattgcatatataaatttagaaaatcaaaatttactccttagctattgttttgatgtttttaagtcaattctgtatttttacataattttagcattttttgagggttaaaagccattttgggtaatttttaagacatattttagtgcatatttgggcatttttcgggtttttagggcatatttgggggatttttagtg

SEQ ID NO: 25930 - DNA, 1049 bp, Heterodera glycines
  unsure (1)..(1049): unsure at all n locations
tttcatttgcccccaaacaatccgcttatgacggnccgaaagaaattcacaaaaattggcaccggaaaaactccatttttttatgggccagcataataaagtaaacccaaaatgtaagggaatttaaattggtcatgtgagatgtttagttttttatttgacccatccgttttctgggaaaaaacttttcgagaaaagctgaaaaattttccaattgcatcagaagcagactcaaattcttcaacaacataatgtaaaaaatattacgcaagaaattatttttacatcctttttagaaatgctgcataaatttttattgtaaatagtcacaaacaaactttttttcactcccaatatctaccagttatcatacaaaaaggcaatagttaagcactgagatataaaaaaatcgtctagaataattatctaaacaatttgtcgggaaagctgtataaattctgggaaaaaacttttcaagaaaagctgaaaaattttcaatcgcatcagaagcagcctcaaattcttcaacaacataatgtaaaaaatattacgcaagaaattatttttagatcctttttagaaatgctgcataaatttttattgtaaatagtcacaaaaaaacttttttttactcccaatatctaccagttatcatacaaaaaggcaatagttaagctttgagatataaaaaaatcgtctagaataattatctcaacaatttgtcgggaaagttgaataaatttcagttgcaataggcatattggcacaatacataaatgtagagcaggctcaaaatagaggaaataccaaagattaaaaaattcgtgtttatggcccactctgctttggctggacataactcgccagagagtggagatagaccctttgttgatacatttgaaaatgtagagctcggctagcgcattcgaataacacaaaatttgttttcatttgcccccaaacaatccgcttatgacgggccgaaagaaattcacaaaaatttggcaccggaaaactccattttttatgggcagcataataagtaaacc

SEQ ID NO: 25931 - DNA, 972 bp, Heterodera glycines
  unsure (1)..(972): unsure at all n locations
ttttttttttgggggcagtcccccagacccgatgcccacatatttttggggaagctgttttccttcgggaaaagtttccctaataccctgtactttaatttggcgtggattttttgctccccataattgttagagtaccccaaacggacacttgaaaaaatttttttttttgttttcggggcagtccccccgaaccgatgcgcacagatttatggggagaccgaatccttcgggaatagcttccctatagcctgtactttaattctgcgttggatttttgctccccataattgtttgagtaccccaaacggacacttgaaaaaatcgatttttttgttttcggggcagtccccccgaaccgatgcgcccagatttatggggagaccgaatccttccggaatagcttccctatagcctgtactttaattctgcgttggatttttgctccccataattgtttgagtaccccaaacggacacttgaaaaaatcgatttttttgttttcggggcagtccccccgaaccgatgcgcccagatttatggggagaccgaatccttcgggaatagcttccctatagcctgtactttaattctgcgttggatttttgctccccataattgtttgagtaccccaaacggacacttgaaaaaatcgatttttttgttttcggggcagtccccccgaaccgatgcgcccagatttatggggagaccgaatccttccggaatagcttccctatagcctgtactttaattctgcgttggatttttgctccccataattgtttgagtaccccaaacggacacttgaaaaaatcgatttttttgttttcggggcagtccccccgaaccgatgcgcccagatttatggggagaccgaatccttcgggaatagcttccctatagcctgtactttaattctgcgttggatttttgctcccccataaatgtttgagtaccccanaacggaca

SEQ ID NO: 25932 - DNA, 1624 bp, Heterodera glycines
  unsure (1)..(1624): unsure at all n locations
aataaaagtcccgatttttatacgcaaacacaaaaaagaaagtgttttcctactatttagagcatggagaagccaggaaaaaaatgcatttgcagttttttgtagccctggttatttcccttttgttattagtctgtctctacacggatttgattttctaatgttatgcaaaaagaaatttattcgtcgaaagaaagaaagacataagtttacctcagttaatatcaaaaaaatcaggttacagaattcattagaaagaaaattctctcctcttaagagttagtaattgtaaacggacgagttggttctcgctatcattcgcttccgtgagaatgtgcacgttgcccatattggccaatatcaaagccacaagcaaaaagcgacttcggtcgtaatcattgggcagttccgataacatctgaaaactgtcttctcattgtcctttcactgacaatgaatcctttccaatccaccttagtgaaatccaattcagaaccaatttcccccccaaagcgctccagcagttcgtctccatatgcgccagtgcaaaagtcacggtgcaaatgttcctgttccagcacctccgtcatcctcatctcccacttctgaaggtgctcactgnaacgtggaagttgcttgctcagaggcagtccaataccttaaaataaaaagtcaaattaaaggaaggcattgccaacgtgacttgcgaagatggaaggcgatgatttcgtcgtagtccatttgggagattggacgaggaggcaaatcatccgcgtttagttaccttccgcgaaaaatgtgtcatcgtaaaaattgttctacgaacgaccaattgaattattaaatgcataattaaataaagaatgaatgacctttgtggcgagggattttgcccgtttcctttgaacggtgtttaaatgctgtaaaattgcataatcaatctagagacgcttccactgtttttttacatcaaaaccagcatataaattctgcatgcggccgatcgaattctccaaatcctccacctcgagaaggtcacccaaattctgatgctcactctgctcaaattcgtcgtcccaaacctcatcttgcggtactgataacaaaattatcccgaataaaatgctttaacgcacagttaattatctcttccgcaaccaattcgtccatcggatcgtcaaaatcatcaatcacttcgtcgttttgaacttcaccatttggtgcaacgaaatcttcgtctaacaattgattcgcaaagataaaaaggcggtttgatggggactgactttgttcggcctgcccctctccgtccgtttgttcctcgtcactcccaacatgatgctccaacaccgggtcaatttcccggttttgcatcacacgacgcattgctcgctcggcacgttcggcattctattttcattgaaaaataaagtaacattaggaacagcacttggtattctttacgacgccttttctttaattccgaacgacgcttttcctcttcgtggattaacgggttaaggacgagcacagccttaaaaggcgtacaaatgactgacactccgaactcattaaatgcttgaaagtactgtacttgatctgcgataaatgaattaaaaagtcc

SEQ ID NO: 25933 - DNA, 1449 bp, Heterodera glycines
ttttgaccttaatctcatcataaggaaaaagctgaatatccctaccagatacaggcagttgtcacgctatgaacagcactcactcattcattttctcttacacatctgtactatctcgcacctatctctaactgttctcttccgtccattgaccatctctgaccttctcttacacatctgtactctctaatctctctctgactgctctcttccacatctgtactctctctccagtccacggactgctctcttccgtctctacactctctcacccgtatcttacacatctgtactctctcaccagtccacggactgctcccttccgtttctacactctctcagccgtctcttacacatctgtactctctcttcagtctctgcactctctcacccgtctcttatgcatatgtactctctaatctgatctctgagagagagatagaaagaggagagaaaggaaaagagaaaaagagaagagggagaaagaaagagaggagagaagggagagagagagagaagaggagggagagaagaggagagagagagaaagaaaaaaggagagacaagaggagagagatagaaaagaggagagagagaaagaaagagaggagaagagagagagaaaagagtagggagtgaagaggagagagatagaaagacgagagagagagagagaaaagaggagagagggaagagagagagaaagaaagagaggaggagagagagagagaagaggagggagagaagaggagagagagaaagaaaaaaggagagacaagaggagagagatagaaaagaggagggagagaaagaaagagaggaagagagagagagaaaagaggagggaggagggagtgaagaggagagagatagaaagaggagagagagaggaagagagagagatagaaagaggagagtgagaaagaaagagaggaggagagagagagaaaggagagagagagaaagaaaagaggagggagagaagaggagagagatagaaaagaggagggagagaaagaaagagaggagagaagggagagaaaagaggagggagtgaagaggagagagatagaaagaggagagagagagagagaggaagaggagagagatagaaaagaggaggaagagagagagagagagaaaaagaggagagggagaaagaaaaagaggtgagagagggagagaagaggagagagatagaaaagaggagagagagagagagaaaagaggaaggagagagaaaagaggagggagagaagaggagagagagagaaagaaaaaaggaaacagaggaagagagagagagaaagaaaagaggagaaagaaagaaaagacgcgcgagagacagaaagaaaaaaggcgagagagaaaagaggcgggagagcagaggacagagcgagaaagaaaaaaggagagagatcgaaagaggagagacagagagaagaggag

SEQ ID NO: 25934 - DNA, 1518 bp, Heterodera glycines
gaaacttaattgaccgaaacacggtgagatttgacgagaaacccaaaaaacgcacgcctccccaatttagtcattgtggagtggttggctgaccaaggggccccaacacaaatttttttcgccggtgacacgggcctttgtgccgacgaagaagcgatcggaaaaccgaagctgagtccatgcaatgttgaagcgaaataccacgacggaacaaaatgcacccttcttggaaaaggggaagctgagttcgaattcggagggataatccgaaaagggcaattttacgtctccaagagagggtcattgaatttgttcggcatcgaaatgttggatgcttttggcctcatggacgacgtcagaaagaaagtggccatgacattgaatgtgaataatgtcaaaaaggaagagtctgttgttgatgaaacactgagcagactcagggcgaagttccctaatgtcttttcgacaaatttgggccactgtaaaaaggcaaaagcgcgcctttccttaatggctgacgcaaagccagtgtattgcaggccacgtccggttccttacaacaccaagttggttgttgaagctgaattggaccgtcttttggctgcaaatgtcatccgtcctgttgaccacactcggtgggcagcaccaatcgtggttgtcaaaaaggcagctggttcggcacgtgtatgtgctgatttttcaacgggtcttaacaatgttttgctgtcgaatcagcacccgttgccagtgcctgaggacatttttgcgacactaaacggaggacatgttttctctcagatcgatttccgtgatgcgtatcatcaaatcgaattggaagaaggatcaaaagagttgtgtacgatcgcaacgcaccgtggtaattttgagtaccagcggttgccattcggagtgaagtccgctcctggcatttttcaatccattatggattcgatgttggcagattgtccatttgccattgcttatttagatgatgtcattattgtgagccggactcggaaggaacattggactcatttggcagaagttttcaaaagaattgacaattttggcttttggatcaagccagagaagtgttccttcggcaaggaacgaatcaaattcctcggattcatcattgataaggatggccgaaggcccgactcaaccaaaattgaggcaatccgaaggatgcccattccaaccaatgtgtccactctccgatcatttttgggaatggttaaccactaccaacaattcgtaaagaatttgcggttcattcgccacgttggacgaccttttgaagcaggacacggtctggaattggtccagcgaatgtcagaaagcctttgatcaggtcattggcacgcttcagtcggaccaactgctcacacattatgacccatcacaagaaataattgtgtccgctgatgcctctgagcatggtatcggagcagttatttcccatcgttatgcggatggaagcatcaaggccatcgcgcatgcgtcgcattcgttggc

SEQ ID NO: 25935 - DNA, 1118 bp, Heterodera glycines
gctttttttttcaataaatggaggggaataaaatttttaattcctttttaactttgggaaaaagtttcaaacgaacttttgaaaaaatcgattttttgtttcataaatattttttcagaaagtcatgcgcacccgtccgatctggcaagttaagcaacgattgctgactagccaaaaggttcggtgccgtgatgaaacgaaccagcactgcttaccccgcggcacccggcacggtcccccgaaggaatggatttaattaaattctctccttcggggatttttttccattaggtcgtccgttagcgttcgattgctctagtcaatttttcaaaatttttgttgaaatatttgtcgtgctctgaagggcgtgggagggggggggggcgaaggcccaccacgaggccgcgaagaggccgagtgagtaccttcggtgcaggaaaattattaaattttaaaattttttaattgctttttaaatatgccaaaaaatgtaggcttaacttttttagtgaaaattcgatcactcatattttttgctaattgagcagaagcgtaccaaactttgcagggatactccccggtaaaggactaacttacactgaaatgagcgccgagctagctggctcaaaaaaatttttcgaaaatctgagtctttcgtttttatttatttgcaaaattaattcataaatattttttcagaaagggttctgaaacgcaccaaattttatttacatgttagtttaggcactctgatgctttttctatcaataatggaggtgaataaaattttaattgctttttaactttgggaaaaagtttaggcttaactttttagtgaaagtttgatcactcatatttttttagtctaatctactcaaaacggttcagaattcaataaaaataacattcacggtgcgaaaaatggggtttgacaagtttattggggaaaaaaagactttacaaaataatacccctgggagaagggagtgggaaacatgatttcaaaatttttgttgaaatatttgtcgtgctctgaagggcgtgggaggggggggggcgaaggcccaccacgaggccgcgaagaggccgagtgagtaccttcggtgcaggaaaattat

SEQ ID NO: 25936 - DNA, 1001 bp, Heterodera glycines
cttctttaaagtagcgccatgttttttataatatttaattggatttatttagaaccaatcggctaacagtgggccattgacttgcgcagcgtctgctgtgttgttccacgcccatgggtctcatcaccagcaaagtcaccatgtccaccagcaagggcattctccccgacatgctaactctccccactcgtccatgtccccgcaaatggccgctgtggctattgggcctcctcctcccaatccggcgtattgtccccccaattcttcatcgccacaacatagacaacaacaacaattcgcccatcatcatcagatataccatgccctaaatcaaaaccaggcaaaatggctaggattgtattttgactcattagcattttttagacacccattcccaactctcaagttcctttgaccaattctgtggtcggctttgaagtgacggcaaacaacgaaaatgccattcaacaaaacgctgatcaattttattgctcttcgggtcaaaccttgttttagtaccaatataatatcatcaatcacataatatttcattgcaggcacttcgcatcaacgctatccgtccgaactcgactccatccctgcgccatttttcgacgcagccacaacaaaggctcctgttttcaaatacgtttccggtgtcactgaattctccaaagtatacaaccatgcttttgattaattaattgaccctctaattgttaggcatacaatcgtccgttcatttccgacaaaccaatgccattgcattggtgctcggccaattactatgagttcgaccggagcattggcgaaatgttccaggccgtcgccgattgtcctcgcatttttgtggacggtggtttggacagcactgacattgcccgcttctgtttgggtccgttgacaaacacagagagaacccacgcatcagaaaagtgcaggtgaaagtcaagaatcatataataaatatgaatgaacattaagtaaataatcctactttt

SEQ ID NO: 25937 - DNA, 1681 bp, Heterodera glycines
  unsure (1)..(1681): unsure at all n locations
gtgaacgaaatatctgattttattggaatcaccatttctgttatattttgacattgggaaattgaaatctgaaattctttatggttttcaagtaaaaaaggcagcatttttttgaaacgcattaaaaacaataataagtgctctaatttttaattttaatttatttagtttgactatatatttttaagttttaaaattctcattttgttcgcttattttcagtgttcctattcccacccttctccaagtccctcccccttttcttcacctgctgctgatttgagtatttatgtgcgtttgccaccctttgctgtcggtcgcgcatttgttggacgagggaaggcaaattcgattcgatttcactcggcgcgtattgccttaggatttgattttcgccctccaaaagtgaaacctgcgaaaacagaggataaattcgaaatgaatgaacaattaaaaaaaaactttgtcctccaattcgacgatggtcgaccgcaaaagtttcatttctttgcgcacagccaaagtcaactgagtcttcaccaagtcctgtaatttccttagtttcgtggcatattgctgagttttgaatgctcaatgtaaaaatgggaccaaagcttgttcaattttgttgtcaattggagacggataagcgatggacgaagaaccaattgcacttgaggaagaatcaaggacagaatttctggaaccgaaatcaaaattgggagtctctgacaatcatttgttaatgcctaataccgttgcgtcaaataatccgagtccaaagcaattggcacaaccgaatgggacggtgaaatgtcaaagtttgatatggctgaactggcaggaaagttggacttcggcacccgctgctggtgaaaaaaggaattagacaagctaagaaaaatttataaaaaatcagaaaaataaaaaaacctaaaggaatttaaaaaaaaattaaattaaaaaagttaattgcctgttcaaagggaccgacgtgttgctgaggtgcgacggcggaagttgaggcattttgctgttggttcgtttgaaggacaaccgcggggaattgggctgtcaatggtaacgcaatgaattttatgacaaagaatgttcctatcgtttcccttttcccccttttgctcaccgttctgtcgcatcgtttgctgctgatggcacggctcgccataatttcgcccgtcagcgtcaatggtcaaagtgagtccaacagaatgggcagaatcgatgctgaagtgaagaaattccaaaaaagtgcagttagtgccaaaaaacgaaagcgaggtttgtgatttaaaaattggccgagttaagtctcaaacggaccccggccaaatccaatcccaaattaataaggaccagaagacacctgggacagggcctgggttaaaactaattggccttcgcctgacctctccgagtgtttgaaattctccaatgttcctttgttatcatttcgcgcgcgtttgatgagctgaaaataactcaatattnaaaagcaataaaaatgccgaaaatactccgtttgataaataatattttttgatttcgcgctattccccgtccgttcctcaatttttcctaaacttgntcgccgcatttttactggggacagcggcaagcacagacggtgatacngtctgtaacgcatgcgcgaagatttcgt

SEQ ID NO: 25938 - DNA, 1424 bp, Heterodera glycines
tcatctgctgcctgatcacactgatcagagccatcaccctttggaggccatgcgccggggggggggaggagggcgcaaattggtagcacctccgtcctccgccgcgggcgggggaccgccgcgccgcgcggaggtgtgagagttggtaagtgacagtgagacttttcttttgtgtgtcccactcattagcgggtccaaccggcgggagaaatggaatgggtggggacagtaacagcaggacaatacgggggagggggaggagtgggacgagaatttcgtcaagagtggcctcctccttctcctcctcctctactggctgtggtgagcggtgggagaagtgaaccaagtgagagagtgtgagagacaggagcagcaaccggacgaatttttttaaactgttttttctagcgaaataattttaaaaaattgattttttaaaattttttacttaaaaatttgtaaaaaaaatgaaataaatgcgttttgaaaaacctaagcctttttactaaaaaaagcatttataaatttagaaaattctctgttttttatgtgcggattctcgcctctcggtttcccgactcgggatcctttcccagtcttgactttaggctaaaaaaaaaaattttaaatcattatacagtgaaaactctaggtgagctggaaaaaacaacataaatctctctcctgctgaagttggaaattttttaaaacatttaccaaacgcatctatctcattaaagttttgcaaaattggttttaaaattcttaaatttggccatttttaggggccaaatcaattaacgcaagtgaaaaattcaaaaaattttcttccaaaaaataatggcttatggctgaaaacgatcacaaccagcggataaaaatggcccaattcggcaactcattaggacataattaagagagagcccattagcatcagcaggtggtggaaaatgatcttcggcagggcttaaccaattttgaaggttaactccctgctgctggggatgatgacgaattgaatgaatgaattgttagcagcaaaagaagcggaaaagaaaataaattggtgggtttctgctggctgctggggggtgggcacataatttccattcgaattcacttccccgtcccctggggggaaagacacgcgcaaatattgaaagatgaaaggcgggggctgggggaagtgaatgggggggggggtaaggggatgtataaaggcgattgtagaaggaattggaagcgctaaaattgtttgaggagctttttgagcgtaattacgatttttacttagatcatttttttaaggcttagatcacatgcgattttcggcactctgataattttagcgctcataatgggatgtataaaggcgattgtagaaaggattggaagcgctaaattgtttgagaagctttttgagc

SEQ ID NO: 25939 - DNA, 1486 bp, Heterodera glycines
  unsure (1)..(1486): unsure at all n locations
catttttggccccggatcatataaagtatctttgcataatgcacaatggttaagtcctgatcaggccaattgttccttgtattaccaaaacaagacgttctgtggtgtagtaacattatttggtgctctcattttttggcgccggatcttataaagtatctttgcataatgcacaatggttatgtcctgatcaggccaattgttccttgtattaccaaaacaagacgttctgtggtgtagtaacattatttggtgctctcattttttggcgccggatcttataaagtatctttgcataatgcacaatggttatgtcctgatcaggccaattgttccttgtattaccaaaacaagacgttctgtggtgtagtaacattatttggtgctctcattttttggcgccggatcttataaagtatctttgcataatgcacaatggttatgtcctaatcaggccaattgttccttgtattaccaaaacaagacgttctgtggtgtagtaacattatttggtgctctcattttttggcgccggatcttataaagtatctttgcataatgcacaatgcttaagtcctgatcaggccaattgttccttgtattaccaaaacaagacgttctgtggtgtagtaacattatttggtgctctcattttttggcgccggatcttataaagtatctttgcataatgcacaatgcttaagtcctgatcaggccaattgttccttgtattaccaaaacaagacgttctgtggtgtagtaacattatttggtgctctcattttttggcgccggatcttataaagtatctttgcataatgcacaatggttatgtcctgatcaggccaattgttccttgtattaccaaaacaagacgttctgtggtgtagtaacattatttggtgctctcattttttggcgccggatcttataaagtatctttgcataatgcacaaagggttatgtcctgatcagttcatacgatccttcaattaccgatacaagacacaaatggggggtattaaagtcaatatttatgtttctacaactttttttaactacttgaattttattacaatctttagtgaatgtatcgattaacacaaaataattatatattcctcttcttaaataacaagcanttaactatatagacaatcatgtgtactaaaacatttcatctgaccaagttcaggctgatgtgagcaaatcctccgaaaaaaaccgaatgaattattattgtctacgtattaatattgttatttttggtacccattatctcattacttttttataacttagttaatttttgtcattttgattacaagtatgctgtcactagtcactatcatcttattttttaacattcagtattctactaaacgtcaatttgtcaacgctggtctattccccattcgtacaaactgctattgacccaatctgacgaggtttcaccacaaaacagtataattttctattccaatac

SEQ ID NO: 25940 - DNA, 1576 bp, Heterodera glycines
tgaggccgcgaagcggccaaatgttcccacagaattaaaaaacgggcgcgaagcgcccgtcctgaggcagcgaagcggccgaatgttctcaacaaaattaaaagacgggcgcgaagcgcccgtcttgaggccgcgaagcggccgaatgtcccccaaaaaattaaaaaacgggcgcgaagcgcccgtcttgaggccgcgaagcggccaaatgttcccacaaaattaaaaaacgggcgcgaagcgcccgtcctgaggccgcgaagcggccgaatgttctcaacaaaattaaaaaacgggcgcgaagcgcccgtcttgaggccgcgaagcggccgaatgttccaataaaattaaaaaacgggcgcgaagcgcccgtcctgaggccgcgaagcggccgaatgtcccccaaacaattaaaaaacgggcgctaagcgcccgtcctgactgaggccgcgaagcggccaatgatctcaacaaaattaaaaaacgggcgcgaagcgcccgtcctgaggccccgaagcggccgaatgcttcccacgaaattaaaaacgggcactaagcgcccgttctgaggctgcgaggaattactaaattacttcatttttatcgacgcggcgaagccgcgtcccatagccgacgcggacaagccgagtcccataatgcgatgctagcgacgcggcgaagccgcgtccctgagcgcgaagcgctttctcacagcaccaaaaacaaaactgttcacaccattgccaactgtgcaccctagttatatatatatagagaaaaagggggtttcgtcttaaaaactaatttgagtcgaacggctgtcgggaggggtctgaaagtggtggaagggtcttacaactttttgaggcgcatctgggaaaactataggttttccgctccggtggccaactgagtcccggcggctaatttctcacttttgcttgcgtttgaaggcccgtaactttttttctaaaactctaatcaaaaagtctttgctggtaggaaactaagttgaagtgttttctaatttttaaaaaaaattccaggcctctacctatacttggaagggctgcagaaattggcaacttttcagtaccaactttttccagttcagtccccgttgaataactcattaggctttgacctgagcgcagggtggccagcggacttattgtagagctcggtgagctcgatttttccaaatttaaaaatttcgaaaattttcaaaatttttcgagctaggcctaaaaaacggttttcgggtttttgaattttaagaatttttaacgaattttcccagaaaaacgaagaccacttccaaaacatagtttttcgagctctatcgactggtattttttttggaaaaatttcgattttttcccggaaatagaaaaaatttttggcctgagcgggacatttgagtcccgggcccataactcgtcaggagttggttttagccaaaaatcgtcttagaacatttttgtagagaatttaagctctatcgaacggtgtgctatatgcccggaaaattcaaaaatttcgagctaggccccctagaattttcagaatttttttt

SEQ ID NO: 25941 - DNA, 1476 bp, Heterodera glycines
  unsure (1)..(1476): unsure at all n locations
atttttgcactttccaaattacgccacattttcccctcctagtacttaccctttttgcttggtagtgctgttcgacatcgaaaattttcgagacttaaggtcgagaattgacctcgaaactgagacgcgtcactgagactcgagaccgtcactctcgaacatcacactatagtttcgagccgaattttaagttttagaaaatttgtaaatgtaaaaatggaataatttctgggaaaatataaaatgtcgggggccttgttttcgaaaattctcaggaattcgggtcccaaaaaattcggctcaaaaattgcacattactaaatattgtagaataagaaattttttgtttgattatccaatatagattttcagctttttttgtttgtttgtttttccctgaaaatttaagtttgcccaacgggcgcccccgcgttgggcccatgctcgcctggttactgcgttggtaataatactgaaaccatcccccaaatggaggtgcaattggatttaaatgattgatgaattttcgcatttttgaaaaaaaggaagcctccgtataaaaattacggtatatctcaaaaggtcgctggacaatttttggaccataaaatctatggccaaaatggccagaaaaaaaaaatcattttggctctgaattttcttgtagatgaacgaaatttttttcaaattttcaagtcaataaatagtttgacaagcgcttccgagcagtaccaagaatttttaagttactgtccaaaaactcgttcggcggtgttttgtaatgaatttcatgaaaatccaagattgaaatttatgaaaatcaatccaattacatcctccctggcctattgatttcctatcctaaaaattgttcagcgccgttgcaatgcgcaggtgcgttgtgttgcgcaccaccttctccagtgatggcaccacctccgcccatcgcctgttaaatttgaaatttattttgttttattttttaaataactattttttattttccctttattttcatttttgaatattcaaattcggcattaactaacactgaaggttcttttcgttatccagttggccatatattttttaagagctcagcagcaatttttcaaccattatccaaacaaaacaatttttttaaaattatttcaataatcattttaagatgcttgtcctggtgggttgcctgcacttggcccatgcattggagggcgctgtgccgcaccaggtaatatttaaatttaaagccaaaccgttaatttggatttaataattaattaaattagcaatctgtgcctcgccgtccaatgtttgttgtgctcaaccgtcagtcccgacagccatacctgcaacgggtgggctaagacaaatttgatttttgttatttgacatatacatgtaccttnaatgcgtcatcgggggaaaattgattttattgagtacttaagaaatcgcccgcccaaattgcgtaaa

SEQ ID NO: 25942 - DNA, 248 bp, Heterodera glycines
  unsure (1)..(248): unsure at all n locations
tgttcattcggcagcgcatcaggaagacaaattgttcaaagaggggagaattgagggntttcaatttatgttttacttccggagcccaaaaagatggatttggatttcaatttcttaaaatttagttaaaaatcgttttgcgatccgtattttttcgaccaatactggttttcacggattacgggttatttagcccgtaagcccagttcaggcccgtatctaggggaggggggaatgttattttgaaa

SEQ ID NO: 25943 - DNA, 928 bp, Heterodera glycines
aattaagtgaatttgccctcctcccgcttaaataattaattaatgcatttttaaaatatttaatttgccacagtgtcttttattcctccgttttggccactttcccttttttcggcccgacttcgtcccgcgtgacattccgccccgaatatgtccctccgccaccgtttggtccgctgaacgcgttcgacgcgattacaccgaacatttgcattatttgcgcgttcggttgcgccaaataaagaaagcccatcgcaaaaagtggcaacttcagaataaaacaaaaccgaaaaatgtctctttttttggcttagaatcaaccaaatcgaagtgtgcaagcaaatttcggaatggtacggcgaattgaaaatgcaccgccgcattattttggaccaatggagggcacttctgcggcaaaaagtgtgcaatttaatcagaaatgggtttgatagaaaaatttagtatttatttataagtgaaataatcgggggtccccaaaactaatgaaatccgtaaaacccaatctgatggcctttttttgatttcttcgcacacttttacggccttcattttttctaaaatttctggagaagtgaggggtaaatgccagaaaaaattttgaaaatttgagtgtaatttattacaagggaaccatccgaactgtaactaactgctcaaatcgctatgatcagaaaaaatgattaaaatttttaaatttttaagaatttataaaataaattccaaactcatgctagaaataattaaaaaaaatttaaatgaacagcgaaaattttctatcaaataatgtcaaaatttaactctaaaataatggttcatcattttgttaagacacaagctgtttgattaccatgtttggtccgcaccaaaaggaggaatttgaagcgaacaatgcgcttaccgtcgtggg

SEQ ID NO: 25944 - DNA, 1091 bp, Heterodera glycines
  unsure (1)..(1091): unsure at all n locations
tgtcatttctttttataatgcgtatataattaggctannttgattttatcagcaaattccgaaattagcttgggaatgggcccttttgaggccaaccttttttatgaatgttgtcccattttactttgtggtctgcggcctatggacgcttcagagccatttacgccttcttttcaatattcgtatgtaaaaacgactatctctttttttcggaacacttttttgaaaattttttccggaagagattttgtgacacgcaatataactaacattcgagtcttctgtcatttcctttttataatgcgtatataatttaggctatttgattttatcagcaaattccgaaattagcttgggaatgggcccttttgaggccaacctttttttatgaatgttgtcccattttacgttgtggtctgcggcctatggacgcttcagagccatttacgccttcttttcaatattcgtatgtaaaaacgactatctctttttttcggaacacttttttgaaaattttttccggaagagattttgtgacacgcaatataactaacattcgagtcttctgtcatttcctttttataatgcgtatataatttaggctatttgattttatcagcaaattccgaaattagcttgggaatgggcccttttgaggccaaccttttttatgaatgttgtcccattttacgttgtggtctgcggcctatggatgcttcagagccatttacgccttcttttcaatattcgtatgtaaaaacgactatctctttttttcggaacacttttttgaaaattttttccggaagagattttgtgacacgcaatataactaacattcgagtcttctgtcatttcctttttataatgcgtatataatttaggctatttgattttatcagcaaattccgaaattagcttgggaatgggcccttttgaggccaacctttttttatgaatggtgtcccattttacgttgtggtctgcggcctatggatgcttcagagccatttacgccttctttttcatattcgtatgtaaaaacgactatctctttttttcggaacacttttttgaaaattttttccgga

SEQ ID NO: 25945 - DNA, 906 bp, Heterodera glycines
ctgttaacacatcgcattgaaaattacaaaatttttcccggcggcgcctatcggcaccgccggccccccgtgcgccccaaaagttttttgggaaaagcgccgcaaaaaaatcaacttcggttttcatgcttagaatttcacaaaatgtttatttcgaacaaaaaattgctcaaattgatcatggacaatcaaaaatataacatttgaacattttaaacgtgttttgaataaatttgtgaaaatgaggctttttgacccaaaatgaggcttttttgcttgccaaatgaggcttttgaaaattttcatctgcgaaccctggtgatgctcgactcgagaaaagtttcgggttttttgggtctcggggtcgagtctcgggaaatttttgggtctcgagcatcactagtgtgtaagtcagtggattaggtcgttttggcgccagcctttttttttgcactgtaactctttttttttctttgtcaaccaaatctaacaattttgggtcggggtcggtttagtacgggtggttttagtacgagcgcaagtatttggctataacttttttactcttgccaacaagatccatcattatcacgatacctcgataccactcacgtgccctctattcacctgaaaaatttgtccaataatctgtaatagtcgtcaaaaaatgtgatgtacattactaacacaaatgactcatatcttcttacgacaattatctatctcgtaaccccgatgataatccgttccacagatactcttcaaaattattccattaccgcaagagctcgcgtaaattgtgaaataattctcagaaaaatggctatctctttttatgacaattttctatctcgtaaccccgatgctaatccgttccgcagagcctcttcaaaatattttccatta

SEQ ID NO: 25946 - DNA, 2851 bp, Heterodera glycines
  unsure (1)..(2851): unsure at all n locations
tctcggccccatccgccgattgtcactcagtcgtcatcccccccaaatggtttccctctcatcactgatgtcttccaaaactcgttgaccgaatgtctccgacactcttcgtccacaccgaatgtaaagactgaattgccctttcatagtccaatggacaacgccagcaaaggcagcacaacaaatgcgatgccaaatggtattgaaactggcgagaaatggcattcattcactgttcgagagtctcgagcatttaaggcactcaaataaagttgcttcatcaaaagcataattgtgttttcttcaattgtccatttacagccaatcttttgaacatgtccctctccacggaccatctccgttttgcgcagtattcatccgtctctcaaaagagtccatcttcgatcgaacttcttcaacgtgccctggaggcttttgcggtagccaatcagtccaaatttgccaacagttcggcccattcggcaccgtccattgtcggcagccctttgatccctccgcctcttgcgcacagccaatcgcaacaattggccactaatggcgcaacagcagcagcaaccacaatgagcagtgtggagcaacagctggtcagaaaagggagggcattcattcagtaatcacagggggcaaatggcacattaggccagaagcagccaattagtgatgatttcgccttgagcatcgtcctccctgccccccgagggggctgctcagtaaatttgacaccggaaaaattggtttttaaaaattccatgaaatattttccgaatgaaaattataataatcagtcattcgtcggtgccaatcgaaccacgcgaagaaatttctgtttcggtgaccattccggagttgctctcctccctcaattcggcttttgccaaatgacttttgaagttcaattgccggggcggggaatgcttccgatttggccattcatctgcattttttagctgtctctgctcaacttttcccagctgagcagcaaaaatggcaacactttgtgctcctttgctcctcacaatttgctttcttccgatggcttttgcctttcctccgcgacgataacggcgacaacgacaacggcaccaacaatagtttctgaagcgacgcagcaaaataatgccatcgtcgacaaagtcaacgaacaaacggacgaagcattggcaaactccgcctccgcagctgctgacccatcggtgccgattgatctttcctccaaccaacagcagtcgcttctcctctcatccgcccccaatttggcaccgccctccgtccctcgggggcgcaaaagttgcgacattcgccgttcggcttcctccgtttcgtacaaaggaaacgcggatgtgcatgaacatttccaagtctgtggctgcttttggctgtttgcccccaatggactctaatttcagaggacattcagtggaaaatggccgcgtcgacagccatcgctgcgggcgcatttgcaggcgagcggaagggcatcggttgggaagaaggaagcggcactttgcattggagaaaatgaggcggagggaagcggaacagtgcggacggaagagccaatggaagaggaggaggaggagggcgaaagcgccgcacggaacggcgcggaacggacgaacgccgggggaaaaacgggggaaaagggacggcccaagagccggcagcaggtgaagagcgtgtacacagcagtgatccgcaagttgttcaccagcaacgaagtgaaccaaggtgaggcgagaggagaggcaggccaaaacatttggccaaacacagccaaaagcattgggaaaagggccaactcaatccagccaaactttggccccaagattttgttattattggttcaaattagggttgcagccggggggatcccaggtcaaaccggggaacggggagagcaggcatgaactgaaccaaaaggacaaaacccagaaacggngactcataaatcggaaagcggggattcccttatggggaaacggtgatgaaaaaatttcgaattttactgtgaataaaaattttttctttataattgcacatttaacgtagcgcacccgttctaagaatttattttttaaaccgacgggtaccgaaagcggtgggggtcggtatagtctggccgtactgtatcaactcgaaaactttcttacataaaattagcagccctagtaataaataatccctttcncaaaaaggttctaaaataatgtaaaatgacatgaaagaagaatttgatgaaaatcattgaattattaaaatatttgaaaattttattataattttattttttcataaattttcgacttccggtttccgacgttttggagttggaattccgatttccgaacaatttttggtgcctcggaatgccatccctgctatcagcctgggctttagtttcgctttcacctttttgaagtgaaagattttcacatcaccaatgaatggcattttttgttggggaaaggtaaaaaagttcgtataactttaaatatattttaatttacaaatgtttttgtgttacatgtgaatttttcatttgtatccatgtagtcatgggttcaattccggttgatgtttcttcacttttttcaaattttattttctttgatatttaatcacataaattcatttattgctcccattagcctttgggaaaggcttttttcttttttattataatataaaataaaattttcatttattttcttgaaattgtgtatgtcctcaaatgtcgggaatatccgcaaatgtcgggtccttaaaagtcaggtcctcaaatttcgggtcctcaaatgtcaaatcctcaaatgtcaaatcctcaaatgtc

SEQ ID NO: 25947 - DNA, 1137 bp, Heterodera glycines
  unsure (1)..(1137): unsure at all n locations
aaagttgtatccaattcccggtagggatttaatagtgactttcagagatagccatttttgtctagacntatttttcgtgcgtttcaaacacactattagtgtttattcagcgctacaacagaagacaaaagttgtatccaattcccggtagggatttaatagtgactttcagagatagccattttttgtcaagaactatttttcgtgcgttttcaaacacactattagtgctttaatcaccgctacaatagaagacaaaagttggtgtccaattcccggtagggatttaatagtgactttcagagatagccattttttgtcaataactatttttcgtgcgttttcaaacacactattagtgctttattcagcgctacaacagaagacaaaagttggtgtccaattcccggtagggatttaatagtgactttcagagatagccattttttgtcaagaactatttttcgtgcgttttcaaacacactattagtgctttattcaccgctacaatagaagacaaaagttggtgtccaattcccggtagggatttaatagtgactttcagagatagccattttttgtcaagaactatttttcgtgcgttttcaaacacactattagtgttttattcagcgctacaacagaagacaaaagttgtgtccaattcccggtagggatttaatagtgactttcagagatagccattttttgtctagaactatttttcgtgcgttttcaaacacactattagtgttttattcagcgctacaacagaagacaaaagttgtgtccaattcccggtagggatttaatagtgactttcagagatagccattttttgtctagaactatttttcgtgcgttttcaaacacactattagtgctttattcaccgctacaatagaagacaaaagttggtgtccaattcccggtagggatttaatagtgactttcagagatagccatttttagtcaataactatttttcgtgcgttttcaaacacactattagtgctttattcagcgctacaacaaaagacaaaagttggtgtccaattcccggtagggatttaatagtgactttcaaagatagccattttttgtcataactatttttcgtgcgttttcaacacacta

SEQ ID NO: 25948 - DNA, 920 bp, Heterodera glycines
aaaagtttgtttttaagcaaatcctattgctgtcaataataaaaaaaacttattaaaaataaatgaggactccagcagagaataaataataataaggaaatggatgaatgaatgggagaatgccaagcgtgaggaaaagggagacacatttacggaccggtcaaggggcagaggagagagacaatggaagagagagatacggggaaatacaatcgcttggggtggttccttttcctaaaaaaattttacaaaaaaatctatcttttttctgggaattgaaaattttttagaagatttaattttatatgtacacaaatcaatcgatattccaccagtgaaaaaaatttatatttgaattctgtaattaagaacttcgtcatatgtggtcatgagatatcacatattcttgcgaactgtttaaatttatttggatttgagctggaccatgtgcgattatttttaattgggcactctattgtaaaatattaatttggatttaacgactcatacaaaaacacgggaaaacgaccttaggttctgtaggcattgctttaaactcctttggcttaaaactgcatttagagttaagtttaaaaccaaagaaaaaagaggaatctttgtcatttaagcactggggtgagctgggtgaaaatggcacatcaatatttaaattaataaaagtattaataatagaaattattcaccttcccagtctcctttctcttctccctttatcatcctttttctttattttctttctttcattctgacattttttttctcattctctctctatttctgtctcttctctttctcatcttctcattcgcttttatcttctaatattttcttagcaaatatagaaaaaaaaatttgggggaagaatttttgtgaaatttttccaattctttaggggtgta

SEQ ID NO: 25949 - DNA, 797 bp, Heterodera glycines
tttcgctgctcttcattcaaacactccgtcgattggacgacttaattaggaatatcggattagtgctttcagtggggttaattaaattataaggcagtctgtttcaccttttccacttttggttggcctcaacttcaccccaacattggtcttcttctcggaatattctttctgatgctcatgccgcgacttttgctttgtctcgaacattagccgaatgtctgcaccaaaaatgggcaattcgtacagctcatcgaacaacttcttcacatcatccgccctaatctcagttggctcattggaatcttccccagttgcattgtcaatgagttccttctgtattcggtagagacgaagagattccttaaatctcagtttagcattaatccagtttaatcagttcgttcgtttattcaattgtttttccgttctgactcgaagtccctccagtttgtcctcatataggatctcatgcactgtccctttgcattctgcaaccattcgaaaattcaaaatttttgaaattcttacttttggtcctaaattgatctaaataagctaaaatttagtcaaaaaccattgaaacatcgaaaaatggtcattgtgtacaggcaagaacataaaagtgaattttgaattttcgattttttgttcgaattcgggtccgggattcgaaattggtcaaaatgaatgtcagattcttgatcaacgaccctaaaaaccccataaaacgtgttttcacgactttttagaacaaaaaaacttttccaaaaagggggggccatcggcagtattac

SEQ ID NO: 25950 - DNA, 1592 bp, Heterodera glycines
aaaaaaaatttcgaaaacgaaaaagtcatgaaaaccgaagcgaaaatatacattttaaaacaggaaatacaatggaacatattgacggaccaaaaaacaagaaaattaaactaaaaaaatgccgaaaagtgagagacgaaacgaaaacgacacgaaatttcgcatacttttcggttgaatggaccccgagaataaaatatcaaatgaattggatgaaatgaaaaaataaaaatataaaaattaaagaaaaaagacaaagacaaatcaatttgttgaaaaaggagtctgttcatcaaacaaaagcatcaaaatgaatagataaaaaaatattcaatattttcattaatttgtgctaaatttgcaaaaaaaaaaatcaaaatgataagcaccgcaaaaagaaacaattaaaaatataaatgagttaaatatatttttaaaaatttcatttagcaatgtttggataaattagacctaaaaccatgtcgtgatcagggttcatatatatgtctgttttggttttttcctaattttttcagataaatatcggcgtgggaagaggatcggtgcgcgattttccgggattagtcccactggatcccgtcctgcaaaattttcaatcatattaccgcgctgagaccagcaaatttcaaattaccgatgtaaattttaaatctttaactttgttaatttacataatacagtatgttaagtgttttttttttctttatcttattttttattttatttaaacttgaaaaactttaatttacaataaattttcggcataaattttgattttttttttttgcctgtggccaatggccttctatgaaatccatcaaattaatccgcattgcactttttttctgctcatatgtgtatgtatcattcatagatcatttttaaattttctcatatgtatcagtcacggattgattatgctcaaatgttgttgcttcttaaccaatttaataatgcctcatttgttagtcattacaaaatgaatcgctgatgcagcagcaatgttggaaaatttcacatttcaacaccctattaattgccttacaaataaatatttaaaattttgtaccaaacaaattattgccagatgtttattacatattagcatttcacgaatttacaaaaatttacctatccctttccgtccatccatccgtttttcccatctttgtgctgctgctgtgtccccactttatttatgtgtattatcagtccatcccatctgccttggccaggccgtgttgtcctcaacccatccccaccccacacacttaagcatttttcccctttagcccccatcgattggcctcccccccccctccgggctaagcagcagcataaaactgacgactgactgactaaactcagactgctgctggccttgccgccgtcgtcagtcatataagcacaatgatctctcacacattacgctgtttctctgcgcttcatcttcagcccatgctctcgcaatggcactctgcttctctgggcttcatgttagcccatgctctttcaatggaactctgtttctctgggcttcatgttagcccatgctctttcaatggaactct

SEQ ID NO: 25951 - DNA, 1089 bp, Heterodera glycines
attacgccgatactaatggtctggaatttgtttctctgcgcgtttgtttgggaaaaatttggaaaattggctatctcttttctgctcaacagtaataggaattccaaccgcattctcagaataattacgccgatactaattgttctggaatttgtttctctgcgcgtttgtttgggaaaaatttggaaaattggctatctctttttctgctcaacagtaataggaattccaaccgcattctcagaataattacgccgatactaattgttctggaatttgtttctcggcgcgtttgtttgggaaaaatttggaaaattggctatctctttttctgctcaacagtaataggaattccaaccgcattctcagaataattacgccgatactaattgttctggaatttgtttctctgcgcgtttgtttgggaaaaatttggaaaattggctatctctttttctgctcaacagtaataggaattccaactgcattctcagaataattacgccgatactaattgttctggaatttgtttctcggcgcgtttgtttgggaaaaatttggaaaattggctatctctttttctgctcaacagtaataggaattccaaccgcattctcagaataattacgccgatactaattgttctggaatttgtttctctgcgcgtttgtttgtgaaaaatttggaaaattggctatctctttttctgctcaacagtaataggaattccaactgcattctcagaataattacgccgatactaattgttctggaatttgtttctcggcgcgtttgtttgggaaaaatttggaaaattggctatctctttttctgctcaacagtaataggaattccaaccgcattctcagaataattacgccgatactaattgttctggaatttgtttctcggcgcgtttgtttgggaaaaatttggaaaattggctatctctttttctgctcaacagtaataggaattccaaccgcattctcagaataattacgccgatactaattgttctggaatttgtttctcggcgcgtttgttgggaaaaattggaaaattggctatctctttttctgctcaaca

SEQ ID NO: 25952 - DNA, 1280 bp, Heterodera glycines
  unsure (1)..(1280): unsure at all n locations
gccggtattgtctttaaattttttcaatgccaattgtcctccccgggcttcgttggtttgaacaaatggcagaacggaccttgcagaacgcggnggaaaccaaatgacagcaatgaaactagcaggagaagaagcattagcaaaagcctgatgtttggaaaatttaaatttagataattaattctcgtttatggacattgttgcaccagacatttcgccatataagctaaaatctcacgtttcgcaacccggcatttaaaccaatcattctttacataatgagtccattttccggaatttttctagaaatagttcgattcaaggaatttaaaggtcgggaacttaattttgacatccatgttcacttatttctaagacgaggatttctaagtttttacttatttttccaaaatttattaacaaaaatgcaataaaaacgtaagaagcgacccaaaaaatttcgaaaaatatacccttaagaatcgaacaaaacattttcaggaaaagacccttaagaaatgaaaaattttctttaaaattcaatcaccagaattttttggccgatagtcgtgttgtcttttactcatgaaaattataaaatttcttatttgtaactgcaatcagtgaataaaattgcctgccttaatctgaaattattttcataataaaaagaacaatttaaaaaagtatacccctaaatttgaaagcttttcgtccttattttcgcccttattttggactttttcgcccttaaaaatcctcgcacgattaaagaaagtgacgaaatttcgttgagtgacatcattaattaatgataagtttaccgctttgaagtcagcaattttgaacggccaatccccgtcgtccttattattcctgccccacgagcattcgaaaacctttggcacattgtccggatgggcagtgaacagccatttggccaaagcttggccatccgacgccatggcactgtcatcggccgggaattcgggaaacagatagtcataaaagatattgacaacacgcagtggtggacaatcgcagagaaatgacggcacgaatttgcgcaaacagtgaaaatctttggcaaacaaagtcaggccacaaatgcctttgtcgaccattggccaaaagttgagcgcaattaactcaatgtgtcttgtttttgtaatgtccaaatttattggacaagcggtgaaaagaggacgaaagacggcgaaaaaagcgatgaaattgcccgtcatgaaactaaaaaacgaatgggaaaatgtgtctttttt

SEQ ID NO: 25953 - DNA, 885 bp, Heterodera glycines
ttttccattaaaattgaaaagcgaaaaatagttcaaaagtcttacagagcgaagtgtgcgagtcgaccaaaattcgggagctgaaaatgctcccagatttgccgaagcaaatatctcgggcgaactcattgacaaagcccgggtcgcacagctcattgttgttgaaacggaaatgcaggtagagctgtccgtgtgacatccgtcctttttcactgatcatgtcataattgagagcaagtcgtttttgagtttacaaattagcaaactatccacacttaaattaacatattattacaatttggggaagttaagccccccccccctggctacgccctgatatgtaattgttgttactcgatacggatgaaggaggatatttaaccttgtcgtatcgtcttagggttacggttgtgaacatgggtgcatttcaggtgcattcgtgtactaatatgcacctgctcattcatgtttcattttcatgcttgacttgtctgattatctcaccattcccgtttgtttgaatttgtgtgtccaacaggtcaaacggtggctgatcgttgcaattcgcagtccaagctgagaaataccaatcaaagcgaacacagaaagccaacagtctgcggagaggaagctgaaaaaggaaaacaacaaattttaaattgattaggtaatttgttttaaattacatcgttttttccattttttcctctgctgctgcttgttttgggttgtctgctgatgacattttgttgtggccaattaattaagacaatttgtacagatgataaattagcatagaaaaacttaaaaaaatttatggaaatataaaaatccccatatatatgtgattaaaaaacatttatttgtggtcaagtaaatttttga

SEQ ID NO: 25954 - DNA, 2931 bp, Heterodera glycines
gtatttctttaagaatgtgtgccgtgtgttggacatcgatttcacttctcggcatcgtgctatgatcaatacggatcattccaagagtaaccgacccaaataccagcgatggttccagtggctgctgagcgcaaaatttgcaaagaaaaaatacaaattgcactatgaaacgcggacttatttgatggagttcgatgtgcatcacttgacgggaagcactgcgagtgcttttctggaatatatcgaaaggaatatacccgagggagtggccatgaaagttacatataccgagatgtgctttctgccagaaactattgttaaaacagtgatggataattagttctttgtcgtacatgataaaacattttatgattttcaacagtttgttcatgagctgataaattcatttttcgtaacaatccaatactgattggcatctcgattcacttctgctccgtcctttttcttaagtgtggtggaatatacacatttccgcctccagctgccggagtctcttgcgaagtcggttgcggtgtcgccgctggcctattatcatttgtccaccatttttaaaccggacaattgtgataaatgtgttaaactcactttgacatggttcgccaactgttctgggaatccgctgtgctagtgcttaaataatggatcttcttttaatgattcgcgaattttcaattacattccagtcggtttggttctccaatttgaatccccttcattagacctgaaatttgttgcagattatttactatcagacacttgaaatcggtacttacttggtggcattcgtttgatgagcggcgctaactcccctaagcggcctaaaatttattgttttattctgaatagagtcaaatggcttacttatccttttcttctttcggtacggcccgttgcatgtctctccaatttgaagtcgtgtccgattctgttggccttaactttttgtttttgaaaaattaaacggaattggcccaactccgtgtcctgcaattgtttacgctccttgtccatttgctttcgcgaactctctccatctatcgtacgccgcggcgctttgtaagcgttttccctgaatagttttgttggtaacaaaatatgttcgtcgaagcaccgtttcgtcttctcttccctctccctttcctcctgctgtttccgctcttccaacttcgcccgtctgctgatttcctcctgctccttcagtttctgttcaacttcgggtgccttctcaatggaaggaaacatttcctcgctcttcagtccaattgagtttctttcttcgctttgacacatatttcgcgggttcgctcttcacacgggacgcgtctccttcggtattttccttagtgaaatttgtttaaataaactaccgtcgtttaaccattatcaaagcgatttcgtttttatttaaaattgcttattccaaaaccaacttcgctgttcgttttccaagtcctcgccggttcggcgctcgctcttttctcctcttcttcgcgttcgacgtacgagtcggccatctcttttatcaccacaggtacgttcggcttgtcgtcaaatgccaaccgttcagagtcttcgttgtgctcgttcgcgggtcggcttttgctaatgtcctcaactgacgatttattttcattatcatcgagtctcatctctttgttcctggaacaattaaaaattaaacatcaagcatattcgacctaaatgaatattaaaatttataatttttaaaacgaaaaatgcaatcacgattcagagttaagaactctcttcgaggtgaattcaaaaatgttccgttttgttggcgaaaacgaaaaccgataaaaagcctcgaagatatattcgaaatcgtttattttataccttctcttattttgcgataatttcgaaataaagggtttaaaaaataccatcgctctccgctccaattgcacacttatttcctccaatttgatcactcctttcttttttcctttgctagccttcttcgcgaaaaacgcatccaaatcggtcatttttattgtttaaaaatgctagtgtcgcttttcgcctttttgggtttccaattctttcgttttgccgaaaatagagaattttatgcactgttaagatttgggacagtgtgaaacgattttaaataaagaaaaggtaaacttttggctcttgcacagtttaggcgtcaatgattcctaattttttaggccataatttctccattcttgcaaaagattaaagtttcgggaatttataaatacaacgaaaagagaagagaaaattctgtaattagggaaaataaaaagagaaaaacgaaattcaggttttcgagtaggtatacccaatttccttttgcttatggttccaattttggatgtgagataacagaagaatgacgttgcgaagtaaatactacattattttttcaaaaaagcagacgtgctatgtttttttgctatttaagtgccggtaaagcatcagttcattcattccatttatttttcctcgcatccttacttttcctgctgaaaattttttgatgtctttcaaatgtattgctaaaaatccaatatttcatcgtttgttcttacatgtaatcagtaatacacaaacttctttctttagcaatcagtggcatttcaattaattatattgttcattgtctgtctggtcttacggcgtattatggaagaattggtcgtcacgatgggcccgaacttggatcacaactcacgcgaatttaaggagaacgcaaggaaaatttgtggcaaacgtttggggtggtgcttggatgaccgtcccagtggagaatctgcacataaaaaactcacgtaaataacgccaactgtacagatttactatgactcttcagaaggcgggatgagcaacctcctttttcattgttatcttgatgaaaat

SEQ ID NO: 25955 - DNA, 1354 bp, Heterodera glycines
  unsure (1)..(1354): unsure at all n locations
ccccggcgaaaaatgttgtagtgattaagcggctgttgaagctgatcaaaatggttgttgttgtcgttgtcattgccgcttttgtgcatgtgtgtgcgtcggaatgccgcgctgagcagcggcgagccggcgccaagttgaagctgtaccaggaacaccaggaggagtagcaccaggcaaaccagtgccgagcagggacctgtcatcattgtcagcatgttcaattgggagtacatcatgtcgtgatttgttaataatgttggaggacagaatttattttattagctaaattaaatcaagaattaattgggaagcaatttaaaatgaaaaattatgccattaaatttcaaaattttacaggaaatttctcgataagcattacttctatactcgaggcgccatccccgccccccccccctcctctttaagcaattaagccactcatttataagtgccgtaccactcactaatcggctgatcagcggctaataataccgggcaagaagctttctcgacattgtcaacaaaaatggtttatttctaccgctgatgacatggcataaaatccgggcggaggggggggggggcttatcgtgccactaagcctgctgtggaacgttttggcagcagatttttctgatcggatttgatcgtatttggctttataaatatccccgattttgatttcgtcaccccacgtcattaaattatgacgatttttttgtgagtgtgtgtatcagggatggcacggaattccgatttccgacttccgatttccgacatttttggagtcggaattccgatttccgattttcgaaaaaattttggacgtcggaattccgacttccgatttccgaaatttttaataaaaagtctgaaatgctaaaaatgccataatatttactcacttcgtcaaaagccaaaagggaagtaaaacaattcttattcacaaaaaggtagctgttaattttttaaaaatgcgccaaaaaaaattgacaaaacaccaaaccaaaatttgtgccaagaaaagaatgagtgtattaaattgttatgactagggatgggaattttatgcacgaaaaatgaccaaaatatgcacataaatatgcaaataaaattgccaaatatgcacaaaaatcgcaaaatatgcaccaaatatacacaaaaaaatgaaaaaatgaaaattaggggtgcaaattcaattaaaaaaaattttttccgcataaattttatcggttatttttgcaattgcagatcaaaaatttttcaaggttttcggcagtaaatctcatcctgttgtctgccanaaatattcttataaaaggaaaatgaacgttccacttcgcaggattga

SEQ ID NO: 25956 - DNA, 1442 bp, Heterodera glycines
ccccccccccgcccacgagcgatgtgtttgctcttcggcctcttatttaagtagcgaaattttcaaaaaaaaaaattttttttttttgagggtagattaggccaagtttggaattttttttgtcaatttttgaacagatttagacgaaaaatgagcccttgcaagcgcgcacgcacagaaaaggcaaaggtggagaacatcgaccaagaaatttttttttaattttctaagtcatttctagaagtatgtaatctgatgcactgagacctcttcttctttttttttttgggggggggtgataatttatctcaaaatctgttcaaaaatcggccaaaaatttcttaactttttccgatggcctaaccctacactcaaaaaaaacttttttttttggaaaatttagctaactaactcaaacaaagttcatgttcttatcccaaaacaaaaaatgaaaatatgggacccccattcttgatgattgccgttttcttaaaattaagaaaaaattcgggaccaatgaattttctccgccattggccacagaaaatttattattgaattactcaatttggaggaaacagaagcgaattttgttgggcatctcgtggcacggaaactgcttatcttttccaccgatctgcaatggaaaaattggtaataaataatattgtggtctcccaatttttcgaaaaaagtcatgtaaaacatcttcccggggttttcgaaaatttgaatgttctatgtttgttcgaattcgggattcgctatttgtcaagcttatgatcagcgacctcgaaaccccaggaaaaggcgttttacacagattaaaaaaaacatttttttttttgaaaaatggggttggagacaaaccaaggtattaccaaaaggtgaggcgctccttcaacatcaattaattttctttcaaagtaaattccttcataaacaaatttttgtttcttgtaaattttgaagcttctccaaattttcaattcgggttgacaatcaaaatgcgtgtcaccaaaacatcgaaacggggcgaaatcagtgccaatttgaagccgagttgaggacgacgaaagaatggcaaaatatccatccaaatgtcgttgcaaatccatttaaaacatggcacttaatggtaggtaatatatagtgccaatggtaccccccccctttttttttgaaaaaatttttctctcgaaataatgatttttagggggttcgcagggccggagactccgattctggcatccattttgaagcataaacaatatttatggtactttttcactttacgccacataaaataatttttaatttttttttctggagttttcggggtcgctgatcatgaatatgacgtgtatttcgaacaattccgaaatccggacccaaactcgaacaaaaaatctaaaattttaattatccaatttctctttttc

SEQ ID NO: 25957 - DNA, 1872 bp, Heterodera glycines
  unsure (1)..(1872): unsure at all n locations
acgtccttgttcagaagcattcaaatgttttcggatttcaaatacattttccaatttgtccaactgatcggaagaaatcgtcgacatggaatttattaaaaacctattaaaaataatttattatttccgaatttgacactaattatactactgtttcaccagtgaaattttctaatatgtatatggaaattaagattaggcaaaatgtctttaatcagggatttttataatttaggtcaattaaaacccaaaataattaatttaaaattcccgaactctaggcaaagcctggtaaagtatggaaccctgttgaataaacagggcagggctgccaactgtaatggtcaaaaatcagcattttggaaattttattccaaatgaaaataaattaaaaaaaaatgtttattgcggcgccgcggaaatttttttgatttacataaatatgccatttttaaggattttttttctcaaaaaacagcaaccagcaaatttcttaaaaattcttcaaaaatcaacatctcaaaaaataaataatcatcattgactccttaaaatcatcaaaatgatgatgaaaagcatcagagttggcagccccctattagaataaatgaatggaattctgctgaaaatgtgggagagagtggcggtcgccttaatcgatttccaccgccgacgtccgcgtggcccgtcgaataataaataaataaatgggtggtcatttgaccgtggtcatttatttgtttgaccctggtcagtcgggaaaggaccgtttgggcgccgccgtttcgacgcgatcccaagtctttgactatattttttttaagtttcaacaaaatctaactatcttagtatcatttgaaagcccttcatctgatctattagccttacaaaaagcaaaaaagcttttctaacctataaaaagttaaactaatcgcaaaacaataacttattgttagaaacagcttccaaacattataagcgctcgaatgataccaattttgttagatttggttgacaatgaaaaaaaattataggccaaaaacttgggctgtcgacgaaacgagcctactctggtcaattgaacggtcagcagaaatttcaacccatgaaaaattttattagttttttgaaaaaaatattttttggaattctttccttatattttcacctttaatttaacaaaaattttaacaaaattggttatatttatttctttgaataatttaattttcaaaatttcgaaacttctcgcaatcccgcgcggaattccgcaaaccaaatttttatgaataaattacaacatgtacacatttatacatttttggtgcttacctataacaccgttaaaaagtgttgagaatagacaaatataaaagtccttggagaaataaaaatgatatgtgtagcaaaaattgttatttaattaccgtaaatccgttatttgaaggcccgggccttctattgttcaacccctctataagtcaaatgtgaattgcctattttttgtacgtctacctatttattcattataaccatttttacattcaaatttcatggtaaatttgtaattttgaataaatttagtttaacaaattttgcttatatcaatttctcaataagatggacccatcaaatgaatgtggcaattcagctaatttagtaacgcctcgtttcttattcaattgttcgaattatgtttacatattaaggtctgttgcttttgcaacaaatccacgtctggtgctcaccattgtcgaaaatgctccaggccttgtcacgccattccaccatgctcactctcaagcgatggtgaagaaggatacggatcgaaggtcntctgtgagggatgcgacctcattggtgacagagaca

SEQ ID NO: 25958 - DNA, 1531 bp, Heterodera glycines
  unsure (1)..(1531): unsure at all n locations
attacttcctgagggacagccatttntggtttatttcaaataatatgtatgtctgaaaataaaaatatgcatttaaaaagaggataaagttggtgtaggtaaattgagatgattaaattggaattaaaaaaaaattatgaatgaatgaaggacgtatacgaacgtatgaatttatatactaaaatttctctggagactcactttggctatgggtcaactccactgtgcagagaaaagcatagtactatctcgtcgtttctctttttctttgtaatttttctcactttggcgtactatctattcattttaattacctatataaaaaacaacatttacttcgtgacgtttacctttttatctacactagcggggaagaattttgccgttttgaaattaatccccggcacttcatccgatcctattgtaggcataatacataaaatccatgccaatacgttgccaaaaagaatacaaatatttaaaaaatgacctaataatgtgaataaatcaaaaatgactcatttctatacgttcattaactttattctttccgcctttccctcccttttttctccaaattcattattttagcttttcacttgaagtgttcaattttattacctgagaaatgtctgccaatgctgaattacagttcgtccgaatcaaaacaaaagcagggtcaacggaggctgaagtgacaattggaaatggacaacccctttcgattctggaggcgattgaacttctgcaaaaaaatttcaccgcatttgaaggcatctcgattaggtaaaaattggacagaaatgaattatgaaaatgaaaatattaagccatttcgatggtgatgtcctcactttgctccatcaccttcattcaaaacttgattgtcaccatgtaaatttggcaatagaaacttataacaccgatttttctgaacaaatattggacaccattttgccgttaatccaaggagttctaaaatctatcaaaatggatgccaaacatattgagaatttgacacaattggccccatcactgctatgtgaatgtcccctgcttcattcaatcgccacgaataaattttcgttggaatttacggccaaagacggtgccccgattgaaggacaagcattggcaaaatggctacacatagcgaacccggaaggactgcccaaaatgatcgacttttgctacaacgctaacggcctttggaccatcaacaagagtgaagaaatgaaagacgtgggttaaaaaatttaaaaatatcgtaatttaattttcataaaatttttggttttaagtctttctaccttgccaaaacgtccgccaatttcattgtccgcctttaccttacgcatgatgaggaagatggaggaccaatcattttcgacattaccaatgcaataacaatggaaaggttaaaaatgagcgaatttgccgaggatcgctttttgctcgtccgttctccgattgatcgcgatgagaacgaatgggccaaatgggagaagaaggccaaagagtggacttcgat

SEQ ID NO: 25959 - DNA, 1187 bp, Heterodera glycines
aatgtggggcgtggcaaatcgatggatggataatgaagcaggttagtgccatgccgtcgatgaatgaatggccatgcaatgccaaaattgggcggggaaaggcgaatttgtggccaaattaaaatgtggggctgtggcaaaatcgatggatgataatgtgatcgctacagtgaggcagattagtgccatgtcgtggatgaatgaatggccacaatgccaaaattgggcgggaaaggcgaatttgtggccaaatccaacaattgagaggccaaatcgatggatggataatgtgactggcctccaaagtgaatttgtcatccccaattagaaattttgcaattgtacgttttttttctaataatcacagttaatctaggtatttctaaaattcgctgaattttgaaaaattaaatatcattattattattaatcaattttaaaattattcgcctcgggggattcaaattcaatgcatggccttttcaaaccgcagaaccaattcaatgataaaaacattttttaataaaagaaaaatttgaaaggattaaaatttgaaaaaaaatggataacgtaaaatggatttattcccgaaatccccccaaaataaatgcacacccaatcggtttctctaatttagtcattagggtgatacaaacttttttcccacatcatcccaaaaaggaaacaaattccaacaatcttggtatcattcgaaactttagatgtttaaaagctttttctaagctattgcttggcgattcgacaattcccaaaaaagttatagcatcaaaattacgaaaaagtcgaaatttttaattttataatcaaaaaagtgaggagattagtgccctgaatgaatatataaatgcatagatcatggcatgtcaattgtcccctaatttctgcatttttaatgaatgccctattttgtccaaattctctaaacttgtttcgcattttttacaccttcaatttacatattaaatataccaatctatacatatgtatttgcaattgttcctcataaaatacatttgatcacttaaaatgtacataatgatcgatcatttcttaattaattaattcatttcttctggcgatcactgttgttgttgttgtcgttgttcttgtgtccgtcactcattttcagaagatgcctcgttgtcgctgctttgtcccgcttcttc

SEQ ID NO: 25960 - DNA, 1121 bp, Heterodera glycines
cgacagtttcgcatgcacgtgaccaagcagtgacacgttacagcagacggaatgatttctggggggaccccgcacgcgtcaacgtctcgatcagtcgtgggaagcacggcctcgttatagtggggaatttgttggaattggcggaggccaccatttggaaccgttttcttaaaaaagccttggaatatactgttgtaacttcgccagaatttgttcagatttcggcacagcggcgttcacattatgttaggggtattttgtcggatgaagatggacttagtgtccaaaactttaagtttcacatggaatggagtccatcgaaaccccaaaaaccccaattccaatctcaagctgtgaatttcccaaatccctccccagtcaggttctttccagcaccgccacttccgtcactacagtccaggcgcgaacaatggccaactccggtccagagcaccagtcaagccaatcgtccggggagcagcagtttttctgagcccaccaacagccaagctgatcagaagcgaccacagcaaatccgatgttggcggtgtgacgaacttgggcacgtttcgagtcaatgccgggcagcattttctccatcaaaaacgaacagacgatgaagtttggggacaaacttgtggaaggatggacgtgtaaagcataattcgattatttccataaccaatttcttttctgctgttgttccgcccctttgccttttcccttcacatttgtctatttaaactgatgactttctacactcaagatcagttggccaaccagtgcattatccgttgaccattatattttaatgctattccaataaagcacttatcattctccgccgatttattattggtccggacgcggacggatttgggcttgggacccgggaggttgggagtccagggcccggattttcacccatcaattcccgcttctctttccttcttccattcctctggcactacctccatggtccttaatgggcatctctcttaaactctgggttggacacccggccgttttactggtatcaccggattccagcgaccctggctatccgttggcaagagaataaaagagcagagatgaggcgagtaaaaaattggaaattaatg

SEQ ID NO: 25961 - DNA, 1815 bp, Heterodera glycines
ctcccttctcccaggggtattattttgtaaagtcttttttcccccaatacacttttcaaaccccatttttcgcaccgtgaatgttatttttatcgaattctgaaccgttttgagtagattagactagaaaaaattgaaaattttgaaatcatgtttcccactcccttctcccaggggtattattttgtaaagtcttttttccccaataaacttttcaaaccccatttttcgcaccgtgaatgttatttttattgcattctgaaccgttttgagtagattagactagaaaaaattgaaaattttgaaatcatgtttcccactcccttctcccaggggtattattttgtaaagtcttttttcccccaataaacttgtcaaaccccatttttcgcaccgtgaatgttatttttattgaattctgaaccgttttgagtagattagactagaaaaaattgaaaattttgaaatcatgtttcccactcccttctcccaggggtattattttgtaaagtctttttttccccaataaacttttcaaaccccatttttcgcaccgtgaatgttatttttatcgaattctgaaccgttttgagtagattagactagaaaaaattgaaaattttgaaatcatgtttcccactcccttctcccaggggagtagtataggacccctaaacctcgcgggtatctcgcgggtgtttcccgcacgagcccgtgcctatgggaggggtgcagccctttgaagttgccgcccgctcacatcctgagcctatgggattttctttgaactctgccgccttggggatttccccaaattgttgcgggtgtttttttcacccgcgccgcgggaaggtcatcaatcatccacctgtcaccaaaagtgacaggtgaaggaaattcaattttttctttgccaattaattcctttttgatcccaaaccttttggggtattttctcaaatcctgaatttttttatgatgggttctctaatcctgaaattaaaaattaatttttcgaaaatgtgccaaaacagtgcgggtttttttttgcatttcctcccctccctccccgcgccacgatgccgccgccgcgcgaagtaatcgataacaaaataaaaacccaacagaactataaatttcgggaccgtctcaataaataaaaatttttatcgtctcattaaattcttttgagccattttcaaataagggagaatatgatgatacatttcctcaatttcagaattgtttttagttcccgtaattacgactttaccggtccagaaaattaacgctgtcatgcttttaccccgcttgaaatttaaaccgcaaaatatttccggttcataaaatgcacgacgattttttcgaaactcgttcagttcaatttcacgtccgaatttaaaggtcgaaacaatattttcaaccgtgtgtccggtgtaagaagcccccggacaccccgagcccttaattatttctataaaatttttaatagcattttcacagtctatcagacttttcgtccccagacatatcattttcccggattcccataataatgccgtggctttgatggggcttgcacatttgataaccgcggcattgaattttctagggttatacttaaattcacactcggtgatcgtcagagagtttagtttaattccggtaccgagattagcgagagcaattatatttacgattatcggtttttgcatttttgatacaatgtaccaatcaaatggtccttccactccttttatataccccttctataaatagcaacccaaaataaaattaaattgaaaaaatgaactg

SEQ ID NO: 25962 - DNA, 615 bp, Heterodera glycines
cccgggtgtctctttcttctccgaatcgtttcgttcatttcgctttgcttttcctttttctccgttcgttcccttttctttctttgtttatcccccaatccttcgcaccttccgtcactttttgtccgctttttttgcaacttccattctctcagaccattcaccgaatgaaacccatcaaataaatcagcggatggacgccgattccttcccctcttttttgctcaatcggctggcaaatgcgcaacccccggggacgggtgaaggctaaaccaataaaataaaatttaaaaggcgacattcgccgcccccggcggggggggggggggagaacaccgcggacagaacgaccgatcggcggcggtggcggcggtgtttatcgtccatcgccacacaaatttttgtacaatttgccaaattacaacaaaaaaaaaatcacgaaattttgttttttcttcttgttcttcttttcatttttccgaatcaactgctgctcattacatccaatggggtttggctgcctattcctcttttctttctcatctctttctcttcctttcccccccccctctctctgaatctctcacccactcatcccttcactatctctctccc

SEQ ID NO: 25963 - DNA, 732 bp, Heterodera glycines
aggcacacgaaaagccgaagggtttgccttggcactttgtgtgtctctgtgctcacttttcattttttagctttcgagtccccccccccccctccctacaatatgtgcactgtctcctcccccctctctttccggccaattcattgacctttcccccacccaactcggcggtggttcctccccccgggcgtcgtcgaactcatccatcaaatgctgccacaaaatgtcgccatactctccgccaccgccgccgccgttcacacaaaacgaatggtctcaaccataaaattggcgctgaattgggacgtcaaatcatttcccttttctttttttggtgtgtgttgtgtgaacagaattatcacctcctctctctcccctattaaaggtatcaccccaaaagcgtcgctttgtcattgtgtcaattcgtccgtttgtccgtccgtccgttcgtttgctgtctctttgcgtgtccgtccgttcattgtcaccaataatttgccaccaaagcattcattcccacacattgtgccgcccaaacagagaaaacacgtggaaatgggcggggaggcgcgggaaatggatacccatcggcaccggggggagggcaagggactgcattggcattgccacgcttttacatgccatgccatgccatgctatttgcctttgcctcatttggttcatcattttcatcttcgcccatcccaatcggcccacccacacatttgttgt

SEQ ID NO: 25964 - DNA, 1255 bp, Heterodera glycines
ttgaaatactggtgggttgagtcccggcgattgccttttggtgggttgagtcccagtgattgaatgctggtggattgagtcccgttgattggaatgttggtggattgagtcccagtgattgaaatgttggtgggttgagtcccagtgattggaatgctggtgggttgagtcccaggtattgaaatactggtgggttgagtccaggcgattggaatgttggtgggttgagtcccagtgattgaatgctggtggattgagtcccgttgattggaatgttggtggattgagtcccagtgattgaaatgttggtgggttgagtcccgctgattggaatgttggtcgttattgagtcccagagacttgaatgctgttgttttgaatccctatgattggatgatagtgtcatgacacccggttatgataatgaggttgtttcatcattaagaaaaatgatgctggtgtttatcgtcccagacaacattcaaattccaggccatttgcgcacccaacattaaaatccatgcaattttcctctcatacaacattcaaattccaggccatttgcgcacccaacattaaaatccatgccattttcctctcatacaacattcaaattccaggccatttgcgcacccaacattaaaatccatgccattttcctctcatacaacattcaaattccaggccatttgcgcacccaacattaaaatccatgccattttcctctcatacaacattcaaattccaggccatttgcgcacccaacattaaaatccatgccattttcctctcatacaacattcaaattccaggccatttgcgcacccaacattaaaatccatgccattttcctctcatacaacattcaaattccaggccatttgcgcacccaacattaaaatccatgccattttcctctcatacaacattcaaattccaggccatttgcgcacccaacattaaaatccatgccattttcctctcatacaacattcaaattccaggccatttgcgcacccaacattaaaatccatgccattttcctctcatacaacattcaaattccaggccatttgcgcacccaacattaaaatccatgccattttcctctcatacaacattcaaattccaggccatttgcgcacccaacattaaaatccatgccattttcctctcatacaacattcaaattccaggccatttgcgcacccaacattaaaatccatgccattttcctctcatacaacatgcaaat

SEQ ID NO: 25965 - DNA, 1870 bp, Heterodera glycines
attttatagaaaaattgaaaaatttttaaaaaattacttttgaaaaatattgttttatcgttaaactcagtttcaagtatcaaattaatttgaatttcgccattggtttacatcggattttacagtcgaacgatttattaattttattgtggcctcttaaaaatttcagatttttttagaatttttgtgggaaaaataaattaattccaaaattttcctggcaccggatcaattactccattaaaaatttgcaaaattaacttctaaaaatcctcaaaaaaattgtcattatggaattgtatttcaaaatttgttggattttaaattcatacgaaaaagtcagtgaatttcattgtcgccacattatcactggttacggtcacatccatttgcattacggtagcgcccactgaaattttggttacaaaactctcactatccctaccgtacccaaaggcttactgtttttggttggttccggtatgtcatgcagcaaataaaagctaaattgggtggactttccatcaagcaatttgatgcgaactttcaaatttgaattttcactccatggtgcgtaactgtagtaggatacggtagtgtctggctcaccctaaaaattaataatacaaattaccaaactgtaatatatatatttttttaccagctcttgtcttggaaacacatgtggatcttctaataaggcgtaatggccggtgagctaaaaaataaatttcaataaatttaaatttacattatttcactatcgtattcttataatagcttcgcccaacaattattttattttaatatataatatttatttatttttaaattagcacacaatatttaaataattttcatttaattaccaaatatcttttaattacctgtgatttagtattacataattcaaattgaaatttacagcttctagaagtttaaatttaatacttatttaaaattttattgtatatattagttcaattgcatacaaaattttttgaattttagaatatttgaaaaaattaagatttaactagatttctacaaaattcaaattggatttctgactttgtttaaaaatttacagacttcctgttttaattttaaacatgctaaaatttaaaaattatttataaattttatagaaattcaaaataatattttcaacacattttaattatctatctaccaaatatttaagttattttaattttaataattcaattaccaataatttattatgctcattaaacttcagtccgccccaccactgctggggaaaatatccgcgcttgctttgacttcgcaatgtaattttgtagctgtactgttgtatccaaatttgcagatcaaattcaaaagtttgatttggaaattcaaaatcgtgattaaacgtttcattttctttggattgactaaattttttaattggttttaattaatttgttaattttattctcgatactttttcatgtagacttctaccgattcatcggtaatcaaaaaatgagcactcagctgttcaaaatctaaacaaattttcaaatttgaatacgaaaaattataaaatttattaaattgtaactcgcatcaattttttggcattttgaaaaatttggcacattttttttctgtccatttggcgggtccgataatttttctgatcactgatcggagaaattattttttcggacaatgttttctaaaaaagtttaaagcttttgccacaaaaaatataatttaaagacaaattgttttagtcgaaatcgacataaaaatgtcaaaatgcaaaaatccggatttcggatatttccagtaattctggggagcataaaccattttttttattttgtttacctttttttcc

SEQ ID NO: 25966 - DNA, 1642 bp, Heterodera glycines
  unsure (1)..(1642): unsure at all n locations
atattttaatatanagcggacaaccatttaaaccgatggctccaaaatcaaaattacgaaaaaattttcccaatcccctagggattttttcggaactcgaacagccacacaaatggacgaccgaattcagcgactttctgcttaaatgtctcgtcaaaaaagtggacgaacggtggggcgcttcacaattgctaatggtcagtctttggaatgggaaaaggaaagagccaggaaataaacagtttaatattttacctattgtaaacagtcataggaaggaaaatgttgtagcaccatcagatttttccgggtgcactacgttccccccccccccccggccacttatttgactctcgacactcatttctctttcgacttcaccactcatttctctctcgatttcatatgcttgatcagatttcataaacctgatgaaatgtaagcatctttgaattcaaaaccgatttaaaattattttccaaatttaggtgcgttaacattaaacatattttggtggtaatactatactattgtatatgaaaactgttttcggtcaagtacaaagattaccagttgatcagatttttattgctttaaattttcaaaaattttggttctcaaaaatagaagtgccaattaatatgtagcattgattgacttactttttcatgtcctttggcttgtatgttccctttttgaacagttccaacgccaacttaaaaaatcgataattgcgttgttttctattcattgtatttcttttattgagtctatttacattataataataccagctttttcttatcttgtttaatttttattttgcattttttgtttttacacccccccccccccaataaaaagaaagaaaccgaaaatttcagacatatattaattaacaaagcctgatgcgaggaaataacatgtaaatcagcgactccaacttttttttgttgcttttctcagcattacacaccatcccgaaaatgagttatattttaattgaaaacgaaaaacaaaaacttttggcttttcgaatttttgttctagttcggtgcctaaatggatatcagacgcgggttctccaaccctaaaaacctctaaaccaactttaactcgaaaaaggagttataccctaaaacctgacttggcgcctgcattccatcgtcagaaataataacatttagccttctgctattttttaaaaatcattatttactcatgcaatttcaggttattatcaaaagcaacttaatgaatagacgaataattgctcagcaaaaaaggcgacagcaagaacgcaaatttgacgaaagtcttgaaagggcgcggatgagaaggggaagaaaatcgacccgcgcaaggacctgtgtccacgaagccactcatggatggatattatggaaaacaaaagattgtagcgacacattcgaaatggtaagaggtcggaagaaaataaacaaacggtcataaccattgttaacgaaattcttaccccaaaaaatcaggctggaattttaacgatgacatttttagtttttacacattttttggtgcgctttaaaaaaatgggacgacactaggaaaaattgtatttggcgcctataggcaccgtcggacccactcccctccccgttcctta

SEQ ID NO: 25967 - DNA, 2405 bp, Heterodera glycines
  unsure (1)..(2405): unsure at all n locations
gaaaaagcaaaagttactttgctcatgttcaattatcgattattcatctttacatttgtccattctctcgtccgttccttccccctccacattgtttatttaaaggctggactcttccccccatgttcacttcttctcctgtcttcaatttttatttttattcattattctctccaccgaccattcgccatttttattatttattattattgtctcttcgtaaataaatatttgttggtcttattcactcggacaaagacacaacaaattcaaaaatgcaagttttcttgaacatttttggtcttaactagggccgggatttctagtaaaaacttctttctttttttttgctcaattgttttggagaaaggagctcaaaaaacgcatttctgcgttaaaatttttttatttgaacgtcatttttcgtcactataaagcactattatagcgtttcgtcacttaaaatagtgaaattcactattttggcgttttgtcactatttttcactatttcgaatttgacggccgttgaaatgctgataagtgaagaagaaggcttggctgggctcgtgcgcaactttgacaatgctgttctctccaccaaagtaaaagcattgctaatgtgtgtggacgcgatgcactgctggccaacgagacgatggaaacgatttgcgaatgctttgagcgattgaaggccatttgtgagcgttatggccacatttttatctactgggccgtgccgccgtacattcactcacgaaaagctcaatttctcgaactcgttcgacgcttggccaaactctgtgacgacactaatattcggttcggagctgtgacggaagaagcctcatggaagtgtttcgttacggaggaaagaacgcgggaaaatcgagtgaaccagtcgggactcttgactgacacggagcgaaaacaatgatggcctggatttacgaagttgggaagtttcctggtgagaaggaattgggccgcccgcgaccgcgttctgaagttgtgcgacctggtgctagtacttctgaagagcgccgccgtcccaacattagccgcgggtttggtcttgtcgaccaccgtcggcacaacttttctcgtccatctcttcaaacgtctaatcgtgaaggacaccagcaggaatggcgtggacgcgaccgctcggaatgggcttcggcgtcttggcgacgtcgtggttctgatcagtttcgtagctctcgacgtggacaacagtgatctctgctcatccgccacccaaagcctttttgactctgccgaattgcctatttttgatttattttgatctcttgacttttcattctcaacagggacgttgatatttcaaaggggggggtgtgatatttggataattatttaaattagtgctatattgtgtggcattttgtctcttttaatttagttattttcttttctcagtttttggaccattatgttttatgtttttggttgtcttctcatcttctcattaattttattgttttgtgctaaatataatttggattctatttttggccaccaattgactgagtttggaattttggaaagtcgaaccaaaagtgaattgttttcaaaaggagtcgaattatccctaattgctttccattgacattgccgcaccgacatctcatttcgcaccagaaaagtacgacatggcgctcctggacaagggtgagcagagtttgttcgattaatttctattaatttggtggtgcaacaacaattcggggactattagcaattgtccacaccacaaattcgacagagaaataaaggagtcatcaattgacgcgcctgttactcattcttgtagaagagtaacaaaccatcaaaaaaactacaaaatcgccatcgtcccatcgcccaacatttgtgcactttcttgtagaagtgtacaagaaaaagcagcagcaagcattcttgtagaaacttgcaaattcttctcttctcttcacaatggaaaacagtcgtcggtatatgacacgacaggagttgcgtcgtctgttagacaatggagttgcagtcgaaattgaggacaacgagataaacgtcgcacatcagcaaggattgcgcacaaattggacggattacgcggcggaaaacttcgaagcgtcgccgaattttcaaccagccgccgtttttatggaaaatcatcggcgcgaaatagcttttagctcacttcgggtcccaattcgaacttcgagtcccaataatcagaaccgggaccccgttgcaccaccggctcagaattttgttctccaaaacatgctccctcgccgtttagacaacgacactctttcatttggcggcgaggagggtggagtggaccaacacacgagaacgaactgcttggactttccgtgatggncgtggccggactga

SEQ ID NO: 25968 - DNA, 1960 bp, Heterodera glycines
actcgagtagattctcgaggttttcaagtgcttgaccttcggtactttagtccaaaaacacacattttaattaaaaatcactaaattaagagcatgtttttcaaataacatttgcgaaatgtaaaaaatttttccgagactcgtggtcaaaatcaggcctgtaaatagaaacaaaaaaaaaaaaaaattaagtggacggaggggggaaagaaattttttctcaaaggctcttaattttttaaggtgtaatttcaaaattaaagagccaagggcgaaacaaacatttctttaactttgtgcattgttgggtaaaattgtgaatgttgccgggtttgataaaaatttctttttaatttttcaaccccccccccatcagttacattggccaagattctctcgattaaacaacgatcaagaaacagtagtaatttcttgtttgataatctcaatcacctccttttcatggtgcaaaaacactgtccgtttgtccggactgatgttcacgtccaaagtgtgcggtggcacgtcgacgaacagcaccaagcaacaaaatctgccacggttgaactgcgcgtacacctcgtttgcaatgcggcacagctgaatgaacacaccaccacatacactttgcaatgcttaaaccgagcaaaagattttttttggtttttcccccgaaatgatgatgtgtatcgaacgtctcaatttggaaatgcaaccacccaactctttagtctcaagccggagggtgcagcactcttcccaccgtccggataagcaccgcccccggggtttttttttaagttacaggaaaattgtttgaagttttttagcgattttttggtaaaatttttcgataagtaatttattataaaataatataaaaaattttttttttttgtttttttgaaacttataaataaactcgaattgtaagatttttctttatacgttctccaacttcggtttttaaaattttttgggtgtgggggaaaaaccgtgtcccgacatttgcgcctttgtccaaaatctggttcaaaactaagttttttcaatcactgatcgcataaattgctttaaataagcgattaaaagtgattgtacccgatcatttgatcttcaaaaaatttttgaaaaaataataaaattttcaaacaaaaaattattaatcataatgaaccataaaaccgtgttttcttaattttaatgcttattaggctatcaggggttgaaaaaattcaactttgagtccgattttggacataggcgcaaattccggggccgcaaatgtcggggctccggaaaaacaatacggcggtgaacgggggggggggggaagcgaggtgcttcttcccaaaacggaatttattccaactttgtttgtattatactagtaaaagtttggtgccacaaactgtacaaccttggggaaatcaacatggcgttggtttacaaagacaaattgtcggtcagcactgctccgcccatggcgcgccaagcagctgctcacgtagccggatagccttgaaaaattggggggaatgatcagcagcagtgatcagacccagtaaagcccgaaaacagcagaaaaataatttagagaggagaattcgaagacttttttccaatttgacccctaaaaaaattgtgcaatttttcaaaattttagagtcaggcagaaagaaaaaaattactttttagtaggttttcgacaaaaaaataacccattctgcattcttgagtcaaattttgaaatcctaaatttttacagcaaattgtaacaaaaaaaatttcagtttcaggaggaaggcctggacaacaaatcacaccgaatttccgcaaaaattttctcccgctgttccgtcgttgtcgtcggcactccgtacaattggaggcactcatcgcgtggcaccccaacgtctcgtccaacgacaacatttgacccgcgccattgcttttgcca

SEQ ID NO: 25969 - DNA, 1078 bp, Heterodera glycines
ttcgccggtgccatgcgcaacacaatgggaaacatgcgcacttgccagccgctgaactctccgtcgccaaaacggtctccgaccaaccgccgccatttggccgtccgtcggcagttcagagccgtccaaaaccggcacaatgaccacagttttggcacaactaaaaacgaacaaatggacgggaatacaattgactgatgaaaattttctcaaaaatctcaagaattgcatattccgttctccatgctcatcatttttatggaaattgttgaaaatttttttcatgaaattttctgttattaaattgggaggaaacggcgggaggggggggcgtaatacatccatttttgtcttaaataaaagtaacaaacccgtggctttcgtcgttgtcctgccgtgccaagggctgcactcggttggtggccgcccacaacatacgcatcactaaatcgacactttgtccaaagttggccaccccattggcccgaattgtcgtcagctgctcaatgaccgcctttggactctcttcccaaccggactaaacaagaaacaaaatgccattattaaaagaaacgtttagctgcaaaaatacgccaaattccgcgttttttttgtttgtagttttttggctctattacactttaggcgtccattcaatgaccacctccaattcctttggcaataacgttttaaaagaaaagccctaaatatatttgaaaaaagctaaatctctcgttttcccattgaaaatttaatttcagtatttgctcctttcttgagttattactgaaacttttgctttcgattgacacgaaggaagtaaaatctcaccaagtaagaaaaaagttatggccaatgaaaacaaaaatggtcattgaatggacgcaaaaagtcaaatagacgcctaaatgtggttgaaccattttgtgtacagtaaaatgcagagtcccagcggaagcaaaacaattgtacacatgaacatgaacaccttgacattggaggggaactgctcaaaaggcgtcagaagaaagcggtcattgacggaggatgggtcgtcgcgattgcgttgctaaaaatt

SEQ ID NO: 25970 - DNA, 1380 bp, Heterodera glycines
ttttggcaaattaattaaggaaagccaatcagctacggtagactctattacagtatagcaatgtttgatgaaagacccatttgaagagatatatctattttagagtgttgatctctgatctgaagtttttcaatttcctaattagtttttattgcattttttctaaaaatttttcccagattgacccaagaactcgaaaaacttttgtcctaattttgaaaaaaacaggagtttgagcattttcagctgagattgatcacctgatcctgatcagaatctgctcaatgccaatcattcgtctcaacagtgtgtcctcttccatctgttcagccggcacattgtttggtggtgtttgattttgtggtggttgttgttgttgctgcttttttgttgttgtaccaccggcacaaccaccatcattttgtggagcatttgtgttgccataaatgggagtggggaaggacgacgaagaagtagagaaagaggaagtgccaccaacattgttgctggacatgaagccggcggaagtgccgccactaatgctttgagcatttggcctcatgccaaaatgcgacgaatttgtgccattggcgccggtaaaatgtttttgctgttgcgcttggtgttgttgctgttgccataaatggtgttgctgctgagcttgcatgttgttgctggtgttgttgttatagttgggatagccaccggcgaagttggcaccgtttggcccagccaaagggccgagcttcaaggccggaatttggatcgacaaaggtttggtggaagaagccgaagcaccagcggaataggcagcggatgcatgggcaggagcaccgccaatataagccggcgtaaaagcaccggcagaggacgagccggcaccacctccggcataatccggggtataggcacccgtagaggacaagccgacacctccggcatactccggggtataggcagacggtcgggcaccacaaaaataggcaggggtaatggcaccggcagaggatgagccgccggccggaatcaggtaagctgagctgctggggccggagaaagacgaggacggcatcgatgccgaagtcgtcgacaacattgcggactcgcatgggttggccccgtcactgctgtccgtcatcggactctgtttggactgttgctgctgatgcttctggcgcggctgtctgtccgatgggtagcgacgcgtccgttttgtgtacccaatggggtcccggttttgttgtattgctgaaaagttgggagagggggtggcaatggttgaaaaatgccataattctaattcccagtgccggaccaaaatcacaaaacagccctatggaaaatcagattaagtttaaattaaaatttgtgtcttttaaa

SEQ ID NO: 25971 - DNA, 1961 bp, Heterodera glycines
tttttatttaggagtatgaagaatggctcaaagaattttcatgcttgtttttttgtgtgtcacttacatcaaatttgtttttggtttggctatgcttttctgcttatcacgacataaacacgtaaaacgaacttattcgattaggatggaaaatttaaaaaaccaacaaattttaaaaatctttaaatttgaaattgtgaaaaaaccgcaacaaattttacagtcttaacttttatgaaaccaattctgtcgtttgttagaattagagaacaatttaagctgtctaatagtgatgctcgagagtctcggtttcgagtctagacacgagaaaagtcccgtgttttttttgatctcggtttcgagttttaagtctaggtcttcaagactttcgagaccgagacttttttacaccccctaatggttggcttttggtaaacttaaatttttttttaatggttttaaagcgaataagaaacttttttgaaaaaagtcccggggttttcggtctcgggctcgagtctcggtctcgagtctcgtgaaatttttggtctcgagcatcactactgcctaatgacactaaatttgttgaatttttgtttccaagaaatgtcgacaatttttttccatttaaacacatttaaaaaagttataaatttgaacgaataattaaattaaattaatattattttttaaatgaaaagcatggttatgtgcacaccttctgacatcagtgggaaaggactcttctacacaatttcgtttaaccgatcaatgataatgcacattctattgatcattattaacaatacaattgttctggttttaaaattcaaaaaaggtaaagtaaaataaatatttgaatatttcttaattaatttattgtcttaattaaatttacggtttgttcatatgttcagaaaatcagcatttctcgaaaagcattttccgctcattgctcttcctcgtctttttggaaacaattggatggctcccgtcaatttattttgcccaatttttaaaaaccgcaaaattttcaccaattacgaccacttatatcagtgctgggttcacaaccatttcaacatgcattacgtcatcggcaaatggaccgacactttattattttaggtaaaaaactttcaaattttaaagttaattaaattgcattggaaaattagtattaaataaaaaaatttaatttaattagaaaaaactaataataattaaaaattaaatttaattgaaattaataataactaaaaagtaaatttaattgtgaaattagtaataattattcgttgattattagaaattcaaaataaatttaaaattttacttttttaagtcttttatatcgcgaggaaattaatgggtttttggaaagcattggaatcaaaaagtccatcagcacgcaacaccaacaacacataaatacaatgccattaaatgttgtgacaagacataacaattggactcaccattagaagagagtcgggtcgtttcggcgccagcccaagtttttggactactttattcattgttaatctaatccaaacaataaagcctattgttgtatgcatttcttggggattttaaagtccgccacattgacgtttcgtaaaatccgacaccatggacatttcgtaaatacgccagagggcatttcgtaaaaacgccttaggatcgtatcaacgacacgatgataccgagtttgcagctcatcattttgtaggctaatagagaactcttagactattgattcatatcaagaattaaaaatttaatgagcaattatttgtttaaaattttcatttgttggtttttatataactacctagcacaaaatggtgctgggtcgatacttaaaaaccatcataatgggcgatacttaaaaaaccatcataatgggcgatacttaaaaaaccatcataatgggcgatacttaaaaaaccatcataatg

SEQ ID NO: 25972 - DNA, 781 bp, Heterodera glycines
aaatccaagtccagagcctggacctggcttttcctagttctttgtccagaaaaaatccaggtcaggcttttttcagaatgcccaactctaataagcaacactcttttaaaacatcaaattaatatttgttatcacgtacagcatcatcagcacaaaaaaatggtcccagcgacaacgaatgccgcgactcactgaaaacatttggcaaattttcaaaataaaagatggacttaattggcaacgcttaattacctaatcaatccaattagggtcaatttgcgtatttgtgattagaaatttaacttttctttcacaattttgccgccaattgggccattttggtctcattttggctccccatattcccccctcccccctctctccctgaccaaccgtaggacaattcctcaggaaatgccactttcacatttgaattgtgcgccccgacatcgccaactgcgcaaaagcagtaactcaactgttccccccaaatttcggctgcgattttgctggtgccaacttcgcattggtcctccgtcgtgccgcagtggaaaaagccccattgtttgagccatttggacccttaagatttagataaaaagcatttgtgatgaattccttaataaaattaattcccatttaaatttaattaaatttggcacccgtccaatcgattcttttgcgcaaatggacacgaaacagtgatcagccgtatcacttgggcatactttgttcaattcgcttatttccgtaccattcgaaaaagcaagtccgaatttac

SEQ ID NO: 25973 - DNA, 903 bp, Heterodera glycines
aattgccatttttcaagaatttttcagagaattattaggaaatttatttcataatacaactaaataaatgtcattattagggttataaattatatgaactaaaaaactcgacaatggccaaatatggaccaaaatatggactaaaaactgccaaaatataagttttaatccctcaaaaattccaaaaagtgtttacattcaatatttgttattataattaccatcacagcagcgtaaagtaagcacacagaagataaagaagaaaagcgaaaataaatccattacaatttattatgtaataaagtaaaagaaaattaattcatttgacgaacgaataaaatattggaaattattaccgcttttagagaagtgtgaatcatttggcaaaaagcaaaacaaattcattcgatggaaaaggaaatgttaaaacatttttacatcattattaaatttttaaatatttcacataatattatttacaaatgcttcactttttgggtacaattcttttccaaacccagcccaataagctatgaatttccttaaactcttcttgggtttgcctggctttccatctttttctttttttgctccaatggaaacaaatcattatttaatttccattttaattaatagttaaattatttatacgtctgtcatctgtgccaaagaaccaaaatggaagggtaaacttttggctaatttcgccaattttccgtgagagctcaatttggcaataaatgatgacgcattgtcactgcttatttggcgaaatgggcaaatacaaagaacggatggcatggaaattccacagaaattgccgagaattacaatggcttttctcgtggggataattttcgaaaagccagtgacaaaatgtgaattctaaccagttccataaag

SEQ ID NO: 25974 - DNA, 1983 bp, Heterodera glycines
tacggattttccggatttttagttcgtaatccgtatgtgtgcctagtccgtagtccggatcctgatccgtacaatttttgatacggattacggattttttttaaactgaaccttttcttgaatattatttttgaatttacattatatttcgccaaagcactgggaaaattttaccaaattaaaaaaattcaaaatttttatgccaaaaactcaaaatcattactagggttgtaaattatatggattaacatattttttctgcgcatatgctataaagtagggttgcacccccgaccccgccccgaccccgaaccccgacatttttggccatttttcggggttaaccccgacccgaaccccgacgcttccaaccccgacaaccccgaaccccgacccttaaccccgactcggggtcggggttaaatatacacccctaagaatggcatttttgtgagagaaagtcaagaaaatttaaacaagttttgaatttttgaaccattttgccaaatttttattaaataaagaaaatttgctttcaattatgacatgtattgtggtgtattggttagtgcatcacactgacattactgtctttcataagttcgataaccattgacgttctcatttttaatttatttttttgtgattaatactagagttcgggtacggaccggatccgtatacggatttttacggatccgtagtccgtattttttgggccgatacggatttttacggactacggattttccggatttttagtccgtaatccgtatgggtgcctagtccgtactcttggtccttatccgtattttctcaaaataccgatctctaattaatacattttttaaacaaaattatcaataaaaatagaccattcttggcataattgttaacagattaaacccaaattttcaaaaaaattttactttcgttgaaatttaaaattcaattttcatgactaaataaatcatgaaaacaatatatttcaaaatatttacaaaatatcgaaacaattaaatttcaaaattcgcttggccgagtccaaaaattcgtaaatcttattaaaaaaattggctcaaaatcgaaaatattcagcactttttgggcaaaatctgttaacagacccatgcaaattttcaaaaattttcccggcggcgcctatcggcaccgccggacccctttctcctgaaaagtctttagaaaaagcgcaccgagaaaaaaagatgctttgaaaaagaaaaaagtaatcagaaatttttgatcattttttgaataagattcacttttttcaaattgccggatccgaaaccggtttccggattgggaaaaatttaaattttcacatgttaatatttgtaaaaaccggcaaaatttcatttattaatatagaaattcgatgcaccagaaatgtcgccgccaaaaagacataatgttgccgacaaaataaaaaattttaaaattttcaagatattaaagcatacaaaaatatttatgataaaaaataaataaataaatataaacaaataaaactttagtatgagaattataaaaaattttgactatatggcataaggtaaaaatttaaaaaccccgaaccccgacccgaacaatttggtcgaccccgacccgaatcaaccttgacattactttctgtcgtgagttcgattcaggttttccaattttgcttgagtaaatcatgataatttaatatattaaaaaaacaaaaatttatcgtaaaaatcttattttttttgtaaacatctgttagaaatcgagcttaaatttaaaaattcgccagcaggcggcctatcggcaccgccggccccccaaaaacctattttttaaaaaattagccaaaaatctaaaatttggtaattctttagacaaaatctgtgtaatttatgccaaaaggaattgaattgaggcgatacattgactaaaggaatgtggagccatcacatcattcataaaaaattaatt

SEQ ID NO: 25975 - DNA, 2137 bp, Heterodera glycines
  unsure (1)..(2137): unsure at all n locations
gtttaaaaattatattgaccatttaaaacatactatttatttgtcaaaagaaattttatttgaaaataccccgggtaaattttctgtttatcacaaaatattttggcttttgtcaaatattcgaaatatttttgcgttttttcgtcaatatttattttaatttttttttgtgcatttttgaaaatataaaatcgaacccatgaagtgcattatgtagaagctcctccccacacccctccttaaccctctaattttcttttaaaatacattccctgtttttgtttttaaatatttttgcaaattgtcgcctccactttttctcaaataaaataattaagccaaaaaaaagtccacaaatagtgccgacaaagtatcagctctttgcctgtttttgtccccattcttagcttcttcccacgctttgtgaggccgccaaaagcatcatttaatttgcgggagggccatcatttttagacgagagtccgtccgtccgctaataccccactcttctggcagacaatgaaatttcgtcggctgtttactgcattttttgttggaaaagtttctggccacaccataaataagtgattaattttcatcacaacgctttgaacggattttgagataaagcaaaaaaaaaaatccgctgaattatagagaattcatggaattattggagcaggtaaatttattttttattttaaaaattttttgaaaaaattattgacggaaaaaattaatttttaaaaatttgaaaatgttaaacaaaatctgatcattatttgatatgatgctcataaatttttcaaaaaatgctggtatttttatgacttttccacaatatctatggattttcgattaaaaaaataaatttgaatggctgtgagaaaattgaaaaataccatcattttactgcattaataataataatcatatcaattaaactatttttagaaaataataaattttgaaaaaataacagtgttttttgagcacattttattcattcattaacacataaatttaattttgtgaattgcaaatgcatttaattttgctcgataaaatagaagaaactgataaagatttttgttagttttcatatttttgaacagacactttttcttaatattttactaaatttaaataaatattttaaatttttaaaataattttattaatttaaatcatttttatatttcctaagcattcaaatggaataaatgcattgattaattaaaagaatgtttttgtttttttttcggtaactttttcttcccgtcttaaatatcaataaatacatgcagcagcattcattgctttttcttttcgccattttatcactgctcaacaaagattctttttttttgttgaaaattttcttttaaaatttcaatttaattttctttttttattggcattaattttttatttcttaaaacaagaggccaaaggacagcacacctaaaacacaaaataagtaaatataattttattgtacttttttaaaatattctttttattttttcttaatgtccataaaataatggcctatttatcaaaacaatattttaaattcatcatattatatagaaaaattcgtctttttttaatttctaaaagaatcgcgacatcggcaactttattttttgtcacacaattttcctatttttttctgttgtatttgtttggctcaaacatttgtcgttaattggtaaacattgtgccaatgcagtgtccttgtcccattatttttcttcttcgaccatgactaattttgtggcgtcgccgtacaaagtgctacaaaaaatgggttaaataatttaacgaaattagtgccaatagaccgaagatgacacggaaatatgacgaaattcaagcaatgaaatgcaaattgccatgaatttccgatgataaacaattagaaattttatttttcaaaaacaaacaattttcacttgagcagacctacaaaaatttaaaaaaaaaataattttatttttataattaaaataaatataatatccctataatgtaaaatttgttgcgccacttaataaatggaatagttttatccataaaatttttaattagaaatagttttacttccttcccagtaaaaaggaanntattgata

SEQ ID NO: 25976 - DNA, 1402 bp, Heterodera glycines
  unsure (1)..(1402): unsure at all n locations
tccgcggaaatgatctgttgaggatgcaaatgaagtgatttggacgaagaacaagcagagagagagagagaggagaaagaaagaaagacgagagagaaagagataagagagagagagagaggagaaagaaagaaagacgagagagaaagagaggagaggagagagagagagaagagagagagnagaaagagaggaggaaagaagagaagagagagagagagaccgactgataagagaggaaatgcggcaaccaaatgccgtaggctgatagacaggactgatagatcaaagagtgattgactgatcagcagatgatcagaataagtcaatgctcacatgtgaattggtgcacacttcgtccccctccaattcgccactttcttcctccactcgataaacgtgcggttcggcgagagtcgccgacgtcgttggcggtcccgcggtggcggcgattgcccttttggcgatttcgtccgttagcaattcgatgcctttcattcgcttcggaaatattggcacaaataataaatgtccgttgtgtttattatgtaattgtttctatggtttatattcgaattttgcccatcaaataaatgccttcttttttaggaaaatgcaaattaatttaattggaaaaagagggaaagggaggggagagatcattcattgggttgaaaaatgggaaaaatgagaagcgacacatccaatggcataattggcgaaacaaaaaggcaagaaagtgtcaaccgtatgaaaatggaagaaaatttagagaaagaaatgctctaacgaacgcacccgaggggaagaagaccggggggggggggcacaagaaggagtacgtacgtacgtaccggtgctagggcgtttcttaggaattttttttgtgtcaaattttttgttttataccccttggcggatttacgaacgactcacaaccagctcggtacgtacccctcacaaaggggacaaatttaaaaccgaaaattggccgtaaattattttttctaaatattatccctccaatctaaaaattccaaactttcctccgccattttagtcctccgttttttccgtgtcttttttctcttcttcctcacaatttccccttcatccttcccatctttttacacttctcattttaaaattcaaaagaagaaagtgaatttgaaatgtgaaaaagaacaatggatggtgagggggggggggaggggacagaatgccaatgccaatgccaaaatgatgcaccaaacaaacgaccgaacgaacgaccaccgccaaaatttctttttattctttgagggtttttggtcgaaccgaacaattttttgttcattgagaaaggaaattttaaaataaaaagaaaaataaaaggaaaaggaaaaagtgaaaatgaatgaaa

SEQ ID NO: 25977 - DNA, 1076 bp, Heterodera glycines
aatttatcagaatttaaaagatctgactaattttccccaaaaatcttcaaaatttctcaaaaaaccacaaaaagcctcaaaatttctcaaaaaaccacaaaaagcctcaaatcctcatttggaaaattatagcctcattgacctatcagaaaaccacaaaatgaggctaaagcctcagatctgggaaccctggttatgacaccaattttgaccaaattcgaaccccaaataagcttcagcttgattacgcttaagcctaagcctaggcataggcttaagctgaagcctaagcctaagctaaagcctaagctgaagccgaagcctaggcctaagctgaagcctaatccgaactttattctccgtcccgaaaccctataaaacgactttatttcgaatttccttttaatttacgatttcgaatttttgtccaaattagggttcggaattttgcaacacgaggggagggcgtccggcggaaaactgatttgttaacagactaaaaaaggccaatttttccaattaaaaggcaagcaatgactttttcaaaggaaggattctttgtaccagtgttatctcaggaattgaaacagaaggaagggcacactctgaatttcagtttatctccaaatttgggcggctaaattcgaattccaaacgaaatgtgtgactggtagacttataggaaggaccacttttgtctaactcattttgacctgaatttacaaggagtggaccgagttctacgcgagctaaccctccgaccaaacagacgccaaattttaccgccccacgccccccccccccttcctacaaaagcatttgaattgaagcacagatgagcatttattaagcacaacaacaatacaattacataggcaacaattaaatatacattcatttgaagtgatgatcacagaaatttacatacagatacaacaatttacatgatgggggacaaaatgacaattttgggacggtgggatgggatcctatcatgtccatgttgggtgacgaagcatccttccatcagacgttgtacacgatcggcaagttcttgcggcgcaccatcccgtctc

SEQ ID NO: 25978 - DNA, 952 bp, Heterodera glycines
  unsure (1)..(952): unsure at all n locations
catagaaattccatcccggctaactataggataatttcgattacaaattaaatatttaatacattgtgttggccaaaaataggtggatgattatggggtgctgtcactcgccccattttgaagcggttgccgtcgggatcaatttgccaagcactttggactgttgctcttcctgggcaatatggaggacgccttgggcatctccaatactcaaagccctccgcgattcgcgcatctcgttcaaagcagtaatcaaagttgtgacatgaaatcaaacttcttccacgatttgttttagtctcattaaaacggaaaagggccattttctcgggaaaaatgcaaatgaccaatacatttcatcatttccaactacacaagataacccccatactcaaaaaagataacgagaagaacggtcaaatgcaaatatattaatgattctcgtttatcaaattttatgggaaaaccattaatttccgttatcaacatttagaatagttctccgaatgcaaatcctttggctttcgtttattcacttagaatgagtttgaaactttgaaaatggaacagagaaaaattatattaaagaccgaattgcatttttttaaattttgattattctattttttaaaaattctctatagtgtcgaaattactcaatgtcgaaatggtccagtgtcgaaaatgcaggaaaacagtgaaagttttagaaataattcagtgtcgaaattacttagtgacgaaaatgtagtgtcgaaattacttagtgtcgaaaatactcagtgtcgaatttacccagtgtcgaaattacatagcgccgacaagagtcaaagtaaggaatatttcttccaccagcaatgctatagtanataaatcgttagaaatacggcaaaaatttgccattttccggncggcggctaccgtattgccggatttcagaatcactattaag

SEQ ID NO: 25979 - DNA, 1272 bp, Heterodera glycines
  unsure (1)..(1272): unsure at all n locations
tgggggcgtacgccatgtcgaagcgctggtggcgcgacgtacgcttgggcgtgagcgtacgcgtccgaggcgtacgcattgagccttctggggggggcgtgcgccggggggggggggagcgacaacggttggtgttgggggcgtgtcggtcgacggtgggattctgtagcgtaatgtagcctttgggaggcgtgcgcctggtgttgggggggggggggaggcgtgcgcccagttatggaagcgagcggtcgtcagttggaggagggggttcggtcgacggtgggattctgtagcgtaacgtagcctttgggaggcgtgcgccacgggtggggagtgggcgggaggagtgagcgtacgcgtctgagccctaaggcgtatgcatcagcccgagaaaaagtaacaaaaaaatacattgacgaccgcgttcgacaaaacacgagactcatttcgctttaattcacttgcgtgacggtgcaggttcaaatgagtcaggggttttgccaaaggcggtcgaaccttcaatgtgcggtgtcgaaccgtcagcatccgaatgcttcaccactcggccaaacgggcaccggagaaattaaacgaattggggcaatttgtgaggagggtaaagtgccgcgactcttatcccgttgaggtggtgctcgaattcgttgtgctctgcgctggtattgctgctgctaccgccatggtcgctgttaccggcgctcgtcaccccaacagatgctaggtgcggaccagcaaggttatatggggggtggtgagccaaatccaaaccaagctgttgaaggcgtagccagcgtacggcggtgaagaagcagaagagaaaaatgggcactacaacggtgtagtggagtgcgaggatcagtgcttgagcggcacgttgtaacgtgtcgctgtcgggccatgcgtacgcgtcgggctggtacacggttagaaaagcatcggcggccgctggctgaagcggctcggccgtctgaattccaccgtggaagtagtcagcgaccggtggtgttccgttgctgatcatttatgttttttttttttttgagagggagggtattggtatgctaatttagtttcgtgcctctacaaatgaaaagtgatgctggagggtctattttctcatctttttatgcaatttttgaatcggtcacaatatgacggttgtaatcaatcatgattagttgatcgaatttcgccagacaantcatttcaacgccgcccctgcgtatctctctgntgaactgaaggcgtacactt

SEQ ID NO: 25980 - DNA, 1062 bp, Heterodera glycines
tgataggaaatttaaattgatcataatagaagtttaattttatttgtcccatgcattttctgggaaatcttttcgcgaaaagttgaaaaatttcaaaacggcagacaacagatgcatttcaaacaattcaacaatataatataaaatttaggcaaaaatttttgttccttcctctttggaaatggtcttaaattttgcttgtaaatattcagataacaagttttttttactgaaaattttttacacactacaggatgaaacgcaataaataatgtttgtagacaaaagaaattggcgaaaaaaattgcctcaacaatcagtggtgaaactgaaagaaaaaaacttccccaaaaaatcggagcttttccgacggcatcagctgcatttccaacagttcaacagtataaataaatattaggcaaatgaaaaatttttttccttcctctttagaaagtgtctaaaaatttttgttgttaatattcagaaaacgtgttttttttagtgacaatttttttcaagagaaggataggaacaatcacttataaggctcatgcttggagataaaggaatcggaaaaaaaaattatctcaacaatcagtcgtgaaacagttcaataattcggaagcagtgccatattgggaaaagatgcacaagtagagtaggctcgaaataaaggcaactgccgaagattaacaaaaattcaaatttattggccccgttctgctttgacaggccatatctcgccagggagtggcggtagaccctttgttgatacatttgaaaatgtagagcgcgtctagctcattcgaataacatcaaactggtttgtttttgtcacgaaacaacccgctgatggccacgtcgaagaaaagtcccaaaatttgacatccataaaactccattttttcataggccagcgtgtttaaatcaaacccgaaactgataggaaatttaaattgatcataatagaagtttaattttttttgtcccatgcattttctgggaaatcttttcgcgaaaagtgagaaatttcaaaacggcagacaacagatgcatttcaaa

SEQ ID NO: 25981 - DNA, 2163 bp, Heterodera glycines
  unsure (1)..(2163): unsure at all n locations
ctgcannggtcgggacaaataacacaatcgcaaaatggcaaaaccggaacactttttaagaactttcaagcatattgcatcgactccaccggaaatagtggcgaaggcgaaatacgtcagtcgtacggcgtgtgcaaacgaagcgaaggcgtgcatggacctgctgaaacaggcgcagacgtaccttcaacgagcacaggtggaggagaaagcaaattgaaacattacattatgatgataaagcctttgatattcaggaaaaggacgaagaggagcgacgacagagagaacagcaggaggaacagagacgaaggcttttggcacgacaggcggaggaggagagacgaaggcaggaggagctgaagatgaggttggagaagctgaaccaacagcgacagaaatttgtggacgagacgaaagacattctccgactgccgcaagtaaatgaggggaaacgaattattaatcccgggaaatttgcaccattttcaaccatttcaacgcattgttttcttttaataatgttcattttgcacacaaagattcgagaggaaaagaaagcacgcgtctcgacgagcagaaagaagcgcgagggcggcgaggcggaggatttcgtcaacgacagttcggacttgggcgagtacgaagatgaggagctgaggaacgccgctcggaagatgaaggtgaatgaatggtgctttaattaaggagagacggaaaataatgaaccacaattcaatcacttttttaaagactaagaaacgccccgagcaagaaatgagtggagggtcggaagaagacgacgcgacagtggagaggaggcagaagaagataaaggcggtggagaagcggaaaagggaccgcaacttggacgagcaagtgccggcacgattacggggaaaaagtgagttcgaacaagcagaaagccttcgtttacattttatttcttttcagtcaagagcaaggcctatctgtcgtcctcgtcgtcgtcgccttcccccgctcagtcgggcgcagagaaaagtggagacgaggaagagaaagaaagagacgacgaagaaatggaagtgagggcagagaaaggaggtgaggaggaagaaagagaagacgaagaaatggaagagagggcagagaaaggaggtgaggaggaagaggaagaagaagagaacgaaagagaggagagggaagaagaggagcgtgaaaagatgctagaagaaggggaagagagagaagaaaagggagagaatgagcacggagaagaggaggaagaggagcacgaacggagagatgaagaaggggaagaaaatgtgcatggagaagaggaggaagaggaacaccaaccgagggatgaagaagatggggaagagagcggaggaggaggagagggagacgaaggagaagagatggaagaggaagaagagaaggatgaagagggaagcgaaagaagagaagcgatgggcgaaggagaagaacaagatggagaagaagaggaggaggaggaagagtgattttaatttttcaggtcatcattatttatttgtgcatcccaatttttagaatttttataaattcgatttttacatttttaagtcatgtcaaacacggagcgtaagacgactaacttatttgttaggtcaattaattaccagtgaatgtgaattagtttaaacaaaaaaagtaatttggaattagaacaatgaatgcgactgaataattaaagaagaaagcgagagaatggttaattatttatttttgagtgcggtttatggtgttaattgggccggttggctgcgggtgggggagaaacaacggacaaaaaatgcatttggtttttataagaaggaaatagagtgtaaaaaatgaaaatgcacacgaagttgcaatggaatcggaaaggctgaattgatggggaaacttttggggggagggaaaagtgtaatgaatgggcggagcgattggagagaattttcagtgttttttggccgcgtgggggagggaatgacttacgatgttcagagtttcccactgacaattcgtctttcattctcgcgcttttccgtcccctttttgtcgggacatttcccacttttggtgaagggactttcctttcttcgttattacttttggagaggaacgaacgaagggatggacagggcgaagaga

SEQ ID NO: 25982 - DNA, 1830 bp, Heterodera glycines
  unsure (1)..(1830): unsure at all n locations
gcatgcctngnncaggtccaattttcccataaaaaanattttgtctcaaaaaggccaaaacgttttgaacattataaaataatattagcaaaacatgggtatttgctctgagccggggaaagctttttcaaataattttgtaattccgtttttttttcacgttcccacctgatcgtcttctgcaactttgttttctgatatcgccataaatttctcagcggcacgtgcaattccaaagtattgctcgtaactcaccccagcaagaaatacctttaagaaattaaaaaatttaaatgaacgaacgctgaaaaatgactattagcggaaaaggctcacaaacgttgtgagaattgtttcgcgcttatgttatagtacaaatttactaaatgttggataaatgagaaaagatttcccatgtgaaaattttgtatttttgacatatttataaaattgacctttttgtgctgggcattggccacttcggccaattcttcccctctcataaaacccgaaaacattttccgatagtcgttcatgatcagatgcaatccgtcctccatttctttgagtgcaaatcgaagctgccgattttcctcttcgagtgcaatgatttggcgactttcctgttgcaaattgtgcactaattgcgttctattcctggctctccagcacgagttcaatgatgcgattttgtcttgatactgaaaataattataaaatgattaacttaattagtctgggaatgattagtatggatgaacagggcaatttggagctaattgaagggttgtcaaaaatgaaaatgtacctccttcattagtgtgattttctcattgacaatttgtcctttgctaacggcagaatttgccacgtgaagtttgtcttgcaaattcgatatgtgttgtcgcatatcactgagtattttgtccatgtccataatgataaaagaaagtccaataaacgcctaaaaagaaattatgtataatggacagtataattgcgattctttttggaaaattagtattttatggtgctagggcttattgtcggatagaaatccgggtttagtttttagtagtttaatacataggtaatttaattttaatatttgcttgaaaattaaaaaaaaatatttttttttagaaatgaaaattattgttttattggtacttatgttgtttacagactgtcagattcgtgatcagcgaccccgaaaaccccctagaaatgtttaaatgtatgatttattaaaactatttttttatggtctgtaaacgacattagtaccgttttatttttggtgattttgcagcatcagcattaaattttccctttctcccattttgcggataaaatggtgcttctaaaatccctccttttcttcctcccattttatttgttttctttttccttggtttcttgccctcctccgccagctaaaagacagaagacggaatttcaacatgagaataaagcgaatgataacgaaaatcgggtggaagaagaagaaccggacaaagtaatcaatttatttgtatttgtttgatggattatgttaaattttagaatctatacgactttcactactcaaaatatctggaattggccgtcccaaatcccttgaaagtcagccgaaatttcagcaacgtttgagggaaatgaatgaaacacgacataaaagttcgtttttcgagggtttttttctcctttggaccattacaaaatttttatattccagcagggaaaatagccgaaccatttaaacaaatggacaaggaaaatttttgaccaactgaacaaagggcaaaaattgaagaagttgaacgactg

SEQ ID NO: 25983 - DNA, 1146 bp, Heterodera glycines
cgaacccaaaccaaaaattgcaaagatacggaagtctagtcgaggaccagtgtcagatgcttcgggcgaactttttcttacttcgtcaatacctacattcttagtattaaatgaaggcatgaaatctctagaagttttggtaatatatactacatattagttgttccccattttttagcgctcatattttaaagtcatgtaaaatatgtttgaatttgggcccggggttcagaattcggggaaatggttgacgttgcgacaaccgaaccccctccccccccccccccccctaaaacatgttaacatgctttttaaatttaaaaattttcgccaaaaacgttggaataaactatagaatattacagaagtttcatttaacaaacttctatactcaaaaacagacaaaacattaattaataaaccagtatttgctcgttttttatttaaaattccggagactaagctttctctttcgatatcaagaatgtatactttgacctagtagtaaaagatttggtataagaaactgaagatggtcattgattggacgagtaaactggaatagagcccaggttcgaactgttattgtgtcttgcattatttgttagggcgttttactaattgaaaacccgtgcttttagaaaatgttagtttgtttaaaggaaaatttaaaataaaaataaatgttaaaatgggatttaagtaaaaagggctaaatcaaagttgggggcagaagagatgagataaaaaaaaagtgagaggaggagagtccaaagaaccgcttaaatactggtctgtctggtcgtttagaaggaaaaaaggtatggtacaaacattcgcccggcgaagtttagctggcgcgttttttctggtccgcaccgcgggaccccaaaactcctatttttttcttagaaaaattgctcaaaagcaaaatttggtaatttttcgggacccgacctcgatgctttcaaccctagcaaaccccgtcttttctaaaatttttgcgatgctaatcggccccggcggatgaaagattttagaaattgaaaaatttcaatcttccttgacttgatcatgaaaatttaaagtaatttttaacatttttgacaaagttatcgaagaaaatgttaagggcgacacccaact

SEQ ID NO: 25984 - DNA, 1520 bp, Heterodera glycines
aattacataatgatcagaagaaatttttgggaaaacccagtgaaatggaagaagtcctgaaacagaagagaaaggtggattaagggaaatggggaaataatgaagatttattttataaaaaaacaataataaataattttctaaaaatttagaattttttgtagcttaaaatcaatttttattttaaggtgcttttaaatttcgaagaaaattgttgggacactaacgcttgtagcgacgacctcgaaatcattggcaacgatagtttaactgtccattataaaggaattttttctggtaattcacctaaagtatttataaaaataacttttcttcaaaggttgtgggcattccgtcttcgcaaaacttccgattttgcagaatgattcttcgtccgacatttgttactatgaaatttcaattaaaaatatgaaaatggaatacgagtaagagaatttggaaatttgaatgcattttcagaattttaaaaagtgttaatatttaaattctccatttttcagttctgccatcttcggattcgccatcaaagagcaagaagaattggacaaaacaattcagtataagaaaggcacttatgcttgggaaagtgatggctcggtttggattaacggagaaggaaagggaacaaatgacgaatattactacggtgttggtgataccgtaggaattggtgttcatttaatcactggacagctctttttcacgtggaacgggcaatgtttgggttggcaaacaaataatatttaattaaaatatcggtaatatgttgctcaaaaatcatcataataaaattttgacaaaaaatacaaatttttcgttcttcgtatcattctatagtcccaaatattctctattcgcctgaaaaatttcaaaaaaggttttccgaatacttatggtcaatatattttttaaaacttaacgaaatttttaaatttgcaggctgttcgagcacatttaagtctatttaataataacaagaaattaaaaatttgttgtttctcttaaccaaaccataattttgatggtttttgagtaagttcataatatccaaattaaattccttaactttttcacagattcctccggtcttttcgttgctccatcttttgctgattattctttgtatccattcgttactttgcgcaccactggtgacgaaattgaggcgaattttgggcccaatttcaaattcgatttggcactctctgaaggaagaagaaaacattacttaactgatcgatttgttttcttttcaaccattatgtcatgcttctatacaattataaatctgttttttatagttcatcagaaaaatggtcatttaatattataaaatattagcatttccattctttttattatattataaaatccaaaagtttaaagcaaaaaattaaaatacataatttgctttaagaaggaaacaaaggaaggatagtgaatcatgaggaaccataagaggggagggggggggaggaaggatagggaagcatggggaa

SEQ ID NO: 25985 - DNA, 1122 bp, Heterodera glycines
caaaatatgcacataaagcgcgaaatatgcacaaatatgcaaaatatgcacatggaaagtcatcctagaagcttcaaatcaagctaaaaacatgtttttcgtgcgtttcaggcttcccgcagtccaggaaaaaaaatatgcatgtgcatatttttggcatccctaattatcatatagaatcatgagcggaaattttatggaaatggaaaaatttccaaatcccaaaattgttttatttttatttgtaaaggttaaaaaacacgctgaagcctatggtagcacaaaaatcgtcgttgataccgtatgcacaccagattttgacgacaacaataaagccaattaccggtagaccgtttcttctattgttgaaattcgtcaagaaaattcaattttgaaaacacacatcaatttattttaaaatcaattcgggatctgccgtcttttcccaagttttgtagaacataaaaggtaactcgcccggtagatctcacgataccagcaattcgtgccgtgctctaaccgactgattgtgagctacgggcgctccttttagagatcctctcaggtcctttatcccgctttctcacacactccgcttccttatagcatcagaaaagcacggcatggattgctggggtcgtgggttcgaatccccgcgcgcgagtcaccttttatgttctacagttcggttttttttggaggttcccggcagttcgaattttttggaatttcaacctgagtctcgtcgatacagatcgacaaattgagtccggtaatcggacttttttagattctacaacaatcaaaacaacgcatctgcggtcattcattccggaagcggaagaatttgaagctgaggatggacaacatgatgacgaaaatgatgatgccgtagttgttggagctgctgaggtgacgacaaatgagctgacccgatggaggaggaggaggatgaaggatggaggcggcgattattacgacgaattgggccgccgccacatcggcaggagacgaaagtgccgacaaaaatctacaaacagcaaaagcacagccggtacggaaaaaaaatcgctgaaaattttctcaaaaatttaatttgcccccggaaaatctgagtttttt

SEQ ID NO: 25986 - DNA, 1294 bp, Heterodera glycines
aatttagcaaaagcgacttttacacccataagaattgcattaaattcccataaaatttttcaaaattttacctataaattggctaattttcagtgaaaaactgttataaatgatcaaaatttccaattttcttccccggcggcgcctatcggcaccgctgcgcccccaaaactcctattttttcttagaaaatggcccaaaatcgcaaaatttggtaatttgatgaaaaactgttctcagcggcgcgccaaaactcttatttctcattagaaaaatgatacaaaaatcacaaaatttgatgattttttggtgaaaatctgtcaacaaattttaatcaaattttcaaaaattttcccggcggcgcctgccggcgccgcctgcccccccccccttcccaaaaagtttttttggaaaaagcgcgcctcaaaaaagcgttttattgatttttaaatttggaataaaattttaaaaaatgatttttgctttataattttaactattaaaaagtgggaaccgcccacttcggcgccggccttttcggcgccgttgctaacaactttttttttcaccaatgtatatgtttgttattttgagatttttagtgaatccccaatcccttaagcacaagcgagtaaataaaaatttgtttgttacaccttcattgtttacgatacgatacctattagctattacaaatcattcgtcatcgagtagggctggctgggatttttaggcaaataaaaatcgataaagttttaaaatgaccttttcatttcgtagtcgtcgagaatcgtggtgcgacgtttgaggacttgacttttgaggacccgacatttgaggacccgacttttgaggacccgacttttgaggatttgacttttgaggacccgacttttgaggatattcccgacatttgaggacccgacatttgaagacccgacatttgaggacccgacttttgaggacccgacatttgaggatttcaaggaataaattaaaaaaatttcgaaaccatagtgcgaatcctaaaaattttgttgtctgctttagccagagttaatttttgaagtgaaacaaattatgaattttgaaattaactctgtttccagacccaaccacgtggaggcagcagactttgagtccatacaaaccacaacacaaaaacaccacaaaattaagagaatataaaatcttcacaccaaaatttttattaagtgcacctttcccaagggccaacgggaacatattcacacaaaactaatttagggacactcaaatatctcgagccttcctt

SEQ ID NO: 25987 - DNA, 1214 bp, Heterodera glycines
aggtttttttaaactaagcgatttttttgatcagtcttttctaaagtcaaatagaatgggtaccaagaattttctgacactaaatttatgtgttttcatgtcaaaataaaaatggggaaaacccaaatttttgtaattttaactatcatggatttgagtttttgaaacctaaacgatttctttttcccacgaaatttggtgcgaagaaataggggagtcaaaatttatgacactaaatttatctgttttctatttaggtaaggtttttaattatttatatgtcaacaattgctaacaaactaaaaaaaaatttcgttctgacccgcttaaatttgatttgttatggattttacccaagagtaggattaacattttcattttttccaggatttgattggccaattcggtgtcggcttctactcggccttcctggttgctgatcgtgtggtggtgaccagcaagcacaacgacgatgcccaccaatacatttgggagtccgactcgtcccagttcagtattgtggaggacccacggggagccacgctgaaacggggcacccaagtgtcgctgcacctcaaggaggaggcgtacgactttttggagccggacacgctcaaaaagttgatccagaaatactcccagttcatcaacttcgacattatgttgtggcagtccagggtgggtacagagttggcattggcatttttaacggaaattggcattttgcaagaaataaataaatttacacattaattacagtccgaaacggtggaggaaccggtggaagagagtgaggaagagaaaaaggagacggaagagaagaagaaggaagaggcggaggaaaagccaaaggaagaaaaagaggaggaaaagcagaaggaggaagacgaagtggtggaagagaagaaggagggggaagaggaagagaaaaaggaggaggaggtaagacgaaaagagcatttggcaagagaaaaaggccccgaaaatggaattccaccatgggatttaagtagttttttgatcaatttaacaccgattttatccttttaaaaattttcaaattcttaggcatatcattttcccgttaaaaattttttaaaatttttactcgaaaaggaatttaggtatgtctccaaaattaaatgctcttataattatataaaaattatcattatgcacatacattttttaggggggggggggttcgcagcgaa

SEQ ID NO: 25988 - DNA, 1964 bp, Heterodera glycines
tcagtgtttggctgcgagtcggagtcggaatcgggcatttctataaataaaggatacaggaagagagagagatagagagagggggagaacggtaaaaaagcaaaacgatttagaaaattacaggaaaacttaggatgtcgatttaaatctagcaaaaacaaaataaaaggaaaaaaggaaattttggtaagaataaaagagtaaatccaaggatgccctataaataaaaaaacaaatttgtgaagaaaaaaagattatacggaattataattgctgatttttaactcccccccccctttctatggcaaaaacgtaccagcggaaaaaaaatgttgtgccaagtgtttgcaattaaacgttcccaaattatacgcggtatcaggcatattggaaaaaacgcgcgagacatcgtggtaggccatatgccatcccccttccccattccgtacgccactgttgctgttgttctcgttggtcgagtctgaccggcgactgcgtgaccgacgcgggcaaatttgccttcgtccgccctttccccagttgggcttcttcggtctgtccgcggtcggccgtccggttgacggcagaccagcgctttttcgattgtatcagcatttatggggatggaattgggaaaattgaggggagggggtaaaagtgaggggagagaattcaccggtgcacataaaattgagcactttcagagaacggagtcaaatggcgaagagtcagctgaaaaagtcagcgaatgtgaaaattcttaaaaaaatttgtgatgatcagacagaaaggaaaaaacacgaaaaataatgtatcattacaacataaaagtgaaccaggacaaggaaaggaaaggaaagaatgtccactcttttcgctaatcgaattacgccaatgaaacggaagacacaaaaatgatcagagaatggcatttcgtagtgagactaactattacaaaacaaaagcacaccataaaaggaacttatgtaaattttgaaattttatggcaaaatgtcactatttattaagaaattataagataagtggcaaaaattggctatttttgatgaaattctgttaacaaattcgcattaaaaattataaaatctttcacggcggtgtctatcggcgtcgccggatgcccttgtccattccccagaattttttgaaaaaacgcgccgaaaaaaagcatttttaaaagaaaaaaaagtcgtcacttggcttttaattgaaaaaattggccttttttgatgaaaatctgttaaaaaatcagaacgaaattatgcactgaaatttatgacttgctaatttcctcctcagaaccaggggtcttcggggtcgctgatcactaatatgacacccatttcgaccaattttgaccccggacccgaattccaacaaaagccgaaaattcatttttcaccaaaatccatcctttatggtccaaatcgaattcagatacactgtatggaactgtacaaataccgtacctccaaaagcttctgaacatgtttttctatttttttggttaccgtttctctaattatcccccgggggattattttcaacctcctcagaaagaaggggggggggataattagatacggcgggataaatggagacggagcggattatttttcgacagatttatttagtgaaaaatttttgaacatgtcgccaaaaaacggcatcgagtaaaaaatcatatgcattttttaaagaatttcttaattttatatggaaaattataaaaatggcaaaatatttacaaatcattctccaaaatatttaaatgcgaatatgtaccttgttttacgtttcggaaaatttggatttcaatttttgagcctggaaatttaggtaatttttagaaatagctcacttaagagtgacgcctatcaaagagcgaagaaatatttttagatttttttactggaattgaaagtgatttaaacttacagtgc

SEQ ID NO: 25989 - DNA, 1677 bp, Heterodera glycines
cgaagtccaacatcccttgaaaaagcaacaatccggtatttcccaggaaattaagagtcctaaaatttattttttttaaatattaatccttaaaattttaagttttacttacccaaaaatcctgaacgatttgcaactgaattaaaccataggttttttcattcatattaattttagcatcaataattatttttttactgcttcgctttgtctctgttcattctttataattttccgaaattgatccatcaaaattttctcttcgtcatttttattaattaattgataaaatctgcttaaagttaacgcataaaacaaacctaaaagatacattaatatatttattttccatttcccttacaataattgtccgaatttttgacgctaattctccctaattctttaatttcacaaaaatctaacgggttaaatcctaaaatattatgccaaatttatttttaattatatttttttacctgttccacatggtgtattatacgtggttattatacaggaaatgggctcatgttgtaggtcgaactcactatacgattggttaatcctaaatatttcatgcaaacggtgtccgcagtactcatcttcgggtccctggccggtaaaatgattgggtcatttaaaatttcacaaaacaaatcaatagaaatacgctgaattttccacccaattctttttttcatcattgattttttaattaaattttctattatttttttaaaattttctgatgtttcttttcggttttcttttttagggtttttaaatataaatcttgtaatattttcttcaatcccgtaatcgggcatacttttttcggttgatgatatttcgatataattattttcatttaattttatttcgtcgatagtttttttgaaaaaattttttatatttctttcttttcttttttcagccgggacggtcaggaattttttttgcgcctgagacattttttgtttttttattggactttttttttgtatataaaataaatattttattggtaaatttgaattaaaattcaatttgcgaaatattttccaaagcaatattttttctcgaaaaaagaaaattttttgcgcaattgtggcttttatagcggacccggagggctcatgtgataggtggaacgcctggcacgggatggacggggtccagctgttgtccgcatatttcattgacagttggggcatttttccttgacagctgactcattttccgcgcggtgcattgcattacgaaataattggtcacatgaccagtcacgtgtctttttttttaggtccaaaatgagcatttttggccatcaatcattttataaatgacagctgagtcagcactggcagaatttggggaaataagtgggtcatttagcgcgccaaatttgaattttgaatacaaaaaaaattgttttttcagttaactcaaccccctaaaaatccctgtctttttccattatttttcattttttgtaattcatttattttcattaccgcaaaacttttttttcttagcctgatttaaaacggagataaaagctcttcacttcagttgcttttgcccataaaattgtgcgctgtcagtttgtcatttagttatcgaatttttccattttcaatgttttcatctaatccaatttgaggtgatcaatattttatt

SEQ ID NO: 25990 - DNA, 1110 bp, Heterodera glycines
atgcgtgacgacgccacgtactttggacggccgtctgcaagtgcacggacggaagggctttccgcatgtcgtttactcaaaaatatttcgctggccggacctccacaaaaatgagctgaagcataaaagcttttgcgtttgtgcgtttgacctcaaagtggaacaggtctgacaacgagctggaggagtttattaatggatcaatttgaaacaatgaaaataactaatttattcacggttttcttaattaaggtctgtgtgaacccgtatcattatcagcgagttgtttcggttgaaggaattgagttggagtcgaacaatggaaggttggtcaagaaattgctgctacatatttcaatcgtgttaagacatttgcggtccggacaattgcggcctgctgaaaatcggacatttgcggcccgacaaatgcgctcggacttttgcggtccggacatttgcggcccatttcttaagggctattttcggacatttgcggccaaaagaatggaaaattatttatttaaaaaaaaattaaattaaattaataattgggaatttaattcatttgatcaattattcttgaacaaatcaatcataatcgaatctttaacaactttcaacagatttttcaattcttttttattctccacaattttttattttatttcataatgtcgaaatatttcttaatttcttttagggtagtgaacgaccggttattaatcaatactcccgcctttcgaccccggttttctgtttttggcccaaaatgcatgtttccgatttcggttcggtaaattagggttgcgaccccgaaatgtcggagttttatgaaagtcgtaaattgcacttcaaataagatggaaatgtccttaaatgagttattaagactttgttcgggaactttttattttatgcactaccctaatttctttctccaaggttatcatacctgctgaatcaattctgttaatagctctgccactatcaatattcgacagagtaatttaatgaattaaattcccaattattaatttaatttaatttttttaaataaataatttttccattcttttggacgcaaatgtccgatttcaagtaggccgcaaa

SEQ ID NO: 25991 - DNA, 2858 bp, Heterodera glycines
  unsure (1)..(2858): unsure at all n locations
atatttaattgaattaattattatatttattttgatcgtttttttctctgtttgcttctttctcacccttttccgcttcttctcgcatttgcttctcctcctccatctcggccatcttcttcttccatgcctcctgttgtgctttctgttgccgttggaattccgcttggcgagctcccgcctcaattcgaagcttttccgcctccatttctgccaatttgcgcttccacgcgtcaatttgtgcctgattttgttgtccaaaagctgcccgtcttaaataatttttaaatatcatttgacagcgtaaagcagcggaaaattttattctcataaatcatccataattttctgaatgtaatagtttaaataaattatgtgcctttgttcatctgcaattctgcgcttagccatttccaattcggcctctttttggcgcaatgcctccgcttgcgactgtgccaatgcgtttgcttgtgcttcttcttcctggcggcgtctctcagcgtcaagttcgtccatctttttcttccattctttctgttgtacaaacacaaaagaatttgctttgttttgatatttttaaattattatttattaaaatattattatgataataatttttaaagtgctaataattattgcctgcagcatttccatctttcgcgcttgttcggctgcgtcgcgttgtgcttgttctttacgttgttttgcctccgtcatttcggctaatcttaatttgtaaatggatggaaatggatatattatttttatctgttaaatctgctgtgcgttacttccgttgataatctgcctgaaggccttggaacagtgcgtcattgctttggccctgtgcagcggcgcgtgtctcctcaccaagtgcctgacgagcgcggtccaactcggcaatttttcccttccaatcattctcaagctgtgcagcttcggcatcttttcttcgctcctttttaaaaattggtagatttgtaatagcagaaatactaaaacatttgctgcacctctgctttttgctgtttgaattctggcgttaattctaatggcacttttgtatcttttggcaattccttttgcacttccttccttaattgttccggggacttgcgcgtttctaatggttttggaattctactaaatgttgttccatttatgtcttgcgttaatatttgtgattgggatgccgttggaagggatgcaggtaatgcttcaactgtattatttgttggcacaaacaatgaaattgttggaggatttgtttgaaccgatgtttgcgttgttgggtaaattgtttggaccggtttttgcgttgttgggtaaattgtttggatcggtgtttgcgttgttgggtaaatggtttgaaccgatgtttgcgttgttgggtaaattgtttgaaccggtttttgcgttgttgggtaaattgtttggatcggtgtttgcgttgttgggtaaattgtttggaccgttttttgcgttgttgggtaaatggtttgaaccgatgtttgtgtttttgggtaatttgtttgagtatttgctgaaattgtttgtggattcgtttgaatcggtggtttggttgttggataatttgtttgtgtcagtgctgtagtttgtgctgtcgtgttcgttaaaactgtcattcggtttgctgctgtcatcgtcccatttgtttgtaccgtatccggtttacttgcaaaacctgggggtgcaatgggcggtgataagtccaatttgtttgtttgctttgtcggtgttttaccgctgcttaacggtgccggtggcattggcagcgatgccaccccattttcatttgttgctggtgacttttccgcatcgctgtccactgatggcgcctctggaaattcttcaaagcctgggggttgaaatgattggtcctcttcctgagtgcttggcgggtgcggtgggcccatgggttgtgaaaacttcgacgatggcggcgagggattattcggctgatgagactttggcggtggtggctaatgcaaaaaaaaaaaatttttttttaaatattaaaatactaattataattaaataatttcgttgtaattacaaagttaaagctgggtgcaccctcttgacctacgccaaattttgattgcgtgccaggaaaaggtgcttttgttggaacaaaacatttgagcaaaataataaaaaaataaagataaatttgaggatttgacatttgaatttctaaaatgtttaattttattaattaaaaatttattgcgtgaataaaaagaatttactttcttttgaataatcaaacataaatgaacgaaggttatttccttttgcaagagaatttttcgtaaaatgcggtaataaatttcctatttttcgttactttttatataatgttttttgatcaaaaatgatagataaatcatgctgatcaaaaaataataagtaattgtgatgagtggtggcctttttaaactattttgagcctgttttattccgctggtgcccaccccaatttgacaaatgtcaatataaacgcccaaaagtgaatggtttcatttgatcatcatttaaaactaaaggggcatcaaagtaaaaaaaaaataataatagtaagcaaaaaataaggaagtgtaaacggaaaggaaacaaatttacgttttctctcttaagaaaaagccgattaaatataatttgttcatcatttaactaattataacacaaaacaagggttaaatatttatttttaatcctagaaaaataatagtaaacaaaataatgtaaaaagaaagatgggtcacactanaatggataaatttcacataatgaaaaaaataactgaatagtatttttaaaaaaacttgatg

SEQ ID NO: 25992 - DNA, 1037 bp, Heterodera glycines
ccccataatctgggcgcatcggctcggggggactgccccgaaaacaaaaaaatcgatttttcaagtgtcgtttggggtactcaacaaattatggggagcaaaaatccaacgcagaattaaagtacaggctatagggaagctattcccgaaggattcggtctccccataaatctgggcgcatcggttcggggggactgccccgaaaacaaaaaaatcgattttttcaagtgtccgtttggggtactcaaacaattatggggagcaaaaatccaacgcagaattaaagtacaggctatagggaagctattcccgaaggattcggtctccccataaatctgggcgcatcggttcggggggactgccccgaaaacaaaaataaatcgattttttcaagtgtccgtttggggtactcaaacaattatggggagcaaaaatccaacgcagaattaaagtacaggctatagtgaagctattccggaaggattcggtctccccataaatctgggcgcatcggttcagggggactgccccgaaaacccaaaaaaaaattttttggataaaaattatttaaatgaactgactagataatatttaaaataggttatttctcttcctttcagtatccctgcaaagtttggtgcgcttctgatcagtttctgaaaaaaaagttaagcctaaactttttggcctgtttaaaaaggaattaaaaatttttaaaaattttattcatctccctttttgatagaaaaagcatcagagtgcctaaactaacatgtaaataaaatttggtgcgtttcagaaccctttctgaaaaaatatttaagaattaattttgcaaaaaataaataaaaacgaaagactcagattttcgaaaatttttttgagccagctagctcggcgctcatttcagtgtaagttagtcctttaccggggagtatccctgcaaagtttggtacgcttctgctcaattagcaaaaaatatgagtgatcgaattttcactaaaaaagttaagcctacattttttggcatatttaaa

SEQ ID NO: 25993 - DNA, 1631 bp, Heterodera glycines
gcttccctatagcctgtactttaattctgcgttggctttttgctccccataattgtttgagtaccccaaacggacacttgaaaaaatcgatttttttgttttcggggcagtccccccgaaccgatgcgcccagatttatggggagaccgaatccttcgggaatagcttccctatagcctgtactttaattctgcgttggatttttgctccccataattgtttgagtaccccaaacggacacttgaaaaaatcgatttttttgtttcataaatatttttttcagaaagtgctctaaagcgcaccaaattttatttacaacttaattttagcactctgatgctttagtatcaaaaaggaagatggagaaaaaatgttttaaaaaatttttccttatattttggttatatcgttttgcttttggtggggtgcttggaacagtggaatcatgcgcacccgtccgatctggcaagttaagcaacgattgctgactagccaaaaggttcggtgccgtgatgaaacgaaccagcactgcttaccccgcggcacccggcacggtcccccgaaggaatggatttaattaaattctctccttcggggatttttttccattaggtcgtccgttagcgttcgattgctctagtcaatttttaaaaatttttgttgaaatatttgtcgtgctctgaagggcgggggggggggggggggggaatctctgggactcaaatctccggcattccaaacactgggactcaacccaccaactttcattggcattccaatctctgggactcaacccaccagcatttcaatctctgggactcaacccaccagcatttcaatctcggtgactcaaatctccggcattccagacactgggactcaacccaccagcatttcaatctctgggactcaattctcaggctttccaatcactggaactcaaatctctggcattccaaacactgggactcaaatctccggcattccaaacactgggactcaaatctgcggcattctaaacattgggactcagcccaacaactttcaatgacattccaatcactgaaaatcaggccaccagcattccaatactgggactcaattctccggcattccaatctctgggactcaaatctccggcattccaaacaatgggactcaaatctccggcattctaaacactgggactcaacccaccaactttcaatgacattccaatcactgaaaatcaagccaccagcattccaatactgggactcaacccagcagcatttcaatctctgggactcaattctccgacgttccaaacaatgaaatctccagcattccaaacactgggactcaacccaccaactttcaatgacattcaaatcactgaaaatcaggccaccagcattccaatactgggactcaattctccggcattccaatctctgggactaaaatctccggcattccaaacaaatgggactcaacccaccaactttcaatgacattccaatctctgggactcaacccaccagcatttcaatctctgagactcaattctcagactttccatcgctgggactcaacccaccagcatttcaatctctgggactcaaatctctggcattccaaacactgggact

SEQ ID NO: 25994 - DNA, 970 bp, Heterodera glycines
  unsure (1)..(970): unsure at all n locations
actggagctgtgtgnatgcattttgatgcccaggaaccaaatcgtaatatttttacgatttntaattcaaaaaagcatttttntaattaaataaaacctttttgtctgttgtcaaatgaggcttttgagagcaagagtgtactaagtaaaaatttcaaaaaattattcaaaaatttactaatttaagataaaagatatactgatttaaaaagatttaattatattaaaaaatgttaatatttttcagcagaagacccatcattttataactgcatttacggcataccaaacagtgtccaacaaattatccaggagtgccatgtggaagtcggctgttgtgagaggacatgttgcgacacaaactggcactttttttatttttaaaaatatatttttgttttttcaatttaacaaattaatttttcaattttaggaaagtcaaatacacatgggcaatcattcttctatcattgatttgccttgttgttgtgattgcatttgttgtttggtaaaatatactttaaaaaatttaccaaaattttattagatgaaatttatatattcagagaatagaatgaaatttgaaaaatcaatccctaacttaggaattttatgccttattttcgatgagtttcatgcaataaaataatttttttttattttcaaaaatataccccttactaagcttcatcaataaacagggatagagattcttagttgctaaaaaccgagaaatgttacataaatagttgctaaaatattgaaaaatgcaaaatatatcctaaaaaagttgtaaaaaattggaaataactgacaatgaatgcgaatattccccaaagatacttcattctttattcatttcgctagcacaaattccaatatttatgctggcaattttaatatttgctcatctaaggtaaaacataaaaatcaatcataataaaataaattaaattttttttattaaaaa

SEQ ID NO: 25995 - DNA, 1689 bp, Heterodera glycines
acaacattccattcctcatctccagagggcgtcaaacggccctgttggccttgtatttcggtaaaattcagatatagagaagggttttttacgaagcttatttgggaaaataaattcaaaagaaacctctttgaccggcatagattagggattaatctaaacgaggttcattgtcaataacactaaaaaaagaaacgtgcccaaataaattgctttcgaaaattaatttcacatttgttttcaaactcaaataaaaatggcctttattggtatttaaattcaaaatttagaaattaattagaattaataaattaaaaatttagaaatttaattaaaattaataaattaaaaatttagaaagttaattagaattaataaaatcaaaatttagaaagttaattataattaataaaatcaaaatttagaaatttaattagaattaataaattcaaaatttagaaatttaattagaattaataaattaaaaatttagaaagttaattagaattaataaaatcaaaatttagaaatttaattagaattaatttctaatcgaaaagcagagaaaattgccgtattcctccgcccaatgtatagcctaataatttgatggacaactcagccgtacaataaaacttacaattaagcctaagcttaaacctaaaccaaggcctaagcaagcctaagcctaggcctcgcctgaagcttaggcctaagcctaagcccaaacagcctagcttaagccattgtacgagttgccttttataaattctcgtaaagctgagttgtccatttcgaaaaacaattcctttaaaaatgttttttttcagtaactcactccaacaaactactaatttaattgcaaaattcaatctatccaaaatgaaaatgaactaattgatttatatgtacaaaaactatagcacgaaattttgaaaaaaacggcccggaaacccggggtgaacccggacaggattccggactaaaggggcttaacggttttttcaaataaagaaaaacaggagccagactagggcctgggaaaatcctgtacaaaattgtgtcctatcaaggctctaataatgcatagccctaataataatttaaaatttgtacttgagtttttaaataaataataaaataataaaaaatggaaaaatatttcttattttcaaaaagtacaaaaagcaaatacatcccctatgtgcaaatccatgatgacgtttttggacactgtaattacgcattacggttcaacctttttgagttgaactataaaaatcagaaaaaaaattaatttaattttaacataacatttggtggcgaacaaaaaaaaagtttaaaacacctgcgctccttcattttgatctaaaacacgaaaatgggttcaaatggagaaaaaatcataaacaaaattctgtatgtccgagttacaagtgcatagtcccaatcatgaatttaactgtgtttttgagttttaattaaatataaatttgaaaatgatattttgtttcctaaaatatatattatatatatataaagcaaatcagaattatcatgataaaaaatcgagcaatggaacgaaatattattacctctttaatgttcatttgattcttttccaaatttctcttccaattgaatgagccattgactaattttcaatatctttgcatttttgctttctcc

SEQ ID NO: 25996 - DNA, 1014 bp, Heterodera glycines
gaagataattgagcacgtacgccttttggtcgagtaaaggttcctccggtggtgctgatggcttggctcggtcctggagttcgacttccatcacgatcggatatcgcacttgttcggcaagtcttcttccagaatggaaacagttcattatggtgttgaccaaagattgtagcaaatgaattggcgccaagagcaaagtggagtaaattttgattttccacaaaagaactgtgcatccaaccaaaagtaaaatgatggcaattgtaatcaaaatccatttgatgtatttaatgattccaattgggtcttccatccatgcctttcctttttcaatcgtttcttccgctttttttctgaaactttcttgcatcttttccaccagtatttcgccgatggaaaaaatgtctgtgaccatgcttccgtgaatctcagtctgattaatgtcgactgtccctatgtcagggaagttcaattcaggccgagtgatccttctcgtcagttccttgagattctgttccaggcgggcctgctcggattcaaaaattgatccgcgggtgaagaaaattaatggattttgaaaatttgtctgttgttttgagacaaatcgatgtttcgaattggcttgttgaaagttcagtgtcattgttgttgaagtcagctgcccaagggttgttaccctgctcatcgcagtgagtttcagtcccgttatagctcaagtcgcgcgtccctggcttgacgaaaagtgtgcgccttgccaccaccacgggtagctcgcggaagcatttctcgccaatcttttggtcccatagcacatcctcagccttcagttgcctacaaagtgcaattgaccatttttgatcaagttgtgatgatctggtccaaaatgccgttatgtcatcccttttgtaaagagagcgggctgcatcttccggcatctgacgtgctaatgcctttgcgatggaaagtgcattatttcgttcgtgacagtcgctcatccatttctctcgtgcattt

SEQ ID NO: 25997 - DNA, 1812 bp, Heterodera glycines
  unsure (1)..(1812): unsure at all n locations
aaaaaatggggaacaatttgattttaaaaaaatgaacantgggcgcaaatgtccgaggcgcaaaatgtctggacacgtttggaatgcattaaattaaaaaaaaaattttttccaatttcttttttctcacaaatttttatcaaaaataacaaatatgtgcaaaattccaaataatgtgtgaattgtttcaaattgagaattttgattaaattttttagcagattttcattaaaaatcataattagttgattttcgaaaaaattgataattttcatgtatttatgaaatttttttttggaaaatttggtgaaataatttcgtttttgattgctctattaaaaaaccaaattaaaagattgtcaaacattatgccaatatatcaaaataatcaaaattttaacagatctggcgattttctcctcaaaatttctcaaaaatacacaaaaaagctcaattcactcaaataaatcaaaatttagaaatatgttattgtttctggttgctttgacgttaatttgtattgttgcttcacgatttgaagttgattatgatcaactaaccgcagaacaaaaggagcgtctcaagctgtctttaaacaaaattaatgttggttatgaccaactcactgcagagcaaaaagagaacctgatgcggtctttcaagatgattgaagagtggaacaaaacaccgggaattacttatactgtgctttttaaatattttttatgtcatgtaattagccttattcagcttgggatcaaccaattttcattgatgagcgatgcgaagattcaatctttcgttagaaggacaagggacgatattggcctcccgaaaattccgcatcgctgcggtggagactgttaccagatcaagccaaaaccgttgaaagaagaaaacgaattggcacttgtgggaaaaggtagttcaatatcaataacacttaataaaataataactgtcgtttttctttacagtggacgcggtgactttccgtcaaattgatgagagaaaaggcgagccggagagacaggcaaaatgctctccaatttcacggtttttgtcattttatggcttaatctgctgatgttccattttttcttagtcaaaagagccattctctttttccccaattattatgcaatggctgaaaaaacaaatgccgagcaaaatgtttctccgttttacacggaatattcacattccgcggttttaaattggatgaaacttgggacgaaaaaaaggtaaaaaacaattattgaatggttttataaggtttgcagtcagttgttcacctaatgaggagaaggctaaaggctaacaattcactttttgcaaatccatttagaaattccaaatggacttatcgggagatgcgttttctcctgctaattggcgcattgggacgcaaggacatttgcctcaaagtcgaaaaatggaagaaagacgactctcaccgcgtactgccgaatattgcaaatcgaatgggcgggaaagggcaacgaatttttccacgacgtttgagagacgagccggaattggaattccattcactgggtattcgttattttgtatataaaagctaaaaaaacccggactaaaattcttgttcaacataaatcccgggttctgttatattcaagaaataacggaccaggaacctgagaaaattatttgtaattcgttttcagtcgatcccatttcgtacaaaccaagcaattccgcaccggcatttggcgatgtcgtttgtgaggattatcggttcgatataagaacgaaatatcctcaatgcgccgaaataatgtaagataa

SEQ ID NO: 25998 - DNA, 1853 bp, Heterodera glycines
  unsure (1)..(1853): unsure at all n locations
ttactaattagcatctaaattattttgaccctgtttcgaaacagatcactacaactcctaattttctaattatccaactaattaggcactttgttttaccgtttcctcctccttgtcgaccgtgtgccatcnccgcgtcgaagaggtgtgccaccaatttcggcatcatctgcggttgtcgcctcatcaaagcgagtgccaaaacgagtatggctcagcgcatcgcaagaggaagactaaatccggcttgtcaattaataaggaattaaattttttacaaaatttgccgaaatttggccccggaggattgagacgaagataaaaaaagatacctttactcgaagcctaagccttgattggcactcacccgtttccgtgccttgtcaacccttttcgtgttgctgctgctggccccgtccttcccattgtgctgcttggcgccgtcctcgccctcctcctcctgctcagtggtgccaatccgtcgatgcttttcctctttgcgctttgagcgtcggaacaaattggccaacggattgcgcgaccacagcggtactgagctgccggtgtggaggaactcgacggacgggcgaagctttgccgcgccagcgccgccgactgaggaattggtgccgctcattgcagcataagtgcacactaattgttccttttaatcttaattagtcaattagcttttcattagttaatcgcagaaaatgcatgaggattttaggttcgtaatttttagctttgtataaatttatttttatttttgtaggaaataagttaaactcttttcataaatactaaaataaaagtaaaaattgtaataatttaataattggaacactaaaaagtaagtaaattttgttatagaaattaaataaaatttcaataatgaaaataataggtttaattaattaaaaatattttaaggcaactgataaataagtaaataacgaaatgattttttgtaatcaatttatttaataaaatttcaatcaatatattaatttgtctgcaattcaatatttgcataatttcgcaatcattttgatttaatataaaatttaaaattaaattatttaaatgcttgtttagtgacaattagcaattaattcagaaataacggatattaaccagggctgggcgcaattacggattaattacggcgatttggaccccgtaaaagaatttccctaattgaaaaaaaacatagtaattacagcagatgacggattttgtaaataaaaatccatgcgtataaatagcaagattttggtatcaattttattttaatcacatgtaaaaataaaaattatggaattaatgcgatttttttaaacagattttgaccaaattttttgcctatttttgaagggttttttcaggaaaacaacaaaagtctcaaagcttcattttttagtctgtaggactcgcaaaaatagcctaaaatgaagataaagccacacaactgtgaaccttggattaaattgtattcggaaggcaaaaaccgtccaaaaacaaacaatcaaaaaactattgctgattgtgtaacataaaatttttagtatttgagtaagcaaaaatgggactaattgagttcgattttaattgggtgattagtggctaaccagtgagtaatcactcaaaaattgaaaaaaacggaggtacgaaaggacacattagcctctgcttaaagacttttaaaagtccgcaacagtgggttgattgggtgaaaatgggaagaggtcaaaagcaaaaaagcagaaatgggcgagagtgaggacgaccgacgaaaagcctcaatttccataacaataatgatcagcgagacgaacgacgaagacgacgag

SEQ ID NO: 25999 - DNA, 1933 bp, Heterodera glycines
  unsure (1)..(1933): unsure at all n locations
aaacgacttcattatatttatattaaataaaagggtcaaacgcgaaaatttgaaataaaaaacaaaaagaaattaaaaatttcatattaaataattcagatttgaaaatttgataaaattgtaattattaattaataaaaaacaaagagatttatttataagtcactcacgaagcaaaaaataatttttcccttttcataaattatacaaaatattgagtggattttttaaattaaaattaaacgaataacacaaacaaacacaaaaattttaaaaaaaatgcataataaatgaaaattaaaaatttaaacaagttttgttcttaaaaaattagtatataattaatttattgaataaaactactaatcaataatcataattaatttcgttgaaaaattcatatatattctaaagtaaagaaataaatagttaatctatataaatttatttcttgaagtatatcatcaaataacaaaaatgtaaagtaatgaaaacaaaaatttatttattaagaatatttaaaccaaaacatattcgaatatatcattaaagattttatttaaagaaacaagcaatttcattatattaaagcatataataattctaaaaggaatatctatttaaaatgtaaaaaaataataataatcgaggatacattataatataaatagcaaatataaagtacaaacaaactcattgctatatttatttcattaagcatttattaaattaaaaaatgcaatagtaatgaaattattaagaatatttaaaccaaaatatataagaatataagcacaaaagattctatttanagaaattagtgcaataataagaacagtcatataatcttgaacaaaaatanaaagtttcaggatcagaaaagacagctggcttcgtgaataatctaaaaacacaattcttcaacacaaaattcttttattttataataattaaaatgatctaaaaggaataggtttttaaaaagtaaaaaataaaaaattcgaggataaaaaaattgcagtatattatttttggtattaaaagaaatgatttactttttttttaataattaaaagactcgttacagcttgttttataaaagttaatataaaaatataaatcaagtcattaatttgcttaattaaatttatgataaaatagagtaattgtatataaaatttaatttaccgagactataatatgaaatatgaaattaaaattagtaggttattgaaaataaaaaacaaaacataaattaaattatatgctttgaaaaatgaaatatcaaataaaaaatttccttagtggttatattaataacttctagggaactgatctaagcaagagaataattttaatgattaaaaaagatatttcggcatgttgtattaatagcaattataaattaatagtaaacaataaaattaaccaagtgattggtttgtttaagcaaatgtaatataaaatggattaaatatttaaattaatatcgagtttatattaatgaaaattaatgtgttgatgaaaataaaagcaaaatgatgaaaaataaagcaagtaaattttaatgaatttttggatgccaacggtcataaagttgcgcgggaagatttttgaaaaatttctcgttgtttacagataatttattcaaaaaaaaaaaatttttttttgtattttttgcaaatgagctttttagctttttggtttttagagagaaatcctcaaaatttgtcattatttggtcaaaaacccttaaaaatgcattaaatcaccagcgatctacaacggcatcacccaactatanattcaaataatgtgatttaaaaacaacattttttctatggtaaatgagctaaaatgcgtttttaggtcaaaagatgttaccaaattcaccttatttcaaaaaaggcgacaatgccgggccccaaaattt

SEQ ID NO: 26000 - DNA, 1424 bp, Heterodera glycines
  unsure (1)..(1424): unsure at all n locations
ctgaaattattaatcgtaaattttctatgagtnaattttaaattaataagcatttccaaattaaaaaatattgttattaatttatgttttcgtatgcatttttgtatgaatgaatatgcaaaaacacatattttccataatattaattcagtagctttataaaaatgcatatgtattctctttacaataatatttattatccattcttgaattgattatacaaataatattgctattagtgagatgaaaatagtattattttatacaaaaatacaaatgaattattgccgttttttgaggattttttcttatattctgcttagatcaccaaactttctataaaaagcatcaaaagtcagcaaatcagcatctcaaaaaagtcataattataaatcagtagaatggaagccctggaattaatatttctaaaaattaaatatggcgtatatatgtgaaagaacaaatattaaaaaaatcttctataattttaaataaaataatcaacagaagattatacttattatggtacaaaaaaaaagataattcaattctttaaaataatttaattatattaatgataaaaaaataaaaaatttaatatgtagctcaaatatatgtttcataattgagtccctaatttgatttaaaaaataatggtatatgtgttaataaaaaatatattaagttacaaaatacagagaagtatcaaaaaattaaaaaattaaacactttggtttgtaacagataaattcgcaagaatataataaaattagtaaatttatatatagtataatttatgaatacgaaatacagtacagtcaacatgtaaaatgcatcataaatccgataataaaataaattcattaaaatttattaattgactgcttatatttaataaaagtgactaatactgactgatctaactacaattcaatgaaagggtggaaaaaagccgtgtactaaaaaggaaaatctcaaattaagattctttgattgtaaaaaaatatatcaatgatcaggtcaatccatcatggagatctgatcaccctaaaatacactaaaaatcggcaaatttttcaaaaagtcataggtggttggaaaaaatttcagaaaaaataatattgataaataaactaaattttaaattaattaaaattagccttcagtgctacaattctatttgtgagcataattttcaaaaaatctttcaacgtaaaaaacaaaattaaaaaataaaatatgatgaaaatataacattacacttttttggttgacattacttataaaaaaagtatatttattattttttcaaatattatattttagagttttcaaaaaaatattatatattaagagtaaaaaattgatagcactgatgaaaattaatgattaaaatataaataaaatcgaacaattcaaagaaa

SEQ ID NO: 26001 - DNA, 1498 bp, Heterodera glycines
  unsure (1)..(1498): unsure at all n locations
cgaaattaantttggtattatttttctgtaaatctactgtatgtatatgtacatatatgtaaaacagagaacagcacccaccatcaccacgtagtaatttgccttctcgtccaacccgctcagcttgacactcattgaggggaaaattcgcctgtgggcgattagaaattaattaggtaattaattataatttgaggtggctttttcgcgacggggtcatgggaaaatgtacaagctggcatgcatcccataattaacaatcagcggcaggtgatcatcattagagggttccacagcgcataattaaggggtagggggaaagggcgggaaaactttgggactcagcaaaaaatttttctggaacagcctgctagaaggattcccgaccgataccgaaaatttcccgtgactcggacccaagacaatgaaaaaacccccggcaatcgaatcggacaaaagcgagactctcgagcatcattaatttattttttacgctccgttcgcccgtttcctttttcgtttcgccgtaccaacaacgcaccttccgctcgtcgtgatgatcatttcgttgccaaatttgtgaaattcctcccacaactgtttgtcttccaactccaccttcggtgcatcagttacgccgtcggcctgcacaaaaacgtgaagaggcggcccggaaatgccaaaagtaatgggcggaactgcggcgaggccaacggcgagggcgcaaaaatagaaagggtcgtcgggctgaggaagacgcacatagagagacgggggaacaccagctgctgctgaacagtgggaacgcgagattaggggggggggcaattggggggggggcgctatgtcgttatttaaaaacccatcaatatgattgacgaaaaattatttataacttaactcatctctaagtgttctctatcagtttacaaaatttcaaataaataagttttcatcaaatcatattgatggttttttaaataacgacgccgcccatttgggggaggggaataaggatggacagaggatttagagaattctttggggattagtgcgcgggactcggtggggaaaatgcctttctagttaatgccttcggagaaggtataggagaggttgcgacccaacggagcggaccgtacgtaggtatacctacttttttaattttcgaaactaaaatttttatttatagggggatggaggtccaattaagccgcaccacaaaaagttgctgtaaaaaacacttccgaatttaggattttttaaaaatttctagaaaaattaaagaaaccatttaaattttattttgaaaaaatatacaatttcattaaaatatttgaaacactcatagaaaattcatatttgtttcttttaatttttattattattttttgatgaattaaactccaattggccggcttgactacaaatgccttgataatgacgaaaactataacagtatttccaacatgacaaataatatacattcattcgctgt

SEQ ID NO: 26002 - DNA, 1206 bp, Heterodera glycines
  unsure (1)..(1206): unsure at all n locations
cagaaataaggccttttttgtatgaaacacggatagggaaacggtatcccatgtacagtactttcccagaatcttgccagggccatgggttctgttaagacagaacttcagtccttgttttgtcttttttgctctggtccatcccgaaaaccctgctggtccgggtttttccaataattacgggctgtactttcgaaaaagtgatcattttgggaaatggccgatcatttttgagttacgacgaattggtttgaattgatgatgttttgtttgctctctttgaattgttcaatttgacgctgacattttttgctattaaaaaaatggaaaatttggcacttttttttactttagataatccgatgttttttctttaggcaactgattttttggtcgtgtttttttgtttgtgttcaagtttcaaaaataaatttttttagagtaactaaaattgttttgggtctcggttttaaagtctctggattttatagaggcaagaaaagaacaaataccaagcattcataaaaaaattacaatgagaaaacacgaaattcaactttgttttccgagtgtatttgcgaattattttttccaatagccttaggtaaaaatttaaaaaaacaattcttagactttaagcttatcaattggtaccaagaaattctcacttgaaaaagaagcaaataaatttacataaattttgtatattcgaatgaaagaaaaatcaaaaattgctatttctgctcaccaaatacaattactgccgccccaaaaaataaattggatattgttcaaaatggcatctgaattttcatctttcttctcgccaataattgggcatcgcttcaacagccattcaccaccaccataatttgacagtttctccaatgtcagcatttctttggtccgttcgttcaccaattcaaatggcacaatttgtgacgctgacagagtaaattgaacagtgtaactgacagaagaaaaagtggtggcatggcgaaatgtctaaacaaaaataaagcgtaaatttagggcaattaaatcaatcaattagtcatttaatgaaaatatggctgatcagtgaccacctctcgnaaattgttgagccattcgagatttggtagaccaacataagcacgnaaacacaatcgcttttggttgtccatctttgctccgagagtgcaaccctttggaacagaatttgat

SEQ ID NO: 26003 - DNA, 1904 bp, Heterodera glycines
atacgttatttttgttatacattttacaaattatcagaccattgaaaatattttatgtactgaaattattgccgaaattgaaaataaaataacatttttaattaaaatcactgaaaaaaaaaattctgtatttttgcgaaagcttaaaaaaacgtcaccttttgttggattttttgaaaaaatgaaggttgaaaaatataaccaaccccatctgaatttagaatgattttgcaatatttttctgcgcttatgctatgaagaaaggggctcaaaaaataacatttctacgttaaatttttttgatatggtgaaggtttttagtgcatataaatccatattttgggggttttcaggaataaatccatatttcgacatttcgaaattttggcgtttttagtccatattttggccatttttggcaaattttcacaagaaaaatgcaaaaaatgagaaaaaaaacactattaaagatcgacttttttggaaatttaaaaaaaagtcattgttttggtttttttaagtcaattttgaatttttttatataatttttggcatttttttttgaggattcaaagtcatttttgctagttttaaggcatgttagtgtatatttgggcatttttggggtttttagggcatatttgtggagatttttagtgcatattttatgcgcatatttgccattttttattgcatacaacttataaccctaattattataaatccagcaaagaatttttttttttttttttgcaaaaaattaagatgcccataaaaatttttttccggatgctaattgattattcatattcaaatatttactatccttttttacgtcagtcaatattatgacggaaaattgggaagctatgtgatgtcactaaacgatttttataaagctttttttgtggcaaaaattgattctagccatcgattattcatgagaaacatttatatttcataattaattcattttaaagaaatttttctctaattatacaaataatttttttaattttttaatttaaccaatcataaaattgcaagaattttgagaaaatgtttttaattatcttaatttttaaaatatttgcttttgccaatggccaaccatcaccagcagagcaacacataagttaataaaaagaatttaaatttaaatatccaactaatcaaataaaaatataattttttacgtcccttaatgtcaagaaaacgctaatttgggcatttccgccgatggtgccggcccatcgtcggcatttgaacaccgtattgacatgccaaacgaagtcccctcgcactcattttttgaatatttgagtaagatttacttaattattatttatttttattaaataattttacgaggcttatttaaaatctgacaaattaaacagaaacggcatttggtaatggtgagaaaattgtaattggacacgaacaggcaattgaattcttgaatatgttccctaaattgagcgcatttattcgagaaaaatcattcgttgaagtttaaattgaaatattgatgatgataattataattatattaaaacttgcaaataattatgaaaattcacaaattctctcaaaaaaatcaataaacaaataaatttagattaaaataaaaaaagtttctggatgcaatttttttgaaattaaaaataaatttaagacgcgcgttgtgcagcaacttttttatttgaccacttcaattgacgatgctattgaagaaaatagacataaaattggtgaccaaatgtacgcatttgtcactaatttgtcgaacatttgtgaacaattgggcactgtcggaatggacaatgtaaaaatggacgaatacttaaatgtgagaatgcaaagtttgaataattttagtcgcggattttggtacatttttt

SEQ ID NO: 26004 - DNA, 1493 bp, Heterodera glycines
  unsure (1)..(1493): unsure at all n locations
tttggggcgaccaatgatggganaagcactaaaaaaatgaaattatttatacattatgaattttanatatgaaaattgactttctcttgcnnacaatctggtggtgccgccgttttctccgcaaaattttgcgacaaattcaaatgccaaaacaaatggcataaaatcatcaaaaaatgcggcagaagaaagcgcttcttgaagttcatttccaagtggttcagcatctgtaaaataataattactattcaaatattattattaattttactttacttttggtcaaattaatttccaaatatttttccgtttttttcatttgttcggtgccgaaaatgtcgtcgaatccatggcttaattaattaaatccatattctaaaatatttttctctctcaatttgcctcgattcgtagctgatcactccgtcttggtgcttcgtaatgatcagaccgtgccattggtcttcggcaatttcttcggcacattccacaaatttcagtttgccaatgtttcctttgcccaccccaaaacgtttgctaatttttttgtttttggccatttcactttggtagcagagaagaagcctaaaaatgtttaaataataaatttttcaattattttacttggtgcagccattttccaccaaaattgtgccatttttgccattgcactttttccaaatgccagcgacggatgacaaagggctgaaaatttgtaaaatttacaaaaaaaataacttactttcatttaagaaattaccgtatcggaggagctgagcaattaatgaccaagctcagaaagacggtcagtagattaaagaagttcatttgctaattgattaattaattaatgaatattaatactatttaattaatgaaaattaaaaaattatttgatttaaaatgatcaaatgaaatgaatgaatgaaagtggtgggatggaagcagtgaattgaattccgtcgttggaccaatcactgaatttttgtgtcgacgtgtaaaaaagtgaaaaaaaaagggggaaaagccatagcagaagaaaaagcggacgaacgaccacacatttagcagcagagattgtgaaaatgaagcccaaatatccaggcttaggcctggatcaatgcttggaccccaatattttaaaatgcttttaaattttaaaatatttatttggtttttgattacataagaaattattaccgtattggaggagctgagcaattaatgaccaagctcagaaagacggtcaatagaaaaaagcaattcatttgctaattgattaattaattaatattatgtaatactatttaattatttagtattaaaaatattttattttattttacgaattaaatatttattttccaaatgatcaaatgaaatgaatgaatgaaagtggtcggatggaagcagtgaattgaattccgtcgttggaccaatcactgaattttctgtgtcaaggagtaaaaaagtaaaaaaacaagggggaaaag

SEQ ID NO: 26005 - DNA, 2039 bp, Heterodera glycines
gtcccggtcccggcttctcaggtcccagaaagtcctggtcccggcttctcaggtcccagaaagtcccggtcccggcttctcaggtcccagaaagtcccggtcccggcttctcaggtcccagaaagtcccggtcccggcttctcaggtccccggtcccggcttctcaggtcccagaaagtcccggtcccggcttctcaggtcccagaaagtcccggtcccggcttctcaggtcccagaaagtcccggtcccggcttctcaggtcccagaaagtcccggtcccggcttctcaggtcccagaaagtcccggtcccggttttgcccaaaattcccggtccctttcaactctacttgtaatgatacacaatacatatgtatgacattgataaagaatgaattgtaatgagtttaacaaaataagcatattaaaattaagtgggtactgttaaaaaaatttcgattcctaacttgattaaattttaatatgcttttaattaggtatttgcaatttatatacaattaaaaacatttttattttttaaatccttaatttggtgcccaaacttccgcctccctgtctgtgaaggttatggtggcaaaaaatttatatatgcatgaaaatttaatgagaaattaacgttttaaattattaaaattttgactttgttggtattttacatcgtacccattaaaggcagggttacggtaaaattgaaaagggtgaatgtgttgttaatttctgctcctgtttattaaggcatatacatatctctctcattacacattacagtattacctaatagttatgtagataattactttttgccatttaggcgcattgcgtttaccattttttgttgacaaatttggcaaaacaaaaaacgctccttttggcaatttgcacaaagccggtggtttctttgctcggcggctttttattttctttcaaatacggggatttttttaactaatgtttgatttgtgaattttgcttgccaacccataagcgcataaagcccctccggtggtgttaaatttggcatatgtggtgccaattgcggggatgaaaagcagcgaacaaatgccaatggaggcttaattttgcgaatgccgaatcgcgcaaaacaatttagcgggcaggggggggaaagaatctctaaagccatcggataaacaatgtaaccgaattttctctaattatcactcaccccgtctctatttataccccgggggataaatgaatttttattttttcgaaaataatttttttaaaatttttataaaaattaattattctgaattgaaaccaatttatatatttaataaatagagacaaaatagttatgtgctaaaaattggcaaaatccgctctatttatgcataaaattcaagaaaaatctcattctttatcattttcgcccgcacaatagaattaaatacctttcgaggtgtttgtgggtaaaatgttcccttttctgacaaaataaggaaaattttaacctaaatttttttatcaaaaaaaaaaattaaattttgcgatcaatttttagaaaattttcaattcttaggggtgtattttttgaaattttttcaggtcatttcttaggggtgtatttttttttcgtggagcgacattggacgcgtaaattggaatagagccaagtttattcctatatctagcaaatttctataataaactaatcggtatacgaatcagaaagtaattgtaaaaaaagaattatattttttttaatattacatatctacatatatttactttaaaatttttttttccttttaaaaattcttattttatttcagtgacgaaacgttcggccacccattaaaaaaagtatggtcaaatgggcgcccaaggctgtagccttggctaattttttttacccaaaagtgtacacttcagtaccaggcgaataactcgccagggtttgatctgagcggagggtggccagcgaacttattatagagctttgaaagctcgattttttgaaattttaaaatttcaaaaatattcaaaaatttt

SEQ ID NO: 26006 - DNA, 996 bp, Heterodera glycines
ctgctcaacagtattaggtattccaactgcattctcagaataattacgccgatactaattgttctggaatttgtttctcggcgcgtttgtttgggaaaaatttggaaaattggctatctctttttctgctcaacagtaataggaattccaactgcattctcagaataattacgccgatactaattgttctggaatttgtttctcggcgcgtttgtttgggaaaaatttggaaaattggctatctctttttctgctcaacagtaataggaattccaaccgcattctcagaataattacgccgatactaattgttctggaatttgtttctcggcgcgtttgtttgggaaaaatttggaaaattggctatctctttttctgctcaacagtaataggaattccaaccgcattctcagaataattacgccgatactaattgttctggaatttgtttctctgcgcgtttgtttgggaaaaatttggaaaattggctatctctttttctgctcaacagtaataggaattccaaccgcattctcagaataattacgccgatactaattgttctggaatttgtttctcggcgcgtttgtttgggaaaaatttggaaaattggctatctctttttctgctcaacagtaataggaattccaaccgcattctcagaataattacgccgatactaattgttctggaatttgtttctcggcgcgtttgtttgggaaaaatttggaaaattggctatctctttttctgctcaacagtaataggaattccaaccgcattctcagaataattacgccgatactaattgttctggaatttgtttctctgcgcgtttgtttgggaaaaatttggaaaattggatatctctttttctgctcaacagtaataggaattccaaccgcattctcagaataatacgccgatactaattgttctggatttgtttctctgcgcgtttgtttgggaaaatttgggaaattggctatctctttt

SEQ ID NO: 26007 - DNA, 2390 bp, Heterodera glycines
  unsure (1)..(2390): unsure at all n locations
aagtcaaactttttaaaaaattttttgataccatccgatccttcggtgcctgagaggtcagggatccgctncaatacaatcccaaaatcaaattttcccatgccaaaattaggctgattttgatgtgtgtaagggtcgggggcggctgatagttcatctgcggcattgtgggttgttgcacttgaacgcactgttcgttcattggccaagcatatggctgacggggttggaaatttggtggttgaatttgttgagattgagggcgaccaaaattttgttgaatcgctgctggattttgctgacccggcattcgaaccggtatgttattggctcgacgcgcaaaaacagccgaatggtgtatttgctggtggatttcaacaccatgttgcgtcaaatttagtgccgggtttgtgttcggattttgatgagcactatttagctgaccaacgatgaccctcccaatttgttcggctaacaaccctatttcattaaggttttgcgggccaaccccaacacagcggttttcattgaccggagtcgaagttcttctaatgtttggatgatcgaagaagtcatcttcattttgggaatgtccaaagacaaaatttcgaaaaatttgttgggttgggcctgccctctctcccaaattttgtgtccaatccgttcggtttcgcataaaaccttggtttgcctcctcttcttcgttttcgtcaaggctggcacgttcattttgtcgcaactgtccaagtgcgctgtcattgttcgggttcaaaaggcgccgtctcatttccatcgagtccagctgctccgaattctccaaattgggatccgccaccaccacgttttggttcatcacgcctaaagttctatttggtggattctcccgaaaaaaaaacatttccatctctgtcgagcaatatcccttcattttgagctcgctgtctagtcaaacgagtatgattgagtgtccgttccaagttttccatttcaaaatcgactatttgcaccccccaggtgacttgagtgtcgaaaaatttccgaatttgtctcccccagagaacttaacaaacaattggtttttgtttgttcgttttaagcgtttttgtttcgtctcccccagagaacgattgttgatgttgattgtctcccccagagaacaatatcaaaagtcgaaaagtttatcgtctcccccagagatcgataaaatgccgaaatccttcaaaaatttgaaccgatgtcgttgttaccttgtgttctgtccaggagcgccaaatagtaaaacttctcgccgttcggtgctgttcgctgcttatttgccttagattaattagggcaggggcacgggaacagtctttaattaggacaggagagattggggacaatattattattagggactttgaccaattcgttcggcttctttccaattatgccgactcagtcaattcgcaataaatgcaattgactgcacaattaaaacacaaacaaaattattccacagcacacaaatatccgcaattaccacgaatcattattaaaacaaattactacaattaacgactaaaaaaaacgcaaatgaaaaagctcaacaaaaataactaaacaaaatgccaaaaataataaattaaaataatatcgaatggtcaaagtcaaaatatcactacaggtgggttgagtcccagtgattgaaatgcaggagaattgagtcccagtgattagaatgctgttgggttgagtcccagtgattgaaatgctggtgggttgagtcccagtgattgaaatgcaggagaattgagtgccagtgattgaaatgctggtgggttgagtgcaagtgattgaaatgctggtgggttgagtcctggtgattgaaatgttggtgggttgtcccagtgattgaaatgcaggagaattgagtgccagtgattgaaatgctggtgggttgagtgcaagtgattgaaatgctggtgggttgagtcctggtgattgaaatgctggtgggttgagtcccagtaattgaaatgcaggagaattgagtgccagtgattgaaatgctggtgggttgagtgcaagtgattgaaatgctggtgggttgagtcctggtgattgaaatgttggtgggttgagtcccagtgattgaaatgttggtgggttgtcccagtgattgaaatgcaggagaattgagtgccagtgattgaaatattggtgggttgagtcccagtaattgaaatgcaggagaattgagtgccagtgattgaaatgcaggagaattgagtgccagtgattgaaatgctggtgggttgagtgcaagtgattgaaatgctgttgggttgagtccctagtgattgaaatgatggtgggttgagtcccangtgattgaaatgcaggagaat

SEQ ID NO: 26008 - DNA, 2085 bp, Heterodera glycines
aaatcagaaatgtatgtggaaaaaagtgatctttgcgtgccaaatctcgttttgtgttgctgcttgaacttctgccacgtcgattcaattgtgttcgtatgctgcccagtgaaaggatccttgaattaatccatttgtagcgcatttcgttgccacagtcacaaaaacgagtggtgtgtagaagcttaagttctctgagccattcttcgaattcttcgtctggtagagccaaaactttgaataaagcatcaagtttaaaatttttaagtgtttccattaatctaaaagcaattgtgacaataaaaaagtaaaaaaaactgaaaaatgtgaaaaaaaaaaagcggacccaaagtccactagtacctaaaaatcaatataccaccgaaataataacaggcgaacgtaatataataaccttctctaattaggtgcgaaacgttcgctgtgtcaaatgtcgcgcgtggggtcatttgaacacggaccgcgaatgcccactgtatggtatgagtggaaatgctgaagaccatggctgtgagtgaatcattggcatttaaatttattgttggttttgtttatgtcaatccattttttcagatgcaaataatccctccgatatcattcgtgatttaaatgtcgaaaagaaaacaaagactgtctctgatgtcacgaccaatgagcagattgatataaaaccgaaaattgaggtgcgcaaaagctacgaagagaagaaaaagaagcgacaccattactcatcggaagaagaggaagaggggacggaagaaaagaagccggaaccgatcgatcaggaacaattgctggtgaacatgcgtgaggagcacaatttgaagttcaagaccggcattctgattggtcttcgagcggacgaacacataaaagtcggcacaactttgaagtttcgggcttatcaatcaattacctttcagaaaatgtcagcgatggttggaggaggagaggaaaaaacttttgaggcttttctgaaaggactggatgagaaaaaacgaagaaaattaatgaagtaaacacatggatgatagttattaatgtacaaaagtcaacatttagaaaaatcatgaagactgaagtgagcgatgactccgatatcgagaaggacaaaaaacagcgaaggaagcaaaagaaggaggaaaagcgcaaggcggacaaaaaacacaaacatcgcaggtcgtcgagtcgggagaccagcagaaagcggaaggaggggaagcaccaccgccactgaaaaggggaagcggactcattcttcggattgccgccatttgtataataaaatgtaatcgcttttttctgtctttcatttacataattattttatcgacaatggtttttctattccattacatttattttttacgtattcactttgcttggatcgatttagcagcgtgaggatgactttgaaaatagttagttctcttgagaatttgatcagattgactccggatgtccattcgattcttgtcctcgatggggacggagttccggttgtcagtgcaggcgaagaggtgcacagttcaactttggtataatgatttatttcggtgttaatttagatacgaaatcggtcccagtattcaatttcttacaattcgcttgtcgagcaggccaaaaagttgggcatgggagaacagaaattttgggtgtttcgctacgaaatgaaccaggtgagtgtcaatatttcaaatgttttaaatattttcgatgcaggtggttatgctcaggagggatgcatttgccgtattcattatggcttctgcaaatgccaatatgggaattctctgcactatgtcagcgcaacttggaccaattttggaggaatgtaaagtcatcgtaaacgaagtcataaatggacagatggccgggcaaagtccgagataaatgaccaaatttttcttgtcgagaattttacatcataaagttttaactataatagaatagagaaatcatgcttctactatggttctttattaatttagttatagaatcaaaagcctataaacgcacaggcaaatacttgtaatgctctccattgtcttttttgactctaga

SEQ ID NO: 26009 - DNA, 1139 bp, Heterodera glycines
acaaatttgagggtggtgttgagcgccctccaaatatttgtcgtctgcaatatgacttttgtcgtaaacccaatcagaattttagaagacaaggtcttccaaaattctgattggtttttacaacaaatgcctaattttatacgacaatatatacatatatactataaaatttgctattctgattgtacgatcattcggacgtcaaagacaaacaatatacatatttggacgatgatatatttttttgtcgtaacgataaattaagaacggacgacaaattgtcgtttgtcggtcgatttgacattcgtaattctgaaaggcgccaaatggtcaatttcattccgaatcattttcagtgaagcccgaaatgaaatacatcggaaatatgcacggcaacgaggcgatcggcagggaattgctgctgcgattggctcaattcctctgcgacggatggcggcaaggccaacggtcggtggtggagatgctcaattcgaccaacattcacattatgcccagcatgaacccggacggtcgcttttccttttgccatttggcaaaacgtttcatcgctgtcgcccattttaggctttgagttgacgctgaagacaaagccggaacagcgcggatgggtgacgggtcgcacaaacgcgcacggggtcgacctgaacaggaacttccccgacttggacgcgatcttttacaaggccaacgcacaacggctgccgttctttgaccatttgctggaagtgttccacgactccgacaacggccaacaggcgagtgacagcaagaaatgtggtcaaacagagcatttggtgctttagtttgagcccgaagtcactgcagtggccaattgggtgctttcgtggccttttgtcatttccgcaaatctccacgagggcgatttggtgagtcattcatcagcaggacttcggaatgttcgtcgtttcacaggtggccaattatccattcgacgaaagtctgaacccgaacgaacttcgcgcctattcaaagtcgcccgatgacgtcacttttcggttagtttttggcacttttccttgggtttttggtttagcctctgatttaaattgttcacaaagatacatcgccgagacttacgcccgtgcacacgcgcacat

SEQ ID NO: 26010 - DNA, 2033 bp, Heterodera glycines
tctggaataactttttttgtttttgtggtataaatttcaaataaatctcataaaattctccctatttttctcgattaaaaaaagatacaaaaataaaagtgattttggggttcgggaccaaagggggtggacaggattttgattgaaaaaattttttcacaaatttttgttaaattgttgcgatatttggtgggagttgatgatatgctgccggttaaaggctttttggcaatttttgccctaaaattatcaaaaaagtttacttttaatttcttttttaagtttagtttttaatgaaaaaaattatatttggaaaaggttttcattattttggcaaaattatgaattttgcccaaatttatttttgagttttttttgcacgtatttttgaaactaaaaaattgttcggatgcgtctcataatctaattccgaaccctctgcttaaatctgaatttccaagccaaaaattaattaaattttgaaaattttatttagaataacattttaaatttttccattctttcaattttcgagtcctacttcgagaaaggtctcttataatctttgttgtacctctcctaatctctgttgtacctcttctaatcactgttttacctcttaaaacgggcgcgaatccgccctttaaggccgcgaagcggcctaaaaatctaaacccaaaatcaattttataaaataaataaaaataagaaaatagtcctttagcagtcacaatataagtttttataaattgaaatattaaataaattctacaattattattttacacaaattagaagaaggaagaaaataatgatttgacatcagcttttaaaattattaaagggttcaccagccttggtgctggtaaaagtttctttttctcggaaagcgcaggaggcctttacttttgcgagtaaagcgccacacggccaaaactcaaaataattttttccataggatagtaaaaaactggaataatcttccaatggtagcggtacaaattaataaggcaaaggaattcaggggtttattaaaagcaatgagttctgagtaggaattttctgtgccacatttacattacatattcacctgtgaatttattattattcaaaaccaaatgaaactcgagactatgcaaaacatccaaattttggctgaggttagttgcattattcgagctaggccccctagaaattttcgaaaattttttttgggttgaaaatgggggtcaaaaatatttttctggggtattttgatgtgctgagcacgaatctgatgttaattttcagtttaggaaattttagaattttttaaaaattcaaaaatatttggcaattttttgaccctcaggattttgggctaaaatttgaaaattcataactcaatggaggaccggtcaatttaagtgatttaaagctttaaaaatagcaaaaaatcgggagaattttatgggatttatttgggatttctatcttctaaagaaaaagagttattccagaaattctggaaattttagatttttcagaaaaaaattcagaactcccttctgaaaagtcattctgtaaaagtaaaatactacaaagattcgcaatttttttctctataatataaattttattttacatttttatcacttctttaaaaaaagatattaaaataaaagtgattttgtgcttcgggtccaaaggggggtgacaggatttttgagtgaaaaatttttttcacaaatatcttccaaaaatatgtctttaggggtattttaggacgctgatcacaaatacatgatcagagtttacacttatggtagaccgtaattgaaatatgctcctgaagtttggaatctatctattcaaaaaaatattaaaaatattgaaaaatgtcaaaaatatttcaccaaaaaaatcatacaactttgaaccctagttataatcatttttatgagaggttattttttcgacttaattattttattccttttaaattcacaaaaattctaagattcaatttttctcattttattttttctgaattt

SEQ ID NO: 26011 - DNA, 1186 bp, Heterodera glycines
  unsure (1)..(1186): unsure at all n locations
ggggttataaaatagagcccctactgttggtggccttaaaaatgtattgaaaatattttttaattatgtaaaatttcatnttaggcgtatgaagctaaagaactcacaaccttggcatagaaaaaatgacattgccgacaatgagaatgccgtgtatttataggggaaatcttgcccagcaaaatgccatttggccccttttggggggaatgccattgacgaaatcatttggataagaatctcaggaagttaggaagaagcagcagcattttttatctgtgcgaagaagcagcagcattttttatctgtgcatatgcaagtaggaaaggaagtgcgtaaacggcacaactcatttgggggtcatatggtagaagccaaggcaaagcatcccgtttgaacatgcttaattgggcgggattgcgtgagatgaaatggcatttagaagagagtaacttaagacacgaaaatgccaaaagcatcacaaaaagagaaggacacaaaaatgtggccaaaccaaatggaagaacgtagtgttccttcccgagcttcggggggagagaaaattcgaggatcggaaaggaaattccccgaaaaaatttgtaggggtaggcttgagcaaatttaaaatgtacagggagcaattttttaacggggagtaaattttcataaaaattgaaaaaggtatcagaaatttttctaataaaaacacttagaaatcatctcatgctatctgaagtgcaatgttttgttgttttagttttttttctggcttaataatcgtttagatgatgtttttttaattttttggttactttttttacattcgcaattccccgaattgggccaaggaaaaaccatagaataaaatatacaaaaattgtgtatgttatgcatatacctaatagatatgagaatttcgaattattatatcagactatgtacatacattaaacatgcatttttctgttattttggccgaatttgaacatttcagagcaggaaataaatgaattaactagagtccggcgggatcgagactcccgcgcgattttacgggagtcccgctcccgactcccgcttttttcggtgaacgggatctttaacgggagcgggatttttacgggattcccgttcgggactctcgtcccggaaaaattgaactcccgatcccgctcccggaaatttt

SEQ ID NO: 26012 - DNA, 2062 bp, Heterodera glycines
  unsure (1)..(2062): unsure at all n locations
ggggttcctggggccccggcgtttccngggtgccagggctttccggaaggaccgggcggtccttgtcctccgggggttttcgggctgtccggggctgccgggctggcccggtgctcctgggtttccgggaggtccaggtgggccgggaattgtcgtgctgacaaaaaacatttcaataatttttattggctgagttcgattctctcgccttttgattcctggttgtccgggttgaccgggctggccaggtcctcctggttgtccgggttggccaggctgtccctgaggacccggtgggccaggcgggccttgtccgccgccctgttccaggctgcccgggctgtccatcgtttccgggtggcccaggcggtccttggcttcctggctgaccggacggcccagctgggcatttctgacacgtcgacacgggcggagggcatggcggtgcttgttgtccgggctgtcctgggcttcccggctgcccggcgccgccgggctcgccgggtgttccggggggcccaggcgggccaggaggaccaggaggacagcttggctgctgcagttggcaaacgcattggggaggcaatccctggcgcttttggcgtaggaaaatggagttgaagggattctctcgcggacgggtcggtggagtgacactgatctgcacctccatcagctcagtccacgcggaatccgtgttcacgcggaaagcctaagaggcaaaaggattggatcggatgatcaaacggtgtttgtttgtcagttcacctgaacaccgtccatcacgcggttgttcatttcgttgatttgagtgtatagttgcgggatcaccacgagagtggccaaaatcgcggccagcgaacaaagggaagcaattccgactataattttcgcttcgtgcattttctttcctgaaatttgacttctgttgcggagggtttagcagaagaagcagtgaattatgttctgttttcaaattgctgcgctatgaatagtgagtgaatgaatgctttccaccgaatttcgtctctcttttatacgccttttctgaggcggacccatcagaaagaacgtgcttttcctttttttcctttttcgtgtcgtgcaaacgtttcgggacttttcagcccctcaattattatcggagctgcgctgattgtgcgcatgagcagcgaccgaagcttcgctgttcttccctaattaggaggcaaagagaaagaagcgaattccgccagcggagtcagtcgcccttccccgcctcgtaaaaatgaggacgggttgtcaacgatgctttgtctcccaaggacattttgcagactgtttgcccacgggcaaaaactaattatttttggagaaacgacaaattggagaaggaatcattcggcggttgctgatcacagggaaaaaaagaaaattcaggaaggaattgagagacgagagggattgagagagagagagagagagagaaggaggggtgattagtcattgaaacagccaaacaaccgtcagccaattaattacattctgctaatgattggctaatgatagcactcccaactgtgatgacagagtaaacctgtctttaacattcgatgcatgttttgtaaaggtatgttgggccataagctttgatcattaagtgtgatatgccttccatgatttataattttgctcagtatttttgatagaaaaatttttattctgttgattctgaataccgaatgtgttatgtaattgaataataattaattcaataattaattgctttttcataccaattttttaaattttaaattggatccgatgcctaaagtctctctccgatccgatcgaaagcttctgtattcctggtacataggtatgtataaatagcattaaactgttcaacatttaaaaatataataatccaataactgctgaagagtgtttccctctcatggccacccgtttctttcgtttcaattttggcacttttgtggcgctgatacattccgccaaacttcgntgtctgtcanncacgaatctgtccaggaaatattaanngtnagatgtttctgctgct

SEQ ID NO: 26013 - DNA, 1881 bp, Heterodera glycines
ttgtgtgtcagtcaggtaggcactttgataaccccttcgatttcgtgacatttatccccaaaaaatcaccgaaataggcttatgtcggaaaacaaaggttttgccatgccttatcgtattcgacccccatccacagaacagttcacactgcacgcgtgcataaagggcaacaaattggactttcatcgctcaatgggcccggagaaggcgcccctcatttacgagcagtttctgcagcgtctgaggaataattacgcgccggagagagtgaaagtgggcgggcgaacccgaattccaccgttaaagttccaaaattttcatcattaggatggcaaatttggtgcaatgatgtcagtacaaattgaaaacgacggtccagtgacaatcaatttggacagcaaacgaagagatgaatgaaggggacaattttattgacaactatcgagatttgaaaacattttcaccatccaatcgctttatcatctgttgtgttatgtacaaaaaatcgaggacattaacattgctgagcaaaaccagtgacaatcgaagtcagtggctaaaaacagagtgtgagaaattatttgatcaattaggcatgtgcactctatcatttgtgtttttaacacctttagaataatgcaaatagagcacacataaatttaaacaaatgtaaatgttgtgggatgaaatagcccatcgaaacacacaaaaaacagtcagaaagctcttctcgcgccacctgtgaaatgagtggaggcatttacccgccggtcaaatgatgtcagccttcgttctttggaggcgtataccaaccttaacgaatcggaagggggcaaatgatgggaatagcgtaagataagacccgttgcaaatgatacactcaaagacagactaggcaaccaacccgatttgttgtggatttgcacgagcgaccgaaacgactgctgcgccctggccaagctgtagttgatgtgcgcgttgcgctcaaacgaaatgcgtgcattgcctttgacgagtgtcgcgccgagttgagtgatcagcgactctacgctgtacgcgctggtccagccctgtttggtcagcagttccatgcaaagtgcgccaccgctaagcacaaatcctaaaaggaaaaataaatcagtgaaacaaaataatcgaatcgacattgcattccgtgtgcagtttacttctcccccttgtcatggaggatcgctaattatgggaaataaatctttagaaaatagcatttcaatatctcaggagaactcaaaaacaaaagacagcaagaagctcctattaacgcaccgtttgcaactaccggcgaaacaagacggacaaatggaggctcaaagcttaaattgaaacgtaaaaacgcattattgaaaggaatccgttcaaaaataattcacgagccaaaaacgcacgggaatgaattggcaaaagtgaagtggaagagcaggtggtcttggttgtgcggcggtttggccaactgtcgcatgtcagcagcaagcagactgtcgttgtccacctaaacaaattgagtgagatggacacggaaccatctctggacattatcataatcgttggattattttcccttattcgtttgatccaagttttaaagtgttcccgacctttttgagcttcacgtcccactcgtataggttgtcgttttggagttcgacggtgaaaacgccttaaaatggcaaatttacattatataaagtacaaatgcaaaaacagtgaccgtttttgtagttttggcatcggtaaatttccttcagctccttcatcaggcgatcggaggccgtcaatgagccggtgggatttccgctcaaatgttgctggcgctgcgcttgtgcaacacgcgtcaaagtggca

SEQ ID NO: 26014 - DNA, 3154 bp, Heterodera glycines
  unsure (1)..(3154): unsure at all n locations
cttaatcactttccttacggcaacattcccccttctctccccacgggttaccgcgcaattccttctgttcgtttgactgcttttgataatgttgatncgctggaaaagcacatatcttactgacgcggttcaaacacggcttcagatcatttgtgagttcgaaatggccataaaggagaattcttatgattttcgaaaaggaccccccccccctcgcgcaaaaaaaagattccatttctcatttccttttatatttttggttaatgcccttaaaggtccccattcttgttcttctcgtttataccattatcggtgcactgatattcatgctcatcgaaggacccaatgagaagtacgagttggaacagttgagacagcggcggctcaaactgctcgaagtcgtcctccgatcatttgctttggctcccgcctccctaatgccccccccccgcctttaggacacggcttttcgtctgaataccatcaaatcgatgactcctctccaagcatacaatcacacggtgacaacgctgaacaattacagagaacgattgggcatctccgaggtgtttatgaaccaaacaaaatggaccatttggggttcgatttacttctcaatgaccgtctacactaccattgttatggcctaatatcgcttcgaaaagtacggtatttatttagggttacggtaatattgttcctgcgacgacgtcaggacgcgttctgaccataatctacgctctaattgggtgtgatgcgcagatagtctcgtccattgtaaacaaagtgttttcagtattcctttggcattgatcgcactgatcactatgggcggacttttcgctaatctttgtctgatcgtttggcgactgatcgcgcgttcattgggctgcttttcaaaaaagttggaacgaaaggtcactttgtgtttaaacttaattttgttttttaaatcactgataaatttgacagttgacgatagagcccaaagataacaacgaagacgaaattgaaactgagacgagggcaagccgagaaacactttccacggagtcggacgaaggaaatgatgaactgttgcaggtcagtcaggcttccgttagatcgatcaggcgttcgatcgatcagaaatctttaaagtcggctattcttctgtcatcgttcggtcttccgttcaatcggccgctttctcgaattgtctcgaacgaaagacagatcaatcggtcgtccgtccgatcggtcttccgttagatcagtcggtcgtccgttcgatcggtcttccgttagatcagtcggtcgtccgttcgatcggtcttccgttcgatcagtcgtccgttcaaacggtctcgaaagaaagacagaacattcggccgccccttcaagcggtctcgaacgaaaaacagatcagtcggtcgtccgtccgatcagtcgtccgttcgatcggccgccccttcgaatggtccgaacggaagacagatcagtcggtcgtccgtccgatcagtcgtccgttcgatccgccgccccttcgaacagtctcgaacgaaagacagatcagtcggtcatccgtccgatcggtcggtctgattcccaacgctcttagctcttttagttcccagtttggtttctgatcgcggtgaccatcatctggatcctgctctgcgcttatttgtttcttctctgagaggatacgtgagattacggttcggcttccgtttcctttgcgattttgcccttttcccaggtctttccctctatttcgtgctagtctccttcctcaccattggattcggttcgtcccttcccttccctccctttgtctaatccctttccccccagggatgtgatcccctccaagcccgatacatcattctcgtcggattatgattctgatcggattgcccctcgtttccactgttctaaccacctaaaaaagcaaatttccgcgtttggaaaaaaaagaaaaacaaaaacgaaaaaggattaccaaaaacattttaaaagggggggggggggggggggggggggaaaaaaaaaaaaaaaaaaaaaaaaaaaaataaaaaaataaatatttttttttttttttttttttttttaaaaaaaaaaaaaaaaaaaaaaaaaaaaaatattttttttttttttttgtggagaacaaaacaataataaaaaaaaaaaaaaaaaaaaaaaaaataattttttttttggggaggatttccccaaaaaaaaaaaaatttttttttagaaaaaaaattttttttttttttttttttttttttttttttagaaaaaaattttttttttccaaaaaaaaaatttttttaaaaaaaaattttttttccccccaataaaatttttttaaaaaaggggaaaattaaaaatttgttaaaaaagaaaaatggttttttaaaaaaaattttttaaaaaaaatttttttttttttttggggggttttttttaaaaagggtttttcccccgggaacccatttttttgtcccgggcccagtttaaagctttttgggcaaaaaggtgttccccaattgggggggttttttcaaattttttttttaaacaaaattttggaaaaaaaaaaattcaagggacattgtttgggtcggtaaaatttccagggcctcgggtttttttttttaaaatttttttgtttttcagggggccatgtttggattttggcaaaagtgcattngattttcactaaggcctttgccattgtggaccaattcattcgcgctcaaatggcattgccacgcggcgctggcgtgtcctttgttcgccttgaccgggacgactttcacccgctgtaccaggtgtactgtaaaaattcagaaatgcatgcattactgtagccaaaaaataaagcaaacagtacagtagtcgattgattgcacattaatcgctttttgccatttaaacatgaacagatttccgtgttgtcaaaccatccggcaaactttgacgagtccgagtactgctccattatgtggtccgtatttcgcaaaatccagcaacggacaatcaatggtcagaaaggcatacatttgtataatttttaattataatatcatccatttctgattatattactataacttccatttttagggtcttgataaatcgctaattatttctaaattagacatta

SEQ ID NO: 26015 - DNA, 1955 bp, Heterodera glycines
gcacgtttttctcagacttttgggggacaaggagggccggcggtgccgataggcgccgccgggaaaaattttgtattttttaatgcgatttgttaacagaatttgtaaaaaaagaccaattgattaatttttaggtttttaggatgcttaaaatgaaagaaaaaaagttggaatattttttttaattaatatttcaattaaaataatggtaaagaaaatatgaagaatattctatcccagtggggaattgaacccaagcgagaaataataaagtcagaaggttttagccacttgaacacttatgcatatgaacaaatgctttaaatgtttgttgtttctctaaaagtttagcatgaacaatgaactttttctaatgtttttgataaattttccaaaatctttttaacatttttataatgagaaggcaaaattgggtaattaatttcctggctgttatgaagcaatacgccgagcagggacatgccctgctctatacctagaaaatttttaaaaaatatataaaaatttgttgaaaaatattttttggccattccccgaccggggccaagcccacgatccccgacaattttgcgatcaccgaatccgatccatgaggattttagtggaaaaattagtgacatacaaaggacattttaatcaacctatttgaatattggttttttattgttacttttttaatttttttaatttaattaacaaaattagcaaaatttccaattttctgtcgtcggcagctccgtaagacctatgattcttgataatttttagaatttacacaagattttgtaattttaagtttttttttgcaaaaaatgaatggaaacacaaataaaacgttttctagaataaattttcaaattagagttttcagggtcgctgctcactattataacatttattttggcactgatttcatctgttcataaatttgacttaattccatgcatttccaaaatatataaaattaaaataatgaaacgaatcagtaagcaggtggacataaatgcaattaattttataaaaccgatcaaattcatttaaatttagttgaatctttgatcagatgacatcaaatagaacaaaaatgaaaaacccccttattccttaattattgtttatctcgtattaattactccccaattcgttgagaaaagcaaaatataaataaatagaattattattaaaatgttgtagcatattgatgatataatgactaaacgtggctaataattgattgaatatataatttagccagtcttaaaattaataattacaaattcattgggaaataaacattttttatgaaaattattctttatttttttacaaaaaatcatgaaaatgttactaacatttttattattatgcgcattaattttcgaaaattcaattgatcaaattgaagctggcaaaataagccaagaaaaaagttttgctgaaatatttggccaaagatgggacgacggagcagaagaagaaaacatctgtcaaaatgatcaaataattcatggagaaacagttgatcagaaccaatatgatcaacaatttgatcatttggaagtgaaagaagaggagagtgaagaaatgtccacagattgtgatgaattgggccaattgccaatgccaacaaataatggacaaagttgtgataaattttcaaatgaaactaataaaaataaaagagaaactgtggaaaaatttcataaaattaaggagaaagttaagcaaatgggaaagaaatattcaacaaaagaatgggtgaaaattgaaagaaaaattgcaaaaaaattgggcgtcagtcaagagaaaatttacaaatggaaaaaacaattgggattgaatatcataaacagattaaggatgaacaaaaacgtaaaatattaaaacaattctcgggaggaatgcaaaattaaaaacgaaattaaatgaaaaat

SEQ ID NO: 26016 - DNA, 1541 bp, Heterodera glycines
aggtgcctatttcgcgattttttgtgcctaaaaaaggaagccctattaatggcattccatcacaaaataatatttggcattattatttggcgttctgtctcactttgtgtggtccaagtccaaagtgttgatggcacacacaattggacgtcgaattacgttggtgcagtcgtactcacctgaaaccaaataaatattaataattttttaaatttaaatatttttgtcataccgccaattcccacctccacaattgcaacgtccacgcgctcgtcgcaaaaaatgcgaaaggcgagcagtgtcaaaaatttgaaataggctggcattagtttgaccttcaaaaaattaaaaaaaattttttagtttcttaaaaatttttgggacaaaaattgctattttttccaaaaaaaaaattcattttttgagtattggggttgaattattatttttttcttgagggactgtccccaaaggccaacaccaaaatgaatttcgagatttattctcgacctgaaagtccgcagtctcgagaaataagtttaaattccggaacaaaaactggtcgatcttggagcctcgagaatttctcagtttccagcggcataaaaaaatggtcaaattttgtttatttttaaatgcacataaaaatggaaaactccgctaattttgcaaaaatcattggtacttttccgcttgggggccccacatttatttaaattaaaaaacgtcaaacaaagagcgcgcgccatgcggatccatttgattatattttggcccaaattgttgtttttatgactcccaaatagatgaagcgctgtttttgactattcagcgcgctttttgttaacgttgcttaatttaaataaagatggggcccaaaagtaccaaatcctttttttaacagcagcaccattattaatttgccacctcttttttgtgctcaaaaagtgtgttgtaaatgtgaaaaaattgctgggtgaaaatttgctttgaaattggtcgtccattgatgcgaatgcgttcacggacatggaccaaatggggagaactgtaaaaaattaaatttaaaattgaccaaaatttccttaaaataaaaaattttcatgtcttagattttgtaattgggtgcctgccacccacccacacctgtaaaagccagttttgtagccaagggaacgcaaaatggattccagaaaagcggcggttgaacctgtaaaaagaaaataaatttggattttaattgattttttaaacaaaaaaaacaccttttccttttgtaccggtgatgtgtacaacattcagacggtcaatgtcgtccagctgaaaaaatcttattttttttacaaaaataattttttgcgaaaaataaaatatccaaagtggcgtattcgagttgaaagagataaactgagagacaataggaaataagaagaggaacacgactgttatagatagatttaagaaattgaaaaaaacaaaagaaaaattttatcaaattttttttaacccaaaagttattaaatctgtgtaaaagaaatttt

SEQ ID NO: 26017 - DNA, 915 bp, Heterodera glycines
ttcggtactttttgcttaaataaaacatccaatacgacattcagcattccagtcttaatctggtcgataatttcatatttaacttattattattattaatcttcagtttaatctttttaaaatggaataattcgtaattctcaagtaaaaacgaattctgactgagaattaattattttcatacctttggctgggctattttttattaaatttatttattttcgggcataaagaaggtttctatgccgctttgatggattttatagaaatcacccataaaaaagaattatgatgtggcaaattttaaattttttctttagttgtatttttatcggtgttttttctaccagtagttttttctttattttttaaaatccaaatcgagggaatcatttcggtattttttgcttaaataaaacatacaatacgaaattcagcatttcagtcttaatctggtcgataatttcataattaatttattatttttattaatcttcagtttaatctttttaaaatggaataattcgtaattctcaagtaaaaacgaattctgactgagaattaattattttcatacctttggctgggctatttttattaaatttatttattttcgggcataaagaaggtttctatgccgctttgatggattttatagaaatcacccataaaaaagaattatgatgtggcaaattttaaattttttctttagttatatttttatcggtgttttttctaccagtagttttttctttattttttaaaatccaaatcgagggaatcatttcggtattttttgcttaaataaaacatacaatacgaaattcagcatttcagtcttaatctggtcgataatttcataattaatttattatttttattaatcttcagtttaatctttttaaaatggaataa

SEQ ID NO: 26018 - DNA, 992 bp, Heterodera glycines
cccccgggtacttaagtttctggtcttttcaaaccgaaatttttgaaaaaaaaaaattagaccaatagcaaaaattttcaaaagccccctctttaaaagtagcgccgcatttatttatgctgaaagccaacgattaaaatgacgacgtaccaaaatggcaagcaaaatgatgttaatggggaacgatcgacggattccatggccgcagcacatcaacacgatataaacgacgataaagatgagactgaaaaagaaagaagcgcgttgttttggcaagaaaagtgtggcggtggaaaacgaacatttgggagaaatgaatgaattttcaaaactcactatgccacaatcgcatatactggatgctgttgaacaaactccatcattggctgacacataaacggaaaagcgctcatcagagtgacaacggacaactgaaaaaatggggagggaattggaaaggaactgaacaaccaatcccagaaaaaacaaacaataaaaaaatattagaccttttctgtaccaaaactagtttttttttaggcgataaattagaaaaattattattttaggcgggtaggggcgggcaagttagtggactagagatgttgctcgcctcgcttctcccggtattctgaattctaaaagtcggacaaaattttgaaaagcatcattttaaaaaattataaattctatcattgttcatcaatttggttttaaattaaaaaaaacaatgactatcgtagtcgcccaattattcacttaccataatgcccacgatgaagaacaccttgcgcacaaaacgcgaacgaattgtctggtcgttaaagcccaggtcgttcttcggcatcccggcctggccttgctccgcgaaatgttgcgaattaaacggctgttgttctgtataaatgcagtggataattattgtcaattaactaaatattttgtttccgaatgccttgggacggtggcggcacatccaaatccgcatgctg

SEQ ID NO: 26019 - DNA, 1340 bp, Heterodera glycines
tgctcaaacaattatttggaatgtcgaacaccaaaatatttatttaacacaaatggaaaaataatacaaaaaatatttgtcggagggacggagcaaattggggagcaccaaaaaaggaaggaaaaataacagaatgaattgtgggatggacgaagggaagggcatgaataaatggggaaaatcaatatggggtcaaagagcccaagagagggaattgcaaatatttgaattatttgcctctctaacacctccccttttaagtccaactgatcagtgccatgatcagtcacacataggacgatcggctggggtcgatttgaaggcggtcaacaggccggcgatttcgaatcggataacggcggactggcggtgattgattggatggcgggacttctgccaaattttggtcccttaatggaattgggaggccaaaagtgccattgatcacatcgagcgggtcttcgatgtcctcatccggaatttgacgtgcgcggatttggttggcatgaaatcggccgcgagaattgtttggcatcggcttgaccatttgattgtggcatgtacggcgctgtaaaaatgtgttcaattccgttcgatttaacgaaattttggaattggtggctttggaattgagtgccgttgtcagaaacaattgtttccgggatgccgaagtgcgcgatcagtgagcgcattttggaaattgtggccaatgcatttgtcgaattcatttcaaaaatctccggatattttgaaaatgaatcgacgacgattaaatacatttttccatggaatggtccggcgtaatcgatgtgaatgcgcttccatgggccatcagattttggccatgactgcagtgtcgtcttgattggatttttggcgacagctgcgcatgacgtgcatttttggacgaacgtttcgatttctgcgtccatcattggccagtagacatgcattcgggccaaagatttcattcgcttgactcccggatgtccttgatgaagcatcttgagaatttgcttctgcagtgatttggggatgactgtccggtcgccgaacatcaggcagtccttgacgattgaaatttcgtcgcggcgccgataaaattgaatgaatttggcttcgtccagcccttcaattggctgaaaatttttaggttctggccaaatatttttgacaaattgacgaatttgttgaagtgcctgatcatttgccgtttcttgggccaaattttttgaaggtgatcggcaattggttgacattgttgatcaaaattctgtccaatgccgattccacttcgaatgaggcaataatgacttcgtcgtcgtcggattttgactttt

SEQ ID NO: 26020 - DNA, 873 bp, Heterodera glycines
gcatccatgaaattctcatgcatatttcttggtcctgcagtgaaagaagaaggaagaatgacttttttctggatttctgcaccgctttttaatgcacgtcttttaagaaaatcttcaacatttgtgtaattgctactgcataattctgcttgatgtgatcttatatattctaacctatcccactcaattttcgctgcttggtctacaacccattgttgaaaaagcttaccagcgtaaaaatggggcaaaaatttattttccttaacatataaatgaaattttgtataattacaaagtgttatttttttccctgttgtatctttcatttctatactgtatccttcatttgaaattggatacagtaatggataacacattggttcaatgcatttatctaagtgatgtacttctttcaattttttttcgccttttggatgaactacaattttgactggtggtatgtcgtcgtttgcatcacataccattattgcgcaaacctcgttactttctggtatattataccttctttgatcaaattgattttttaggctaaaaagtaaccttatttcaggaacatcaattccttcattttgacattttgctttctcttgttcataaatgttcctcattaattgatacgatttgagcaaatttgttatttttcctcataaacatatctatataattcataatattctcatcacaaacattattcaatttgcaccgaatatcaatggcttcctcagaatctagaaaataaagttgaccatttggttggaatttcacactcagcaagtggcatggcgtttgaattaaacttatgataaacttgtccttgaattttatagcatggaggaccaggagttggaaatt

SEQ ID NO: 26021 - DNA, 809 bp, Heterodera glycines
tctaaaaatattttttttgcaaattagttgaatttggcattttgtaagtgataattacacattcaacatgagtttttcctggataatagtttatttgccccccccccttttgaaaatttttttgtttttcttaagtttcagatttttgtttaaacttcgtttgaatatacggaaacgaactaaaaatcatgtgcttcaataaaaagtaactttaaaccatttttagactaaaacggaaattcaaaaattttgaatttataccatattcgtgatcaccgatccctaaaacccttaacttttgaaaacaaaaaaaaattttcttcaaaaaaaggtggacaaactgaactataccttttatgccattcctcgtcacacaaaaccatcctatcgattattgcacagtcggtccccttgtcaacggtattttcttaccttttgtgtattttactgtcgaattgtcctcattgtcagattgcacactgtcgaaatatccactttcggattgtccactgtccagttgtccgggaaccttttatttggctaccgaaaaagctcattgggagccaaaaaacttttttgaaaatattatccattaaagagaagcaaatggaggaattaattaaatttggaataagcaaaaaacaaaaattgaaaagaaaaatatcagggcataagaaattgatccattaatttcataaacatttcatcattactatattatgtttttgggttctcattgctaacgaagaaaaatagaaaataagaatgtttacgcttcgataaatatttcaaaaaaattcaaaaaaagt

SEQ ID NO: 26022 - DNA, 858 bp, Heterodera glycines
aatgttggtggattgagtcccggtgattggaatgttggtggattgagtcccagtgattgaaatgctgaagaattgagtcccagtgattgaatgctggagggttgagtcctgttgattggaatgttggtggattgagtcccagtgattgaatgctggtggattgagtcccgttgattggaatgttggtggattgagtcccagtgattgaaatgctggtggattgagtcccgttgattggaatgttggtggattgagtcccagtgattgaaatgctgttggaatgttggtggattgagtcccagtgattggaatgttggtggattgagtcctgttgattggaatgttggtggattgagtcccagtgattgaaatgctgttggaatgttggtggattgagtcccagtgattggaatgttggtggattgagtcccagtgattgaaatgcagaagaattgagtcccagtgatataatgcaggagggttgagtcctgttgattggaatgttggtgaattgagtcccagtgattggaatgctgttggaatgttggtggattgagtcccagtgattgaaatgttggtggattgagtcctgttgattggaatgttggtggattgagtcccagtgattgaaatgcagaagaattgagtcccagtgatataatgcaggagggttgagtcctgttgattggaatgttggtgaattgagtcccagtgattggaatgctgttggaatgttggtggattgagtcccagtgattgaaatgctggtggattgagtcccgttgattggaatgttggtggattgagtcccactgattgaaatgctggtggattgagtcccgttgattggaatgttgg

SEQ ID NO: 26023 - DNA, 914 bp, Heterodera glycines
ttccttgtagaatttctttagcatttttgttgcgataatttaaaaacgatgaatatacaatatagttggtcctcattttagcaacgccactcaatcaattaatagatactcaatgaattcataagcacatcattctgacagttgccacaataagacgttgggttgtgagtctgctgcagaagaaacaatacagaataagtcactaattatcaaattcaaggacatgaatatgaaaataaaggattaaaaattgttgtgtgctcgataaaagaaggagaaaatcagtaaatttaggaacttaaaaatgcaagggtagagcatgcataataagacacaagtaattgtatattataatatgatgcatcagcacgatttgtagaaagtgtatcagatcgttaggcagtttcatttaagctgaacgatataatagatattcagtacaattctatcgctatagctcttttaaaagcaatgatacatttgattgtacataataaaagaaacccaggacaaattgacgaaagtgatcattttgctgggaagatacaatcaaaggacataataaaagaagaccaggacaaagtgacgaaagtgatcattttgctgggaagatacaattcaaaggacataataaaagaagaccaggacaaagtgacgaaagtgatcattttgctgggaagatacaattcaaaggatataataaaagaagaccaggacaaagtgacgaaagtgatcattttgctgggaagatacaattccaaggacataataaaagaaaaccaggacaaagtgacgaaagtgatcattttgctgggaagatacaattcaaaggacataataaaagaagaccaggacaaagtgacgaaagtgatcattttgctgggaagatacaatttaaaggacataataaaaga

SEQ ID NO: 26024 - DNA, 1429 bp, Heterodera glycines
tgggcactgcactaaattgagtccgtaattttacccttttgatgttcagaattgttggcaagtcgctggccatgaaaatgtgtttgactggcgacccgatcaacgcgagcaaagcactcgaaagcggacttgtcgcggaggtgagcaaaaattctacaactagagagattaaattaattaatttttgcatctgcaggtgtttccgcctgatcagttggtgtcggaggcgatcaaattgaggcgaaaaaattgcagcaaattcaccactgatggtcggaatggcgaaacaggcggtgaaccgttcatacgaaacgacgctccaagaaggtgaggaggaggggcacagagactcatacctgtgcctgtgcaagggggggggggggtcagccaagaggtcttacgatcgactttggccctcccatgggagggtcagagcccatttccattacgatcgaccatttcttgcctgctgaagacctctttttttttgttgctcttcgggtcaaaaaaatttcatcggattgcatttccctttaagtatccaccccttaaataatcagtcctttcgctcgtgtatatgaaatttgctctttttaggccttttgttcgagcgacgacttttccacgcttcttttgcaacggcaaatattaattcatttttcaacattttttaaagccattttcagaatgaccgcaaagaaggcatggaggcatttcaggagaagcgcaaacccaactggcaaaactcatagggacagggaaaggaaagatacaaaatgagaagcggcggtcgctgttggcaaaaggactctctctgtgtgcctttcctcatagaatgtgccgtacaataattgttctttccttaaaaatcctttcaaattgtaatttctaatttatttatatcaaataaattttatcggggaaattatttcgatgaaacaaagcaaagacagcgcaatcggcccactgactgtattaagtgggtaaaccccccccttcgtcggcatgtgcaaaattttttcatctgccgtttccctgcggcgtttctctgtggggagggaaagtcgaaaatgccttcgcccccggcggcgggggtgtggccgacgatatgagccgcggtcccccgggagttctttcccccggggcgaattgggcacacggaagagacattcatccgacatctctcctctcccactctcctcaatctttgcctgttccaataaaggcaatggcatcgcccggaggaggaggggagggaatgagtcccatccctccggcggcggtgccggtgaatcggcgctaatttcttttccctcccattcattgggaagcgacgagacgaatgatgtgattggtggtggtggtgttgcacttgggataatgccaagcaattattttcagcataatcgcgccgttggcacttcttccc

SEQ ID NO: 26025 - DNA, 1879 bp, Heterodera glycines
  unsure (1)..(1879): unsure at all n locations
ggtcgactatttnttgaatcataatatttaactattttaattttttataataaagaggtagctcagcttgaaattggatccttttatattaaatttaacatcagatttttcttcggtattacacgatcgtcaaatatcgctatattttaattttttcatatatctttttctttttattttttatattgttttcgagtttaaataaaaatatcgataatctttttattttttattatttttttttgataatttagtttgaaaaataaaatcttatatttgtttaccttcaatttaatcttagtaactcatttaatctttgaatccacacgcaattacaatattaaaaaatgttttattccacgatccaagacagaagttcacgatggaaaaaaatcataaattgaaaaatttcattttgagttagtaaaagctcgtgtacgtcgtcattgggatcacagaatattagcaagacaaaaattgaatcgccaattttaaattacccaataataaaaacaaatttgttaaattaattgattttacatcttgacaccgtgctacagttgtatttatcatcggaaataaaatattattttgaattacgaaattaaattgaaaggtaaaatataattaattttttcaaattaaattatccataatcatataaaatagaacaactatctattttttagtcttaaagaataataaaaaaaaaattcgtaaaatatcttattaaatttgcatttaaaatatttgaatttagattattaaaaactttttgattaaaaaaataaacaatttaatttatctctccctattcaccattgaagaaaaatatggatttatcgatgtaatacattttttcattaattttttcttccattattaaatagtaaaccaattaatataataattcttttaattcaaatgattttttttaataattcttatgtaagatattgaaattttatctattcaattaactaacgaaaataacataaagaataattttaaaaatacaatattaatttggttcctagttaaaattgaaaaaacaagtttatatttatattaaatttatcattaattaaaaaagtctttgaaaaaaggcaacagaattttaattaagaaataataaaaattaatgattttaaaaaccaggctatgtttgcctgatttcaaccaaataaaatctatattcttattattaattctaaaatgttaactcatttttatataataataaaaataacaattgcaagtcatctgatagatagatccattaatttaaatcgaacatttcagcatactctagtgaattgctttagttattttgtgtgtttttttgccatagaatcgcacggtgtgatatgtaataacttaatttttttatttattgggtaattaaattgactttcagcccccttttttgctactccattcttcactccgctgatcgctgatcaccacttggaccattctctgccaatcatttgatcaccaattggaccgttttgcgctttcatctgatcaccgccacctgatcaccgccaggactgttctctaccaatcgccgtcgccaactgatcactgcccacaaaagtcgaggaccaattacgccttaaggaacaggtcaagcacagcaaactggctaattagacggttatttaaccggctatagattcgggcggccttaacggctcattcattcacagttacgcaggcatccccgcttaaacccatactaagcggtttgcgttaggagcaattctatggcctgcctgtcgatctcggattgcaggagcgtgatggcgatgaggttaaatgaaatgaaattaaactcaattacccattgtcacctcttggaatttgttgccttata

SEQ ID NO: 26026 - DNA, 1824 bp, Heterodera glycines
  unsure (1)..(1824): unsure at all n locations
cttaataaaatttttacaggcttgaaaaacttttcgtttttgataaggctaatagagcatgttaagagctttcgaatgataccaagattgttggatttggatgccaaagaaaaaagcttaagtggaaaaacgagctggcgccgaaacgggagcgccgaaacgcgagcgccgaaacgcgagcgccgaaacgcgtgggtccccgattcttacgggtttatttttctattttattgcatttttgttaacaaattttgggcaaaacgccaaaataggtgaaaatagtttttaaaattttttttaggttttttaggtgctaataataaaaacctagaaaataggtgctaataactcgaaaagtagcttaacaacagccaaaaaaaaacatgtttttcgtgcatttcaggctacggggagctcaggaaaaatagtgaaaaacctaaaaatatcatccctactcgtgactccctggggatttttttgggagtcccggtcccaatctagtactttctatcccagtatgattttttttacgggaatgggattttatgggaatcccgttcccacttcctggaacgggtttttacggacccgtagcccgtaatccatattttttcgaccgaatgggtttacggacttcggattataaagcctataagtccgtactccattctttcgcagcccgtaactcttaccctttaccgtacaattttcgaatagattacggttttttaaattatttattggttgaaaaagtaaacgatttgatttattgcattttgccaaaaagtaagcaatcaattaatttaaaatgaaaccgttgttttaaatgtccccttttttttcattttcaagcgcaaatacttttccattagcgccgagtatttaaatccattttttgaatctattaattaatggggatcttgccttatgcattgatttagttttgtgtcgttccctcccccctcactgaggctgtaatttaaattactaactttagacaaactcaatcacaaacaaaattctcggcggcaataaaaaggctgacaacacttatcaccaccaacagcaaaacaaatcgtcgtcagcagcaccgtttggcggcggtctcttgggcaaaatctcttcgacaatcgcttccgctgtcaattcgacgaatcaacaggcgaatgggggaacaaattaaaaaaagaaaagaataataaatgcccaattagtaagagaaaaaagggttattaaataattttaattgataaaatgtgtcagtttcagcattatccttcaactcagccccaacaaatgtcttccggcggttacaacaatcaatcgaattatccgggaggcgcccatccgcaacagtacggcaccggaaacactggcaacgctggtggatttatgtttagggtaaaatcaataattaaatatttgatctttcatatcttttttataaatattgtataatttatggatcaattaaatgtttatttttaatagtcgaattattattgtttttggttgtcaaatgaataaaaattattaatttgaaatttacttattttttactcgtttgcgagagctaaaaatcctgttgcagcagctgggtaatgttatgcttgataaagtttatgataatgttcaaataaacatttttgattgtagtttattcaaaattaattaatttattcttatttgtaatttttaatttaacttaatgcaattgtcttttatttctaaccgtttttttaaatttaaatgcgtgacgtgtattttatcataacttatagaaagtgcttatcaatcaaaaaatttaattagcaaaganttttt

SEQ ID NO: 26027 - DNA, 1629 bp, Heterodera glycines
gttattaccctaatgaatttttaagttttgttttaaattgatttaaagaatttgtttttattagttctttatcaagttgattccataattttgttaccctcccggcaaagggaatgaattttttgcctattttatattttgtgttaaatctgtaaaaggggatgttaaagcgtgtcgatggattaaaaattgaaaatagtttcagatctgttcggccataaacaattttatgcgccatgaacagatcaaatagctttcgcctattctcaagtgtcggcagttgcaggtattctaatcgattttggtatggaattggtggaaggctgcatttaaaaaatacccgtttggtgaaatatttttgacacttttctatttttttaatatttttttgaagagacggattccaaacctccggagcgtattccaataaaggcctaatataagttttatataacgtaatccaaatcttagatgatttggatttaattattcgaaacaaggaacgcatacgtaaatacgcattccttgttattttgtttacataaaaaatggctttgaacaataaaaaatgcaaaattgaataataataattaataatcgattttaaaaacatcaaaacaataactaacaaataagcagcgtttttagacaattgcaaaaaagattttcaaattttttttatgcatttatttatttaatttatcgagcaaaccaaaggcacattagtgctcttatatggcgccaaaaagaaacaaacaaataaaattgatcaaattaaaaatacaaaaataccgaaatataaatgaaaataaaataaatcaaatgttgaattcacaggtgattataaattgtaaatgtggcacagaaatttcctactcagaactcattgcttttagtaaacccctgaattcctttgccttattaatttgcaccgctaaaactggaaggttattccagtttcttactatcctatggaaaaaattattttgagttttggccgtgtggcgctttacccgtaaaagtaaaggcctcctgggcctttctgagaaaaagaaattttgctcagcctctaggctggtgaatcctttaattattttaaaagctgttgttaaatcattgatttttcttctttcttccaatttgtgtaaatcagtgattttaagtctttccatatattttttgtacacaaatccacatttttgaaaagcttttcttgtgaaaaatttttgtacccgctcaattttgtctatatctttttttaaattagggttccaaacttcggtagcgtattctaattgaggtcgaacaaaagttttataagctgctgttagagtctttatttccctgcttttcaacactctcaaaatctgaaagcttctaagatatgcgtttcgtataattttgcttatgtgttctgaaaaattcagtttcgagtcaattataattcccaagtcacgaacattatccgattctgaaatcctttgtgagttaataaaatattcttttttcatattatttttccctaaatataaaacaaaacatttttcagttgaaatttctaacccatttatttttgaccattttccagaacgtcaattgctttatccaactgattcgaatggtcatcat

SEQ ID NO: 26028 - DNA, 1563 bp, Heterodera glycines
gtttgaaatccgtcggtgctgcttccgctgtgtgcacggagtactgcccggcgttgtggctgcgttcgctcacacggcagcattcccagtgccattattgttgttaatgttcaccaccagtgttgaggaggaagtcgccgtggacaacggatgcaggccgtgcacaccgcccggctcaaccaaggtggagttgttgtacatgctgccgtcagcgtggtaaatgcagtgttgctgcagttgttgggtttgcggctgatccgagccgaaccgtgcgccatgcgaatggataacggaggaagcggaacgcgtgtagggcgaagcggccaccatcaaattggaggaggacattgctgtttaaagggagaaattttaattgattatgagtaaaatgatggaaaccatttaatggaggacatttttttatattgcaaaatttgaaaaaaaaacaggaacatatggaaaattgtgtagattaagtgtcgcatatgtataccaatatgtgtttagaaacaaatttgaaggggcctgtgtttagatggaaaaaacaagaataagaaaatcgcacgagaaacgctgaaaataatcacaacgcttcgcgcacaaaattaaaaagagttcaagagaatggaatgaatggtggcccattactttaaatggtacctccctcccctgcccattctctctcccttttctaatccataaaagcaccgcttcgtgtggcaatatgtgcattcaatttaagagggaggcacctgttggtgaagtgggaaggaaggggcggggaagtgtcgttgaaaatgatggaaagtatgccaagtggacgcgtggggggggaggagaaaagggaaggagatgaggtcaaaaggtgagcgcagcttcagctgctgccttttcacattacaacacattatgaaatgaaaatagacaaatattatcagcaacggctgaaggagggcgaagagtgtcaaatggccacgactgccgaagaagcggcttttcacccccccccccccctcaccaatgcttttgcacgccatttggcagcaaaactgttgtgacattgctgattgccaatgttgtaccactgtcgcggtttgagactgactaactgtgacaatccgtccatcccgacgaacgatcgaccgaccgcttctgctgcacaacatcaacagcagcagcagagcggaaaaccagtcggtgggtcatcaattgttgtaattgcagcgtaatgcttcagcgtgcaccgttttttcaattgttcaacacacacacagaaagaaaaatgtgtggcggtgtcagtgaaccgatcaaacatagcctggggcgggggagatgagggatggatatggatacatatgcgaaccaagaaccaaccgatgagcaattaaatggctatatcattttttgggataaatggcggcaaaatgtcgctttgaccctttttcagcagggagatgaaaaatgggtctcccccaattaaatacatatttaaaaagggattgtttcaaaaaataattcccaaaatttccggtgccagtcatcaatagagaagatgactctaga

SEQ ID NO: 26029 - DNA, 963 bp, Heterodera glycines
  unsure (1)..(963): unsure at all n locations
tgagaataatatattttttttaaaggtcatgaaaatttcaagaatttttatatgggtacgacagtatgatatggtactttgggtataatttcctctaagcagcacaagcttaacttcggaacttttagtacatactctctgaatgagctgagaaataatatatatttttcaaggtcatgaaaatttcaagaatttttatatgggcacgacagtatgatatggtactttgggtataatttcctctaagcagcacaagcttaacttcggaacttttagtacatactctctgaatgagctgagaaataatatatattttttaaaggtcatgaaaatttcaagaatttttatatgggcacgacagtatgatatggtactttgggtataatttcctctaagcagcacaagcttaagttcggaacttttagtacatattctctgaataagctgagaaataatatatattttttcaaggtcatgaaaatttcaagaatttttatatgggcacgacagtatgatatggtactttgggtataatttcatctaagcagcacaagcttaagttcggaacttttagtacatactctctgaatgagctgagaaataatatatttttttttcaaggtcatgaaaatttcaagaatttttatatgggcacgacagtatgatatggtactttggctataatttcctctaagcagcacaagcttaacttcggaacttttagtacatactctctgaatgagctgagaaataatatatattttttcaaggtcatgaaaatttcaagaatttttatatgggaacgacagtatgatatggtactttgngtataatttcctctaagcatcacaagcttaacttcggactcttagtacatactctctgaatgagctgagaaatatatatattttttaaggtcatgaaaatttcaagaattttatatgcgcacgacagtatgatatg

SEQ ID NO: 26030 - DNA, 793 bp, Heterodera glycines
aagaacgtgtcggtctgtggggtgtggttatgcatagtttttccctggcgttatttctataattgaaaattctaccggtgaaattgaactgctcaaattcatccaaaaatggatatggaaagagctcgaaataaccaaagccaaattcgacgaactttgtgagttgtccctttattcattgaatgagtgtcgttttattctaaggctcaccgctttttgcgaacccacctcatgatctttcgccaaattcgcaaggctacgtccaacatgcgcggctgttcttcaaacgcgcgtccatcgtttttaggctcattcactcggctgtggacaaattaaatgaccccggtctctttcatagaagctccattttcaaattactcatctataaacattcagattggcttcactcgattattgtgcaagagacaacggttcgccaagtccgtctctactcgacatgcatcgcttttggccttctttacaaacttttgccaattgacccattgaacagtcgtctttatgccactgttaccgagaaattttcaagacgggtggaaaaactcaacaaaattgggtgatttatataatatcatgctactcgttactataggggagggggcagagttataaatcaaatttgaaaacattttaatgaaataaaaagcgaaggggtccggtcatgtaaatcggcgacctgaactttttttttttgctttttaaaccgttttttataatttaattggtctaaagggagagttgtttaggattttgtcacatttaggaggaagcccca

SEQ ID NO: 26031 - DNA, 1496 bp, Heterodera glycines
  unsure (1)..(1496): unsure at all n locations
tgcttttgcgcaacaattctccccctctggtgtccttcattttagaaaggcactgaaccgtatacaaaaactctcacattctaaaataactcagttaaaacagcttttaatnntaattgttctgaaaccaataattttgtctgtaaaaaatagtctcatatgaaccacgacataaaaagtgccttgcgcaacaatctcccctctggtgtccttcattttaggaaggcactgaaccgtatacaaaaactctcacattctaaaataactcagttaaaacagcttttaattttaattgttctgaaaccaataattttatctgtagaaaatagtcccatatgaaccaagacataaaaagtgcttttgcgcaacaatctcccatctggtgtccttcattttagaaaggcactgaaccgtatacaaaaactctcacattctaaaataactcagttaaaacagcttttaattttaattgttctgaaaccaataattttgtctgtaaaaaatagtcccatatgaaccaacacataaaaagtgcctttgcgcaacaatctcccctctggtgtccttcattttaggaaggcactgaaccgtatacaaaaactctcacattctaaaataactcagttaaaacagcttttaattttaattgttctgaaaccaataattttatctgtagaaaatagtcccatatgaaccaagacataaaaagtgcttttgcgcaacaatctcccctctggtgtccttcattttagaaaggcactgaaccgtatacaaaaactctcacattctaaaataactcagttaaaacagcttttaattttaattgttctgaaaccaataattttgtctgtaaaaaatagtcccatatgaaccaacacataaaaagtgcctttgcgcaacaatctcccctctggtgtccttcattttagaaaggcactgaaccgtatacaaaaactctcacattctaaaataactcagttaaaacagcttttaattttaattgttctgaaaccaataattttatctgtataaaatagtcccatatgaaccaagacataaaaagtgcttttgcgcaacaatctcccctctggtgtccttcattttaggaaggcactgaaccgtatacaaaaactctcacattctaaaataactcagttaaaacagcttttaattttaattgttctgaaaccaataattttgtctgtaaaaaatagtcccatatgaaccaacacataaaaagtgcctttgcgcaacaatctcccctctggtgtccttcattttagaaaggcactgaaccgtatacaaaaactctcacattctaaaataactcagttaaaacagcttttaattttaattgttctgaaaccaataattttatctgtataaaatagtcccatatgaaccnacacatagaaagtgcctttgcgcagcatctcccctctggtgtccatcattttagaaagcactgaaccgtatacaaaaactctcacattcta

SEQ ID NO: 26032 - DNA, 1159 bp, Heterodera glycines
  unsure (1)..(1159): unsure at all n locations
agcaaatgaatcaatgaattgaatgaatgcgaatgaatgaatggcttttactaacacaanntgaggagaggacggcagcccatcgctgttgctttttgtgttttacagaaacagaaattttggctaacggcggcnncaaacaaatcttttgttgaaatttttcacaaattttaatggaaagccattgaaaagcaggcttatactttattattttcgagattttagttagtgtgtttttaatccttttgggatgtttattcaaaatttttatttaatttaccatgctttttaattgaaaaatgattggaaacaaaagaataaaaatatatcattacttctataattttactgtcaaagaattatccatgttttatcattttaaaccctttcataataaattaaaatattattttattttaaattttaaatttcatataaattattctttatttatttataaatctcctatagactaaaattactaaaataaaatattttttgttgcaatgtttgtttgcttctcatcactggctttctcatttgtcagcacaaacaatgaaaatagtttctcttttgccaaaagcagagcttaatcgatttttcctctcagtcattggcattggcattttgtcccgctttttttcctgcagcaactaaaataaacatatgcggcttttgcttttgctgtgccacacatataattgttggaaccaataaaattttgtttatttattggtctagtctttactccgttaataatttattttatttgttagcctaggtttttcggtattcgtcattttccaattgaatttgtttaatgcatttaatcagtctcgacaagtcttagggtctttgaccgtaattgtaattttagacgattaagcacattccaatttgttccattgtgtggcaattaaaaaatgtctgttgatcagcataataatcatctgaatgacatgggtcctccgcctgatccggtgatggaagtgccgccgccaaaagagatcaaagtgttggagagcgcggacgacattcagcaccggcgaacagaagcaagttgttcaggactaacagtacacagccattaattcgggcgctaattggtcttaattagacgcataatgcctgnggggattaatttgatttttaatggctt

SEQ ID NO: 26033 - DNA, 1489 bp, Heterodera glycines
  unsure (1)..(1489): unsure at all n locations
tggactgtgccgttaaaattctacatgaaatgtcaccggcagttcgcctggacttagcttctgaaatctcgacgatgcaaagattgagacaccaaaatctcgtacaactcttcggtgtcattttttccgagcatattatgatggtcatcgaactttgcgaagatggctcacttctggacagacttcggagtcaaaccaagccgcgacttttggtcacgactctgctgaattacgcccagcaaatcgccagcggaatgagttttttggagtcccgcaaatgccttcaccgggacttggccgctcgcaatgtgctcctaacccacgaagaacaagttgctcttctgtcgattcgaactacactcaaatacacccccccccctctctttaggttgtcaaaataggcgactttggactgacaagaattctcaaggacaacgaacgcctttacattatgagcgagccgaaaaaaattcctttttcttggtaagtgaacaaatttaagtggattgtttggaatagtacagcaaatgatccaccccaaaacaccctcaccataaacgctgtctaaaggcactgcccgaatttttggatttattagtagattttgcactaataaaatctttaggtctcccccagaaagtctgagatttcgtgaattttcgcataagtcgggtgggtttctttgtttgcttcttatttgttattttttctctttgctttcagatgtttgggcatttggcgtcactctttgggacttttcacttttggcgaagagccgtgggccgggcatcgtgcagctgaggttcgattacacaaaaactcattcgacattaccataattctcgtttcacatcttttccttttttaggttctccaatttctcgaaagtgaccttcggttgcgcatgcccgacttttgttcgcgagaaatttacgatattatgaaattgtgttggcagaaagaagcggaaaaacggcccaaatttttgcatttgcgcactttgttgaatgacgttcgattgatttgactttatatattcgcgcccattagtttttagtgccaattcatggcgatggtttgtcgttcaccaaatgccgaaacgtcaaaatcacaattgaatctttctgttggcgacgaattgattttaattggccaaacagatgaggaaggcatttggtacggacaatcagtgaaaagccgaaatttgggcgattttccgagaaataaagtgtcggtgaaatgcgcaacacaacctcagactgtaaagagtgcagtgaactcatctgattacaaaaaggatatttcacgccctgtcgcaggtgggcaatctaaaaaatgggtagagatatgagtaggggttttcgctctaactaaaaattattanatganaaatcttanatctttctcgaaaatatctcccttatttgtcaatgcgaaaactcggactatttgtcatatagaaacgattccgggctctatatatttttta

SEQ ID NO: 26034 - DNA, 1078 bp, Heterodera glycines
cccccccccccccccttacgggcccagtgggtttttttcaataagaaaattattaagttttcaagatttccacattttaattttttcaaaacaaatattatcaaatcatcagttaaaatgtgcctggactggcctgtgtttcattacctttaattgaatattttatttcaccttccttaaggttctttcattcacacgggacatggcgacattcgcgagaataaatgctggggacacgttgactatattgacgaaatttacttgaagaatccactaatcacacaaaattctgtgtaaattaacgcgaaatcgcaaagttgattatttaaacgtaaattcagtgccaactccgaacagaaaatggcgattgtgccgtctctgctgatgctcgaccagaaacagtacggccttcccctccccggtcagcaaaacgagcgtaagaattcattcaaactgaaaaggggacggacccctcttctcctcactttcagtcgcaaaccctttgcaaatgccgaatgaattaactgaccaccaacgaaaagattgtggtcagaaattggctgcagaagcaactttggcaattggcagcagagggaattcggcaaatgaactcaattcacatcgccattcgaccgccatcgaatggctttccgatggacaaagccaacaaatgggaacaaagcaaagtcaaaaaaggatggagcacaaatgcgcctcattgccacaaaatgaaattgtcgctgtttcaaaatcaagtgggaacttaaattaatgcatctttttaatggattttaagaatacgacagcgcaatttccattcctcggcccaatcgcttttcgaactttcagtaaagtcaaaaattttttttgtcatccattatttttatttagtttaacacctccgtccatttctgtcggaaattttccggttggcattggcgaaaaaagtcctcaaacgatttcactatttttggagcccaaaattaccacggttgcatagatgccttctgtcatttcgacttcaaccaataaaaccgaacggacgaataccaaaaatgttcatttgctaatgaaacag

SEQ ID NO: 26035 - DNA, 1131 bp, Heterodera glycines
agctcaaccattcgcttcctcacccaaccaaatttttttctgtaagaaatggaaaattttaaggtgccaacgatgaaccacatcatgcagcaagtgaagcaataaattgagtttggtgcatgcgcgttgtataaaacaacatgtgaatgaatgtgtttgtggtgggaagggtgttgacgattgggcaagcaaaacattgggaaaatggacagattagacgagagtttcaattaagaaaaatgcaaaaaattggagtgcgctaaactaattagccgatcttaaccacatctggtcagcggaaagccggaaaataatgaaaaaaaaatgaaatttgaaaaaataagtgaatatattgaagaaatgaacagacagacagaccaccatgatcaagaaggaaacagaaagaaatggactatttaaaaggaaaaaatgtttaaaaaataaaggagatgtccttatggttttaaaaaagggctcgattatatgcatggtaagcaaaatttaagaggagaggaggtggaaaagtcaatgaaatatattcaatatctgcttataaagcgcgtttcgctagctcagctgacgccgttatatgtgcagtggtggaatgatggagaaaaagcgcgccaattattatatagacatcaaatttttaataataaatattaatgttattattattatgactatgtaaaaatgctgttttgtggatgatacaatttcgcaatgtcgccgcttttattatataaatatctcagtacatgcacattatgacagctaatgattgtctaaataaaaccgggatatttgaacagccaagatcgggatttggaaatgatcaccagcaggaatcaaatcccgatttgccagggtttgagatctcggattttttcaaaaaatgttttgatcatgcatgatcaggatcccggcaaagaacagtgggattccattccggtcacatccagtctctatagagttaaaatgccaatcaccaaaaaggtaccgatgccgatggaaaatatcaaacaaaataattcatcaaaaaaatctgtctcttccttccttctcccctcgccacaacccaaaaaccagcgctccataatgggaaactaggtgaggaaaatgacgaaattt

SEQ ID NO: 26036 - DNA, 916 bp, Heterodera glycines
tgcctgccattttcgaccttctcaccttcgtccctccttttcgcagtcagaatcgccttcatgaagcaaatgttcggcttggcataaacattggtattatcggtttcggatttgtcattcttgttggcggattggtggtgaatgtcattacgatggctaacaaagaggaagattggaagtgcgctgcaaatgctacgactagcggaaatgtcacggcgacaacgcaatcgtacaccacaccgatttaattatcttaatcgcatttgcttaatatatattgtatgtaggtatatgtgtaatgtattggctaataaaaaaatacagtttcatacgaatgtattttaatttacctaattaataaaattactagagaccggacgggcccgggggcccggcgggcttttgccgggccgcccgggcccgggcccgtttatttttggaaaaaaacgggcccgggacgcccggtaaaacgggctttttttgaccaggcggcccgggcccggccaattgtcggagcccgggcccggtcattttgaccgggctaaaacgggcttaaatttcaccagcgaaactgcccaaaatttgaaaaataattattatttttggcgaaatgtctttaattcaaattttcaaaatagaactttgtatttttgaaaatttggggcaatttcaactgttaaaaagaccccaaacccatacataattgagtaacattttcataactatttcatcaaaaagatttccaaaatttatgaaacaattaacaaattttcttaataaatttcattaaaagtcaagatttttcctcagcgtcgccttgtacaaaaatattatttttttctcaaaaatttagctcaaaatttcaaaatttggtcattttttggtgtaaatctgctaacaaatcacacacaaattt

SEQ ID NO: 26037 - DNA, 1480 bp, Heterodera glycines
tgtagcggagagtgcccgacccgtcgctggtgataaagaacgccagccaggctcaacctgattttgtttcaaaaataaattcaatttcaatcttatttttcaattgcattattaaaaaaatatattattagaaaaaaaaattgaatttgtttagtgaaataaaaatttttttagatttttttatctaaatattttttcacttttcggtaagttcctccgcgaattgttgcaagtgtggcataatcccagatgggctccgggtgagcattaggatccgatgggcgagtgtacttaattaagcatttggaaacaaaatttacaattcaaaaaatggttacggattccgttttaaaatttcaataattaatccaaaatgatgattcaattttataatgacttggtctcttgcgctgtcataaagcagctcaaattggccagctttgcgttctgcgtctgtgacctgtttaattaattaaattagcgttaaaattaagtttgaatttcacctttatgacagtatctcgcgcaaattcgattcgaaccactaaattttcggcacacggttggtccaacggggttcggaaaaccttaatttaaatttaataaaactaaaatggtaaaaaatgcatttcgatgatgcaaatgtaaaatattagtatcatttattgacaatgtttatttttttattaattttgaattcacttgtttttaaattgatctattaaaataaaaatgtttttttgttttttcaatttaatttggttttatactttaaaaaataagatttttaaaagttgacattttattttaaaattaaagcatttgttataaaaataatgtccacctgcgcatcgtccaagtcgtggtccagcccgacatttggagttttgtcatcaaagtgaatggtcaccacggtttggtccgccgtgcccacctcgtggacgcgcattgtctccaccaacggttcacggttggccgcccattttttgtctccctgctgctccgccaggaagggctcattggcaagcgggatttcggcatttttctttcctaaaaattttaaaatatcatgataaattaactagagtgccacgggaccgggaatttttgccaaaacagggacggggacttgccgggacctgagaagccgggaccgggccgggacctcgattttttttcgggaccgggaaccgggaccaaccgggaatttttaaaaattcaaaaaaatcaaaaattaaaaaaaaattcaaattttaatttgtttttcaactgaaaataatacaaaattaaattttcattttgttttttatttaataaaaatccaaaagttaagctaaattaaattaatgaaaattttcaaacaaatttctttaattatttcaaacaattaatcatttctgggattaaatgattgaatattattataattaatagttgcttttcccatccatttttttcgcgcgctttttcaaaaattttt

SEQ ID NO: 26038 - DNA, 1755 bp, Heterodera glycines
tagggcagcatataatggtacatttcgtccatttcagaattgttttttgttcccgtaattacgactttaccggtccagaaaattaaagcagtcatgcttttaccccgcttgaaatttaaaccgcaaaatatttcgggttcataaaaggcacggcgattttttcgaaactcgttcagttcaatttcatgtccgaatttaaaggtcgaaacaatattttcaaccgtgtgtccggtgtaagaagcccccggacaccccgagcccttaattatttctatcgcagtctatcagacttttcgtccccagacatatcatttttccggattcccataataatgccgtggctttgataggagttgtacatttgataaccgcggcattgaattttctagggttatacttaaattcgcattcggtgatcgtcagagagtttagtttaattccggtaccgagattagcgaaagcaattatatttacgattatcggtttttgcatttttgatacaatgtatcaatcaaatggtcctttcatccctttatataccccttctataaatagcaacccaaaataaaattaaattgaaaaaatgaactgtccacataaaattatgtgttgtcattactgtccctgtcattacgagatttgtagcaggtgtaaaaagcacagtcttttgcatttcggtacatcactatttgataatttctggctatgccccaaatgcgcgaaacatgttccctatgaaaatataaataggtcaaataaataagaggaattaaaaatgtttcgcggtccgttcactctaattctctcgggggctactgggagtggtaagacccgttggctattacggtttttaaagcatcataagaatctaattgaaccatcgcctgaaaaaattctttattgttatggtgagatgaatgatagtattttaggattaatcgggagtagtataagacgtcaaaagcgcacggttgcgcacgggtgtttcgcgcacaaacccgtgcctatgggaggggtgcagccctttgaagttgccgcccgctcacatcctgagcctatgggatgttctttgaactctgccgccttgtggattttaatttacccaaatccgtgcgggtgttttttcacccggccgcgcagcgccgcgggaaggtcatcaatcatccacctgtcaccaaaagtgacaggtgtaggaaattcaattttttcttttgcaaatttaaatctttttgatcccaaatcttttgggcggttttattttctcaaatcctgtgatttttttatgatgatttttctgaattttgaaaatttgccaaaaccatgcatttcctctccgccccgccggtgcgtcgcgatgccggcgccgcgcgaagtaatcgataacaaaataaatacccaacagaactataaattgggggaccgtcccaataaatgaaaaattttttatcgtctccctaacttcttttgagccattttcagatagggaagaatataatgatacatttcatcaatttcagaattgttttttgttcccgtaattacgactttacaagtccagaaaattaacgctgtcatgcttttaccccgcttgaaatttaaaccgcaaaatatttcgggttcataaaaggcacgacgattttttcgaaactcgttcagttcaatttcatgtccgaatttaaaggtcgaaacaatattttcaaccgtgtgtccggtgtaagaagcccccggacaccccgagcccttaattatttctat

SEQ ID NO: 26039 - DNA, 1568 bp, Heterodera glycines
taaaatggatttaaaatgctttattccatctcacatgtgttttagtggtttggatatgtgtttttcatccacacggcacggtttgtttcccggcatggggaagagattttttctaaaaaatttaatttcatactttttataaagctaatttcaacatttattctggcattaagatcttagtaaaataattttaaaataaaacttagccatatataaaagtaaatctcaaagaattattcaaaacatttggccaaaaattcaaaaaaattactctacccctccatcaggtgtaattaaattaaaaagtattttatatttgaaatcttaggcgaaaaaattcctcgtcaccaccagcagattaaattctattaaaaattattttacatttaaaatctttgtcaaaaaacaatttataaaattcctcgacgtcaccaacatttttcattataataaaaattagttttagcgtatttattatttcgatattattatctaatttcatatatcaaaaatattttcccacatacatattgatgaagatgcaattttatgtttttcctttttactccgtaatgagggtgaatgaacgaatgtttcgtttgtttgtgcaaattaacaacaattcccatgcgtacgacaaaaccctctcctctcccaccctctcctgtcccctctcctcccctcacctctcctctcccctctcctctcccaaccctctcctgtcccctctcctcccctcacctctcctctcccctctcctctcccaaccctctcctgtcccctcacctcccctcacctctcctctcccctctcctctcccaaccctctcctgtcccctcacctcccctcacctctcctctcccctctcctctcccacccctattctgtccccaaaactaagcattccccaaatctattaccttctttttatcaaaacagacatttttgagactaaatttacttaaatccacggcaatggatccagcggggcccgcaatatttacaatgagaggcaaaatgacaattgctggatggcagcagcaacagaagggaatgaaagagtgaggcgaacaaaggcaaaaacttaaatatatttaatatatatttttatattttttattatttctgaagaccttaattaatttgaagtgaataacagtaattcatatgttagctgatttgttcatctgtttatcttagcaaaattttttgtgccgtataatttgatctaacgattgggcagcataaaatcgcttaacgcaccaatgacattttctattttttttgaaaaaaatggaaagtaggaagggagaattcctgactcggtgaaataaataaatttaattaaagaaaaggcacaaaaatcccgaaaaaggcatgaaaaaaggcatttaaaatttttattaaggatttttaaagagcaaaacacgaaaaacttaatcaaaagcttagttctggttattaaaaagattattaattaaacagtttattattttttcgaaaaaccgaaaatgttaaacctaaaaattttttatcaacaaaaaaagaaattttgacgatccattttt

SEQ ID NO: 26040 - DNA, 1064 bp, Heterodera glycines
aatttaattcaaatgaaaatttttatttattattaatacattaaaaaatattttaaatgaataaaaattgaaaaacacaaaataaatggtagaaaattaatgtacaccgtccggatccgaacttgccccccccccctcaaaatgatgccccagaatccccaatcacacagggattctgaggtcttaacgaagtctaagtaaaatctgattacgtattcgtgatcagcgtcctaaatagacctaaagataacttttttgtgagatgtttaatctcttagcttctgcttaatcatcgcttctaaacatggagagcattcgaatgatattaaatttgaagaatttggttgacttaaaaaaaagatatggccacacccattaaaaattatacgagttgcctttgtacgagttgccattgacgcctcccgccgtcgggagccggaaaatccgacaccaactttaaattcaaatttttttagatgtttgagttaatatctatctgtctaggcttagcaagttctcgaattgaatttaccgagaattattttatttcccgtaatccgcaatccgtaattttcaaaaatcaattttttttttttttaatttttaaaatttttattaaaaaaaacttatcaaaaaattgttaaaagtaatttatgatcagaataaagctttgaatgattttttgggtcgaaaaatcctaaaatataagcagaaatcgcgagaaaaatagcaaaaatggcagattcagagctgtggacgaaatttaaaaatttttttcattaattttcaatgatctcacccttttagtctcagatctctacagtatcaactggtcggtgcgagagttggtaaactgactagcaattttcaaactggtggaggtttgacaagcccaatttttgaaaaagaataaaaatgaataaagttcggcgtaaattttaagaggaaaagaattttcgataaatgaacctattttgattggggtcgaaaaagtcgggaagcaaatatcgtttttggaattaaaaagtaattatttgtgcgttccgttggccgcaaatgttcga

SEQ ID NO: 26041 - DNA, 686 bp, Heterodera glycines
aattgatgacgaaaaaacaaacaaattaattggggtaggcgggaaatgagtggtgttccccttcccccagaaagctatttaaatgccaatttttcacagcagaaccataaagaacggcaaaaaataaatttttaggtattttagcaataaaaaatttatttaaatcaatgcatttaaaaaacaattaaaacattattctgtttttaattattttcagtttttctattattaacaaataataattcattagcaaaaatggcagcggaacagcagatggaattggacttctcaactgacggcaacaacagcgagccatcactggccggtgattttgatttaaaaaatttaaaaaagttcaaaatgggacagaagaaaggcacgcgtcagacaatcattagccatcaagtgtggtgaaatccatagatttgctcataaattatcataaataagtttttaatttttaagaattaaaacggtctaaaaatatggccattttttgaaaaatcctctattagaacggccccatttcaaagcgaaaattgaaaattttagctttatttagtatttttttagcagcaattaaggcattttgacggtattttgcgatttttaagcacttaattggcaacaaaataaattattattctaaataaattctgttgcagctcgtattgtcggaagttgag

SEQ ID NO: 26042 - DNA, 1165 bp, Heterodera glycines
ttactataataataataattaataaaattatgttaatacttttaattgacaaactaatgacatgcaatcgccccccccccaaaagctattgatggtggggacacctcgttcccctcaccctcttcctttttacccataccgtttcctgtcttaaaaaaaatattaaaaaatttcaagaaaattttttttttaaatttatggagaaatttttgtaaaactttgaaaaaatcaacaatttcccgaattcttttttttgaaattctcttataaaaaaattttttatgcttttttcaattcgaaataaatattcttctcccaatcctcaatttttcgtctcttttcagaattaccaagttttaatgctcttaatttttcagaaaaattgtggacagccccggaactgctcaggaatccagacgcacacattcagggcacacagaagggagatgtgtacagttttgcgctcattctgcacgaaatgctgtacaggaagggtgccttctacaggggcgaggaagagaacccgagcccactgggcaagtttttttaagggtcaccaatttttctggaattttataaagacccctcataattacggcgtgatgggtcattttgtagattttagctatttttcgacaaaatatggcataattttacatttttttttttggcttgcaaaatttcaaaaaaaattcggtcaactttcgaaaaagttttatgaagatatgtattatttctgccataaattataataaattagataattttatttggaattttccaggttaatggagaaaaacctgggctattgaacgataacaagaatataaaattattacttttaagaaaaagccatattttgtcgaaaaattagctaaaattgcggattttcgggcttactttttttgcaattaaaaaatttactctgtaaaccttttttttctgtattaagcccaataatcagtaattttttttgaagaagttttggagcatttgcaagtgatcccacccattgacgcggagctgtacagaccggtcattcccgacttttcgccggtggacgacacgccggacacagtgagaaagttgctcgacttaatgatggcatgctggagcgagaacccaacatggacggcccgacttcagcaccatacgcaaagtggtg

SEQ ID NO: 26043 - DNA, 1658 bp, Heterodera glycines
  unsure (1)..(1658): unsure at all n locations
aaaattaatcaacgacagctttttgataaaattgtattaaaaatgaaaaaataataaataaattattgattgtgtcattcataagatgaaataaatagtttggcttaccttttactatattaattatgtaaaacattttatattatacaaattatttttcattttaattttaaaataatgaaaatattattgctattaaaaagaatcaaacggacgctagcaaaataaagcaacaaataatttttgataaaatatttggccaaggatggggcagaagaaaattcatgcccaattggtcaaataattcacggacaaattgctgtcataataagcattatgatcataatggtcattaaaatgatttaatttttgatgaacatttggaagtgatataatcgcttacagaaaagacaggtgtgatttaaaaacagtttttgtttcgtttccattgataataatcttatgaaatcatacatgtatgatgaaattttaaatttgttttcaaaattttctaatgtaaaaatcgatgcacacgacgtgaggaaaagggcgaactttgcagctgcactcggcaacatataaagccattgtcttggcctgtgtacagacatgcagaattctctgggcaggccttaaaaattcaaaaattcttgatttaaaaacgcgttaaaataatgtgaagaaaataaataagaagaaaggaatcactgacctgtggggtgccggacctggcgtatggattacaggtacggtagttaccggccaattcaacgggaacaagatttgctggttgaggcggacatacatctgaaaattcactatgcattcaatttaaaatacttaatgagacagctttttttaatttttcgcgcattatttgcgccgcaggcacggacatttgcattgccaagcataatcaacatttgtaccaaacaatttacaggtaatttgaaaatattaagctttccaagaatacagcatatttttaaaaacaaaattaaaatttctggtgacaacttgtttcagaaaaaaaagatgtcctttcactagagatttctgttaaatttaaaaaattttaagtagaattttaaagagaatcattcatttcccatttttttcttaattttctgtttattagtaaaaaaaattgggtcgctttacaaaaaagttatggccaaaaaagctcaaaaaattgattttacttggctttttggcgccgcatgtcataactttttttagtcttgtaagtcatcaaagaaaaaagttatggtttcctaaaagcggaaaccgaattgccccccaccgataaacccccccggctacttggtagtcggacatcgctctcaagtccgcaacaaatgtagcgttcgagtgttgttgagtattggcaatgtctgtttataccgcatccctttttcaaatatgtattattatatgtgattattttattaaaaatacaatttaaacattaaaaaatactattataaatataatatgtctcggacctgaatgccatcgttaattggtgccgacggagagcaatatctgtagggtgtagcgccttcgccaggcaccggcacaagttgtggaggacaatctaagttaattttttcctnaatatttactgaaaatgaaataatttcataatgaaaatgaat

SEQ ID NO: 26044 - DNA, 1058 bp, Heterodera glycines
attttttctccatcctttgccccttcattaattaattaatgctatcgatcggtttcactgatcaatcagagtttatctcctcccattaatttgtgtgtgcgcttttgtttttataatatgaactgactgcaacaataagcccataactttcagagcagagcaaaaagagtgagtcagtcctcttcacccctctctttttattatattttgtttcttttcttctgattaccaattaatatatgtacacacacaaagtgagaatggccgtcgtcttcgtctttcaccgttcaccgcccttttctcacccactcgtgacgtacatacgttttgatctgctgctgctgctgtgtgagagatagagtcgggtgaagaagtgacgagagagtgtggggagggaggaaagcggaaaaggccgagatcggatgacgagaatcggagagaatgatagtggtggtggtggtggttggtggacgacggagaggggaccgagagggcatggcgagaggatgggggagataaacacacaacatagataaagtggagaatgagtgatgatggtttagggagagggttgaatagtggaatgaatttgctcctctgccgtttggttgtcccccctatcacatcactcctatcactatcactatcaccatgcccttctttctttcccttttttctctcttataccctcgtaacacaagaacctcaacccactgttttcatctttgttttgttattgttgtgttatgttgtgtgtatctcatcatcactctatcacactcatgggcttacttaaatcactgccgctctctctctctcctcctcctctctctctctcattctcgagaggatagggctcctcttcttcccgttcctccccaccagcgtttcccccccctcaatttcgtttagatcagcaaaaaagtggcaaaggggttggagcaatgaatggagcggggtgcgggtgggggggggccggagaggtggcgacgaccacgagaccaaaccatccccccacaacgaaacgctacgtacattaaatataaatagccccatgc

SEQ ID NO: 26045 - DNA, 971 bp, Heterodera glycines
gcgaaaaagcaggcattttaagtggtgatatgccaaaaaatgaacatattatccatttgggggcaaattttcaaatttaataatggaataattagtgctggctgggccagtgggcgccgccgggaattttttcttgaaattttaatttttctatttccgctgagagggcaattcctccccaggcattcagtgatctttttgacaataaataacaaattttcatttttcctaatttttagaatgtagaggagaagcagccgttgaatttcgaatgttgtgctgttgctgcttatttattggtccgtcgtttttgcttgtaaatttttaaatattctacacagaattaattagtgtgtgcatagttatattttcttacggcacaattatacaaattattaggagctttggcgaagtaacggcatcggtcctccgaaacgcggctttgtcgacttggagtgtggcaaaggcattttggcacacattttgcaaacggagggagtgccgggcgttggcatccatcaaagagaaaagccgcaatgggccgctttcaaagtgtgttgaccgagcatgacgattgaatttaaaattggctcattaatgtaattagtggatgttacgagttggaatctctttttaattgcccgtttcatcattacattcatcgcatagggcaaaggcacgcgactgctcgaaatgccgttgattcgcgacatttccatggccgaccgaatccgaagtgttgtccacgacggagcggattttttaattggcaaccgaagcgaccaaattattccgtggataccattaattgcggcaaagtaaaaatggaacaacaaaattctgtttttaaattccttaccgaggagggtggccaattatggggcaccccaaaacgtcgctggccgaaacgtcgccggaagactttttgggccataactttgttcattgtaaatcaaattaagcattcttgg

SEQ ID NO: 26046 - DNA, 1684 bp, Heterodera glycines
cgagccaaaccaaagccaaccgaaacaattagacattctttacgaagtgctaaagggacaaagttaagacacaaaaaacgacaaatttaaaatgagctaagaaaagatgaatgaagctaaaaatacatttttattccttaaaacaaaacgccaaatttaattttttcaaaatttaaattcaaaataataacgtttgacgcaggaaagcggaaaaccaaaccatttgaaagagtaaacattttataatatgctaatgtaagtatttttcaatttttgttggtaaaaatgaaataggtagtgcaactaattatgacctgggacaataatcaaagactattttttggacttttaggctagagtagtcctcccctcccatttacgctgcaattcatacttttcgttcgttcgtttcggtgcctttggtggattgttcgtcagataaatgtccattgggtctgtcgggtcgtaatcgttgtaatagtaattgctttcccatttgtccgaacttctcctcctttgttcaaaaagttacaatcaactgttttatgatatgctcaattaaaattatcggttccattttcttattttccgtgatggaaaggcgtacgatttgttcgtggtaattgttgaccctttgtccacgcctatgccaatgccgagggcacttcgaagcgttgagaaacgcaacgatccgctgactctgtttccggtgttcatgttctgatacgtcaaacttttgacgtccaacaagtcgtgctgagtgtcataactaaacgaatgaaaaaggctaatcaaaacagtcatttattggagggaaatcaaatgaaaaattaaagtgataccaggaaatttgaaggaaaacacgacaattgatcaattcattagttgctgtttttgtgtgtttactcacgtcgtaattgtattcgtttggctgagtggcctcgaatagacaccgctgcgtctgttgcctccgttcctcaaattgacgcgtgaattttgcgaaagaacgtccgcttcctcttcaatggtttccaaattcaatggtttgaagaaggccgaacgcaactcacacattgaggtaagtctaatttctttttatctaaacggcaaaaaatgcatcacaaaaaatgcatgaaatcagttcatccaagttgtaatccaaactaaaaaataatgcaacacaaagtgtaaataaaggaaaaaataaataaattctcaattatttcattgagtcgtgcgaaatggcaagaaaaagagaaaaaattcagaaatttgttgagctcattaaattactggggatgcaatttttaggcgctaaaaactgccaaaataggtaggctttaggctctaaaaaaccccaaaaataggcactaaaaaatggaaaataggctctaaaaacctcatttttagggggtgtaaaatgacaaattcattcaaaaaggtaaaaaaataagtcaaatcagtattgagttacatattttttaaattcaaaaatttgtccaaaaaaaaaaaatttaaagacgatttgagaaaatttttcatttcctaggaggtttattttcagaaatttttgggtcgatttggggtgtatttttaaaattcccaaaaaatcgattcttaggggtgtatttttcgtttttattgcttttttgttaacaaattttcggcaaaacgccaaaatagg

SEQ ID NO: 26047 - DNA, 1655 bp, Heterodera glycines
agcgcgcgcatcggctggcggcgcgacaaccgcaccttagcaaaggcgcgcgaaaagggaggggtcgaagaaaggctcggacacttcgccgacaacggacggacaaagggccgactcagcggagaaaaaagcattttcacgggacaattggcaacgaaaggcggcgaaatttggggtggcatttatctgatggaaagagaaatggcatttataaattaattgggagaaaataaatgaaagagtcccaacttttgaacaattccctttccgacagacgaaaatgaaaatggtgcgatggaatgcgtgggagggttcgtcgggacaataaacttgcagcagaaatgccatcggagagccgcaaacccaaaaaggaaagggggaggttagatatattttgggcaaataattcacttggcatgccaattctgcactttgcggaatggtggcggggttaagccacgcggggtgaccgccgcatttgcccagggggaggaaatggcgttccaaagagaaaagttgggacgcatcgaccggacggggaaggcccaaatggacaacggaagacggagaaacagcggacattcgaaaagggaaaagacagcgaattaaaataagtttacaaaaaataattaacaaaagaaatcaaatgaaatcagcagaaaagtgccaacaatttgttaatttgttgctttttattttcgtaaaaaataaatgtacaaaaagcaaaaaaaaacaatggaacgaacacacacattaattaattgatcaattaggagggcactcttttggcgcttctctctttgccgcgttcggtggtgcctttccctcactttttgatcacttggacaacgtcttcgtcgttcagcaaatgggttttgcccacactttgcggattgtgttttacgctgcttccccagacgagggcacttaagcgaacaattccttccgatttttcacaaaatcaaaaaaaaatttaccatttgaagtcctttgacagacttttgtgaattttcataccttaattagcaaattcatttaataatatgtatttaaataaattaaacgttacataaatcgtcgagaaagtttttttctgcgtttaaaatgatcggtgcgttataatccggcaattggccctttggctttgtataacttaaattattaactgataaatcaaaaagtcagaagggggtccctcgctcacactctgatcagattcaaataggcccaaatcttttccaacaaatcgtcaaagttccatttgtgatgtgccgagattggcacacaatgcggcacagtgtaaagaatgtccaactcttcgacgctaatttggtcgattttgttcagcacgtaaatgcagggaatgtaaattctgtgagcaaatccatccattaaaaatgcacaatgacgaatctcttcttttaccgattcccctcaatcacatcgatcaaatcctccgtggtcgcgtcgtatttcagcgtaatgtccgcgttgtgaatgcgatattcgctgagaatggttttcacagtgtccgtgtccaactccgattggggcacctttgaattggaaatgccaataaattgacggctgtgtgtgtccccccccaccaaagtggtcaaattcagtccgcctttgtctttccgtttgaacgaaat

SEQ ID NO: 26048 - DNA, 1309 bp, Heterodera glycines
gacccaacagttcgtacccgaaccgaattcagggtttttttcacccgaaaataggcgggcccgacttttgtcttttgcccaattccgttttacattctgtgcggagttcgagtagcagatggacttcttcgacattttaattcctttggacaattttaatattaaactcattaattttaacaattactgaaacgataatttaccgttttagcgtctcatcgactttttaattagttgtttaattgctcccaatttattcctgaaaaacaactcatgtcgagaagtttggtggatcggatgaaagtgttgttgagcacagccaaaggggcggacattcactttttggttggggagggagaggaaaaggaggcgagttggcccaacaaaatttgacaaaactcctaaatctaagtaataattatttatatttatttaaaaacattttccccccttttccaattccggtttgattttttctatgcttttcaaagcgcacaaatgcattatggtgaatgcttcggatgtgttcgagtcgatgttccgttttaatggcgaaaacgcaaagaaaaaaagtaaaaaaaaaaaaaattggaaaatcctttcaaaataaaaaaaaattaacgagcatctcaacacttttggcacattgttcggctgagcagtgaaaagccatttggccaatgtttgtccatccgacgccatggcactatcatccgtcggaaattcagtgaagatatcgccggcatataaacagacaaagcgaagtgatggacattcgcagaaacggcggaaataatccgtaaacgcaatgccataaatgttttttgcaataattggccaaaggttgtgcataatcaactccaaaatgcggtcattgttcgtgtggattaccaaattaatcggaaaggcggcgaaaagtggacgaaaacgtcggagaaaagtgatgacaattcggtcaatataactaaaaatgaatagaaaggactgattgaatttatttatagtcagtcgtcaattttacgatataatgatgcatttgaatccgatgactttgcgtggcaattgaatttgcggaattggcaatcgtttccaatagttattggcaatttccattttgttggtgccattttctccaatgttgggccaaattcgaataaattccaatgtccatttgcgcgtcttgaagtttatatccatatttttgacatccctactaatgattgtgacttagatttaaatggattaaaagctagagtttaagacaggagaggcaaaactaactaaataataacaattggtcacctattta

SEQ ID NO: 26049 - DNA, 1510 bp, Heterodera glycines
caaaagcctcatttggcaagcaaaaaagcctcattttgggttaaaaagcctcattttcacaaatttattcaaaacacatttaaaatgttcaaatgtgatattttctattgtccatgatcaattgcaattttttcttagaactaagcattttatgaaattctgagcatgaaaaatcgacgttgatttttgcggcgctttttccaattttttggggaacaggggggtccggcggtgccgataagcaccgccgggaaaatttttgtaatttttaatgtgatttgttaacagaatttgcccacaaaaatggcttaattttgcaattttaagcaaaaattttaagaaaataaaggatttttgggtccggcggtgccgacaggcgccgccggggaaaaaagtgagaattttgactatatttttggactttttgtgcttattgtgactatttttaggattttaaaaataatccttaacaaaaatgcagtaaaaaaaagaagttttgagttcaactttctcttccactactccgacgagtacttcgaccaccaccaataaattgtcctctacgcctcccgcggaaatcaaaaataaattgcaatgtttggcatggaatatttgcaatttgttagtttatttctaatttgaaagttaaaatttatcattttcaaggagcacgaaattgaagcagtcaaaggtttcgcgacggtttttaattggtcaaaactgcgaggaaatggccaaagactggggacagattgaagaagatgaaaaaatcggagatgaatacgaccaaagtgccgacgacaatggccaagtgtttttgacggattttttcgttgggcgaattaatgcaaagatttaattgattttctaacaaaaattcaatttgatttagtttaattgaaagtagagtgccacgggaccgggaccgggccgggaattcccggtcatccgaggtcccggttcccggtcccgggttttgaaaagctcaggtcccggtcccggtagggcaaccgggaaaaacaagcactggtaagaatgggggtctgacaaaggaggggtcggcaagtgaccgtgggatttccaaatgaaatttggtgggtggattcgcaccaggttcgaatccgctatatgcaattttttttttaaatttttatttttgctttttattttggtacatatgataataaaaaatatttttaattttactttcattttgatatgtacataagataataaaatatttaaaaaatacgacaggatatttattgcacctttatgtttaatgtagtaattttttgatttctaatggaaaaaaatttaaaataaaaaatatgtttttactaaaaatttttagatagttaactttgcatgaaaatcaaaaataaaaattataaaataatatatacatgcatgggattcgaacctgtgacataaaaaacatttgactaacctactacctctacaccaatggcttctttcttggccaaaaagaattatatcttttctaatt

SEQ ID NO: 26050 - DNA, 1034 bp, Heterodera glycines
aaatttgacatccataaaactccattttttctacgttagcgtgtttaaagcaaacccgaaactgataggaaatttaaattgatcataatagaagtttaatttttatttgtcccatgcattttctgggaaatcttttcgtgaaaagttgaaaaatttcaaaacggcagacaacagatgcatttcaaacaattcaacaatataatataaaatttaggcaaaaatttttgttccttcctctttggaaatggtcttaaattttgcttgtaaatattcagataacaagtttttttttactgaaaattttttacacactacaggatgaaacgcaataaataatgtttgtagacaaaagaaattggcgaaaaaaattgcctcaacaatcagtggtgaaactgaaagaaaaaaacttccccaaaaaatcggagcttttccgacggcatcagctgcatttccaacagttcaacagtataaataaatattaggcaaatgaaaaatttttttccttcctctttagaaagtgtctaaaaatttttgttgttaatattcagaaaacgtgttttttttactgacaatttttttcaagagaaggatatgaacaatcacttataaggctcatgcttggagataaaggaatcgggaaaaaaaattatctcaacaatcagtcgtgaaacagttcaataattcggaagcagtgccatattgggaaaagatgcacaagtagagtaggctcgaaataaaggcaactgccgaagattaacaaaaattcaaatttattggccccgttctgctttgacaggccatatctcgccagggagtggcggtagaccctttgttgatacatttgaaaatgtagagcgcgtctagctcattcgaataacatcaaactggtttgtttttgtcacgaaacaacccgctgatggccacgtcgaagaaaagttccaaaatttgacatccataaaactccattttttcataggccagcgtgttaaagcaaacccgaaactgataggaaatttaaattgatcataatagaa

SEQ ID NO: 26051 - DNA, 1763 bp, Heterodera glycines
  unsure (1)..(1763): unsure at all n locations
cagagaaaaaaataattgagtttcagttaaagaaaaaaatattttcttttaaacaatacttaaggggtgtgcattcacgggtgtccgagatgtttttaccttggactatagcgccaaacggacggacaatggaagagaatcaaagtaganccgaaattcgcatggaaattttgagggaaaagtgcaaaattttttcatcgggagaagtttgggtagaataaaacatntagaaatatttattaattgttagttttaggagtgtgatgtcagagaggaattgaagaaaaataaggagatgaaaaagttctttgaaagtgtgccggacaagggaccgatcaatccgagggatgcttatgctgggggaagaacgatgccattttgtttgtacgcaaaggctaccgaagaaattgagatatcaatgttcgacatcattagtttgtacccctttgttaattatggtaaaaatctgcttaatttttgttagtttcctttcgcttcagacaccccataccccgttggagtccctaaaattgtagtgagcaggaattttaatgtgaattggacagcacccgacgacgtaccctatgatggacttttgaaagtaaaagtgatcccaccgaaaaatcttttgtaccccctcctccccgtgcacatcgatgaaatgctcctcttccctaattgttggtcttgtgcgagaagggccaagaatgaatttgtgatgacaaaagatgtgaaaaaatgtaaccatcgtcccacgcagagagcatttttggggacattcacatcaattgagttgcggaaggctttagagctaggatatagaattgtgggattctatcgagcgtatcattttgaacagtttgacagtcaactgttcaaaggatatgtgcggatgtttttgaagataaaggtggaagcgtcggggtggccggcggaggtgaaaagtgaagatgaaaaaagagcattcatcgaaatgtacaaggcaaagtatgacatcggtttggattatgataagatttggtttaatcccggactaagaatgattgcaaaattggtgagaaattataaaaaatctttaaaaaatgttcgaatttaagggattaaacagtttgtggggaaaattttcgatgcgcaacaccctttcaagtacggaaattgtgggcagcatggaacgttggatggaattagggagagacaatacaattgagtttgggcgcccagtaaaaataagcgaagagatatcaagagtcgtgtaccggaaaaaggaggagttcatcagggagcataaagtgtcgaatattgttttgtcattgtgaaccacgagtgctgcgaggctaaagctggacgagtacatggagccggtccaccagatggcatggggtcaactggattttagcttaattatggccaactttcccagggggtcctcggaaaaatcatctaaacaatcgggaaacatttgaaaaaacaaccgataaggctgaaatttctcacagacctttgacctcatcattgactagaataggcaagaatactggcattcatcagcatcgagtcgagcacaaagaaaggcacttggaaagcgccgaaattgtcagtactacccaccgccaattagtgtgacgacaagtgaatccgaaaatcgcgacggtttccttaaagccataagaaagggattaatttgcttttaatgcactcgaaatcactcacctcaataacggatattcgtctttgaaatgacttgtgagcttattgccaacgac

SEQ ID NO: 26052 - DNA, 1116 bp, Heterodera glycines
tccagaaaaaatcactttcttttttttggaatattttacgtgtcaaagggtgtgcattaagcgactcgctgtgcttgcccactgcatttcaaatagctggtatttttatttctccggcctaatccagaaaaaatcactatctctttttttggaatattttacgtgtcaaagggtgtgcatttaagcgactcgctgtgcttgcccactgcatttcaaatagctggtaatttttatttctccggcctaatccagaaaaaatcactatctctttttttggaatattttacgtgtcaaagggtgtgcatttaagcgactcgctgtgcttgcccactgcatttcaaatagctggtaatttttatttctccggcctaatccagaaaaaatcactatctctttttttggaatattttacgtgtcaaagggtgtgcatttaagcgactcgctgtgcttgcccactgcatttcaaatagctggtaatttttatttctccggcctaatccagaaaaaatcactatctctttttttggaatattttacgtgtcaaagggtgtgcatttaagcgactcgctgtgcttgcccactgcatttcaaatagctggtaatatttatttctccggcctaatccagaaaaaatcactatctctttttttggaatattttacgtgtcaaagggtgtgcatttaagcgactcgctgtgcttgcccactgcatttcaaatagctggtaatttttatttctccggcctaatccagaaaaaatcactatctctttttttggaatattttacgtgtcaaagggtgtgcatttaagcgactcgctgtgcttgcccactgcatttcaaatagctggtaatatttatttctccggcctaatccagaaaaaatcactatctctttttttggaatattttacgtgtcaaagggtgtgcatttaagcgactcgctgtgcttgcccactgcatttcaaatagctggtaatttttatttctccggcctaatcccagaaaaaatcactatctctttttttggaatatgttacgtgtcaaaaggtgtgcatttaagcgactcgctgtgcttgcccactgcatttcaatagctggtaatatttatttctccg

SEQ ID NO: 26053 - DNA, 1039 bp, Heterodera glycines
ccagcacctcttggaacttcccgggaaaaattcgggttggaggcatcggagtcggggataagccacaaaaaatggccaaaaatgtcggggacgaagtccctttccaagcttgaacatgtctcatattctccgcccacatatataaaaccgaaatttgtttgtccgaccatttaagccgctggcgctgctgctcctccccccaatgtgtctcaatgcgaaaggcaacgccgacggcggcggcgctcgccgacgacgaggacgaggagagcattgagtcgcgcgtcgccaaagtcgtcgctgtgcccccggcagtgcctgcggtggccgtggccgccccgctgtccctctcccgtctttgctgttgttggctttggcatcggcgtttgccatttgtcgccgttcccatgggcatttcctttgcatgtgccatcataatgttgtccatcagctgcagttgttgccgcggcggtgacacttcgccacaccaatcgaacgaatcgcagacgcgcacggacactttctgccggggggggggggaatttaagagttaatcattgcatttcgaactcatagaatagactcgaaatttttaaaattaattggaggtaaatgaaatttgcactggtgacaaaacgtgcaaaaaaatgagaaaattaaaaataaataaagaccgaaaaatataaaacctatgagaaaaaatgagattttgcagcacaaaaagacatttaaataagggtggattccattcccggccccgccatttccccacgaaatttaaatttctaagttttataaaaaaaaatttatgaaaatttcaaaataatttttttgaaaaaaacgtgttgttagaattcattaaattttggaaagatcgccagaaaatttcgcattattttttctttaaattttcttataaaaaaattcgaagattttttataattttagaacggaagagatatggaaggtgggacctgatccgtttaaataatgcaaaaaagcaataaattgaaaaatgaacgatttcaaacattgtaatgca

SEQ ID NO: 26054 - DNA, 1615 bp, Heterodera glycines
  unsure (1)..(1615): unsure at all n locations
tttaatacaaaaaagaaaacaaaaaaaagaaaaaagaatgactcaaagggagggaaaaagcattgaaaagcattccatcccattctttgcacattcctccgaaagaaatttacaaaagtttgtgccaccggtgctgtccgtattgtgtccactgctcggctcgaccacttcacatttcaggctttgcactgcgtctgcaccacggaattccgatttccgaagagatagaaaaagtcggaattggattttttagggctattgtttgtttcgtttggttctcttttctctgttcctttcctttgatctgtccttcccaaatgaacactttcttccacatactaaatatttatattcttcgtaaatatcaaaatttgcggatatttagtccaattaagtgaattatcaggttggaacatggcctggaaaagtatgaaattgatgagcaaaatgaatagaaaaaggacataaaaagggggggggggtgggaaatgatcangaggagggaacgacctgatcagaatagaaaagtgaagcaaatgaaaggcagtaacgaagaaaatagatcgatcggtgaggaaaaaagagacccagcgattggatgggtttgggtgccgtactgcttcaactgctcgtgctgtgttctctctccgttttctttccttctttttctgttcagtcatcgtcgttcagctccattgcccgaatattcctgaacattcctcaattagtattaatctgtcccggtggattgatcagaatgcaattggcgcatttccccgatcgatccgttttggctgatcacctctctgtacgtgcgtcggtatttctcctccactttttccgattcggctgctgccccctcgcgcccctccacgttggagagggaagtgctgaagcgtcgcattctgtccaatgtatggcccattggctcgtgcacaatttcgatcagatcgtccggccattggtgcgtcaccgctgcaccagacgcagcggaagtgccgacgacaccggcagcactttctgagggaggggcaaaataaaaacggaaggggagggggggggggtaagcgtaagagggaaaggaaagaagcggaggaaaagcaaaaaaaaaaaagggggggggaaagcaaagcgcaatgagaaaaaccaaacaagaccatcacacaacacaaaaacggggaatgtcggtcgtttctgtgcctcttttcagcttcagctgataatgcgtccgatcagtgccggtgatcagtgagtgacgagtgaaagggaatggcaaatgatcagagagaagagaatggacgatggatttgttggattgaaataatcactttgtgaatagcaaacgaatgggtgggtcaaaagcatgtgaaaagcgttccaactcatttgcgcgtgtgttagtgcctttccgtgccgccgccgtgctgcgtttggcaccgccacctccgcgtgtccgtgacgcttttgtccgtaccatattcgtagttcctcgtgccccccattccgccgattggatgcggctgataggtcgaagtcgcgcccgcgggcgatctgctcgccaacgagtccaactcgcgctgcagttcctggagtgcgtcccgtcgcgagtgcgtgc

SEQ ID NO: 26055 - DNA, 1192 bp, Heterodera glycines
ttagaggtatagagttgggggccattatataccccccacacacacacttagcgcactgacgcgcttcccgttgttagaaaaaaggacaaaagaatttacccacaaggacccctctctctctctttctctctctcacaaacactctcttgttttagacgaggaaaaatttccaagtccaaaaaacacacacagtgtgtcttctctctctctctcactctctcgtttgttgttgtcttcttcagctgtctgcatccatctcttctcgctctctctctctctctctttctctcactctctctgtttctctacccccattggtttgatgatacgtcgtcgtcgtcgtcgtcgtcgtcggcactgggtccctcaggggaggaaacgtggaagggactacccacccgtgactcacccaccctccgccggaaatccaggctttccaggtgaaagtgagcactggaagtgaaaattcctcactttatataggcaatttcagcaatttgagcaatttcagcaatttgagcaatttgagtaatttcagcaatttgagcaatttgagtaatttcagcaatttgagcaatttgagtaatttcagcaatttaagtaatttcagcaatttgagtaatttcagcaatttaagtattttaagtaaaaatttaagtatttaagtaaaaaaatacttaaaatacttacattttacttaaaatacttaaattttacttaaaatacttaaattgcctatataagtaagtgattttgttcagtctcttcagttagtcacttacagcaggaaagcgcggagatctggcggaaatcaagagacacacactttctttcagattttgacagccttttctccaatttgaatttggcattggcacacacggctgtgggtaccactctcggtggtgtttggctttgtcgggttttgattgagagtttctggagttttcggttcatctcttctccgttttattttcattctaaattgaaaattaaggcagactcatcaatcaacctgtctctatctatctatctctctttgtctttcccagcgatgggctctctgacccgtcgtcttgtttttctcattttgtactgatccatccatgagcattttgagcaattgagtaatttaagcaatatgagcattagaaatattgaagcgaatatgagtagttttggcccatttatc

SEQ ID NO: 26056 - DNA, 975 bp, Heterodera glycines
gggatagggtataaatttaaaaattccccccaaaaataaaaggtctattgcgcacccccctccctatcatgctggagagcatttgtatgtgtataaaattatcaaaaaaaagagatagccattttttctgggataacctctaaatataaaaatcctctgtgaaataaaaatggcgattgtgcacagccctccgtctcatacgcaagcgcttttgtgaggtataaaatttctcaaaaaaagagatagccatttttctgggatagagtataaatttaaaaattccctcaaaaataaaaggtctattgcgcaccgccctccctatcatgctcgagagcatttgtatgtgtataaaatttatcaaaaaaagagatagccatttttctgggataacctctaaatataaaaatcctctgtgaaataaaatggcgattgtgcacagccctccgtctcatacgcaagcgcttttgtgaggtataaaatttctcaaaaaaagagatagccatttttctgggatagagtataaatttaaaaattccctcaaaaataaaaggtctattgcgcaccgccctccctatcatgctcgagagcatttgtatgtgtataaaatttatcaaaaaaagagatagccatttttctgggataacctctaaatataaaaatcctctgtgaaataaaatggcgattgtgcacagccctccgtctcatacgcaagcgcttttgtgaggtataaaatttctcaaaaaaagagatagccatttttctgggatagagtataaatttaaaaattccctcaaaaataaaaggtctattgcgcaccgccctccctatcatgctcgagagcatttgtgagtgtataaaatttctcaaaaaaagagatagccatttttctgggatagagtatatcaataaaaattccctgcaaatacatacaaggtatattgtgcaccaccctcactatccatgctcgagagcatt

SEQ ID NO: 26057 - DNA, 1742 bp, Heterodera glycines
aaaataggcactaaaaaatggaaaataggctctaaaaaatcctcatttttaggggtgtaaaatgacaaaattcattcaaaaaggtaaaaaaatatattttttaaattcaaaaatttgtccaaaaaaaaaaattttaaagacgatttttgagaaaaattttttcgattcgtagggggtgtatttttcgtttttattgcatttttgttaacaaattttcggcaaaacgacaaaataggcaaaaatagactctttcaaaaattttttaggctttaaaaataaagcctagaaaataggcactaataactcgaaaagtagctaaacaacagcccaaaaaaacatgtttttcgtgcgtttcaggccacggggagctcaggaaaaaataggctaaaacctaaaaattgcatccctattaataataattagagaccgacttttgaggcatatgaaaagcaactttttaatattaaaaaatttttgataaaataaggaattttctgaaattttctttgggtggcggcttgaatatacggcatggaattcatatcaaattttaaaattacccgtcgaaaaatcgcactttccgtcctttggacacacaaaaaatttctgcagtgaaattgtacgccgaaaaaactgtttacaagctaaaagatagatttaacatcttcttttataaaataatattttaaatatttcagcaataaaaatttcatattatctttttataatttaagcgcttttttttgatttattttcaattttattaccttcacaactgagcacattgtaatatttaaaggtgcaaactccgccacaaacggtacatattctgttttttgttgcttttattgtgttcaacaacattttcttcttgaaacatcgttggaatttaatggaatagaaatattaatagagaaaataaaaataaaaaattgcaaaaattaaataatttatgtatgcattacctaactaattggattaagtaaatgaaaaagaattcagtgaaaagaaaaatttatacataaaatggtttctttgattattttttccaaattgggagtttatggtgacccattactcgtcacttttcatttcgtcaccgagaaatttactgtgtttaatgaaaatttttcttacccaaaatttgtagacttaataataattattagagtaaatccgattttttaaattttctgaaagcaaatgttttataataaaaagcatcaaataaattattttttcaaaaataaccaaataataaaatatataaaaatcaacataattacccaaacaaaaaaaaaaaaaagaagaaatttttgaactttccaaatctaataagcatgtgcgcaaacaaatgtgaagcctaaatagatttaatggccaacactgaaaaaatgaaaaagccacgaaaatagagaagaaaaaaaggccaaatgagtcccaaagatggcactgagttgccaaagctcactcgaaacaaacagaagagccgattaaatgctcacaaaggaagttccccaggtccccatggggatttccgaatgaaacgtggtgggtggataaagcacccatgggttcttaagaaaaatgtttttattttctgccaaataagcacgagtgccattatgacatgccagagttttttaatgaacaacaaattaataattttatttgcacctttacagtgtacaatggtgtagctgcagtgcgctagttagcgttttatgaacagcaggttcgga

SEQ ID NO: 26058 - DNA, 1809 bp, Heterodera glycines
  unsure (1)..(1809): unsure at all n locations
gttgtgccncatttttgtcncaatcncaacggnataatttgtgccaatggctccaaattcggcggcttggaagaagaagcattgccaatgtccttgattttcaatgggtagtcaagactgtttgccgccgcaaccgcaaattgactaaatttgtaagcgattagcgatttaaaaaatgattttgactgattttattgcgttcaaaatttaggttaaattttttatgaaaaacataaactatctttaatgggctgggatttttagtttttagttatttttttcttcaaattgcattttatgataagcacacgaataacatattttctcccccccccaattaattagagcaacttataaatactaaaaatacctaatggggacttggcacctgaaaacccaactaattcagtcgtttagcacctattttcacagtttttgaaaaaaaatattgaagcaaaatgcaataaactcaaatcaaattttactcggcggtgccgatccaaaatacctatttttggcaccactttttcagcacttatttaggtatgctaattttgttatttaagcgcacctaaaaatcccagccataattttttatattttaaattaaaaaaatgaaattacagtgcagcaaattgggtcacatcacggaatttacagtttccactaaattcattgatcgctttttcgtcaacaacaataaattcgtcaaagatttccattgattatgtgcttttaattaaaaaaaatattttattaaaaaactttggcaataaaaaacaaaacaaattttcaaagaaaaagttttaataattaaaaatgtggaaaacattttaaaaagatgcaaatgcaattccatgatcaatatttttaaggtcagagaaacgttgtttattcaaatgatttgtttacatgtgaaaagaataaaagacatgaaggaaaatagaaaaacaaaaagcgttattttcttaattaactcataactaaacaattgccaagtttattcatgccatcactaattgatttcataatggaaaaacgcgtgactaattgaccccgctaattgaccccgctaattgaccacggcaataagctttgtatcgccagtcactcatcaaagctaaaatgggcataaaatttgagaaaattaccaataattcaaagtttgagcaaaaatgacaataaataactaaggcgggaaatatatggaaatccattttttccctagactgtggagggcctgaaacgcacgaaaaacatgtttttagcttgggttgaagctcctaggaaggaacaattaagaaatttatgtcaaaaataagcaaaaaagctaaaatttcgcttttcgatttgatttttcgctaaaaattcaaattttagctttatcgtctttttgttcttctaaaatgatttttaataccgtatttagccatttttgaaggttttactttatattcaacaaatttaaagaaattttgggaaagtatagtcaattttgaaaaatttatttcaatatttgccatttatgtccttattttggctggtttttgggccatattttatggccatattttgcgattttatgtccaaatatttttccccgccctaataataactccatttttaaataaataattttaacccaaaagaggaaaaataatacaaactctcattgaaaataagaaaaatataaaaaacacacattttatgatatgccaaagaaatcagttgatcaagccgaacccatcagcagagtttacatttaaaaaatgcaaggtgtttaccgaaataattgaaaatgcctaatat

SEQ ID NO: 26059 - DNA, 2245 bp, Heterodera glycines
ttttctttgcgaaaattcaaattttgccttaaaagtgaaaaaagtcataaaaagggtcaaaaaattcaaattttatcaaaaaatcgccaaaatatgtgacaaaagctgccgaaaccccaaaatttttgagcttttcatgcgatagcatatgcgcaaaaaaaatatgtaaaaacatataaatccgttcactgtttataaataaaccatgtttaaactaaaacgaaatacacttttatattttgataagggagataattatttaatataattgaattagttgtaattacaaaatctttttcctcagaattaatttaaaaatactatatttcttgtatgtaccgcatggttaaaaattacaacattgaatgaaaatacactttttatctagttcctacgtttttctgttatatagaccatgagatcaacgaaagactcgcactacacccattttgccaatcaagggcttaaaaagattcaaaaataaaataagatttaaacgctttcttaaaaatgtaaaaaatcattcaaagacaaatattattttttattcaaaatattaaaatcaactcaataataaaaaagatacaacataagataaaataactataatacttgtactaataaattattgtggtgaaatctttaaataaaaaagattactctatctaaaaagtcaatgcattttaaattaaagataaattagctaatttaaaacaagatgctatagagaaaaaaagaatgaaataattaaattattaatcggtaatccattatttaaaacaaaacaaaggaccatgactttctacgtacttctgattttggaaaacaaagtgatcaacacgttgggttgcaatttgctcaggtttagtgccccatgtaaactctcaaaaaaagttatttattcaattaaaatagataaaatgaataatattttaattttagatttaataaaaatcagcaaaataataatcaaaataattaatgatgttgttgtattcagaaaattatgaaatcaatgagtcacagaaacatacaattaaattaattgattaaaggaatatatatatttgtacagatactaatataaaaataataattgaaaccaaatcggacttgatattaacctaatcaatccgaagttaattttgagtgccgctattgcacgtcccggggtccgcagactaaaggaaataaaagcaaccgatttgaagactcaaattcacaaatatttctagtcaaataagaccacacaaattccttggataaaaaaggtctaggaaattcctttattccatcaaaaggcaactgcaaccgagtgaatgactgaacaacaaaaaacatagaaaaaatagaacattaatagtccgtcggtcataagaaaacggagatacaatttagagataattacagagagagagagatagagagtgaaagaagtagagagaagaaatataaatgtgcaaagaatttactggaaaatgatcgagaacaaaatgtatttaataatttatatttgagtgactgtttattaataatttaaaaaatatataaaaagctttgctaaaaatattgacaattaattacaagatgaatacaaattatatcaaaaaaatattataataaatctaaagaataattatcaagggtgaacaagcaataaattttgtcggtcaatataattgataatttttaaaacgcaaaaaaaacaacacaataaaacctgatatggattttttggtaaactattagtgaatatataataacaagtgagatgtcaaattgacaaataaatgttaatttactaataaaaataagtaatttaattttttaattatgtctacaaaaaagaaattaatattataaagagagtagtcaaaaataaactaacgataataaaatgcaaaaaataaataataatttgtataattggtaaaatttataaaatatattatgaatttttgaatgtataaattagattaaaaatacccttatgggtagatcacaaagtaccaaaaattcgtggagcaaccaaatgcatcccaatcaatatcagcaattctcggcttgactaatataaagtcgctattttttatgctctttaggccattcccaaataaaagaaaaatatgtgtaagtgtaaataagaaaattaaataatctcataaaattataaatcaatgcaaaaaatcaactttgtgtttgatcaaagtttcaccgaaaaataaacaattatgcaggaataagg

SEQ ID NO: 26060 - DNA, 2276 bp, Heterodera glycines
agacagagacagttaaattcaaggaaaatatacaaaatcattagtcaaataaaattcattttatatgtttttaactaattttaaattttatctgaaataaatgtatataaagttttgtaatgtatttgatctatttcaataatataataattttattaaagaaactattcacaaaaaatacttaaaatatattacagcataaagaaagcataattattaaacaataaaaaaagtgaaggtaatacattaaacagaaatcattattttaaaaataaggttagttaatacaatataaagtgaacatttagattaataaaccaattaataaacaaaataacatgaataattataatctaacctatttgaaatgtattattattttctataatttagcttgaaaaattgcatagcttattcgtagactatccttcttataaaccttttttgggcgtttatgtgccgtaccgcctcttttagtaatttaagaccttttcaaaaaaaactaaatttgatttttttttttttttgctaaaatttatttggaagttcatatattaatataacatcaggaaattattattgataattattcttgcaaatttcgaatatagctaataatatctgaaaattaaaaaaaaataagcattgcaattctatacgaaaatgataattgaataattaatattaattattctcattgcaaacgtttttaaactttaatctaaaatagcaattttcatattttcgtaataaatatgtaattaatgtttgctttaataactgaaaagataaagtagccaaaaccaacataagtttctttgcaccatgaagcataaaaaaattaataaagataattaccgttgttgattcaagccaaaactaaaggttttacttaattatatttggcagtttattaatttcataaaatatggaaataacaatatggcacaatggtgtagtagcagaaaaaaaaattagaaaaacaatttaaaaatcaattcaaagcattaaaattagaggaaaaatactaataacaaaagaaaaataatattaaacaattaaaagatcgtgctaaaaaacatctaagagtaaaataatcattgtttttaatctattaaaaactttctaaaatatggtattataaactcattattaaaataaaagcgaaagaaatttattaaataattatcaaacaatgtaaaaagcattaataaagagtgaaatatttaatttaaagaaaaattatgcaacaaaagttgaggactttttttctttttatttatttatttttatcttttatcatttgtttttaattaaattaaatactactacatatttaacattaaaattctaatgcactatacaaattttaattctaattgtagattttttaattactatattgttttgttttattaaattttttgaaagaaaaacagaaatttttttgaaaacaaaagattatgtatgaaagtagaaaaagagaaaggaagtgagaaagagagagattgagggaggagagagagaaagagagtgtgtgtgtgagaaagagagagtgtgtgagagagagagagagaacgagagagggaggggagagagagaaagagagtgtgtgtgtgagaaagagagagtgtgtgtgagagagagagagagagcgagagagggaggggagagagagaaagagagtgtgtgtgtgagaaagagagagtgtgtgagagagagagagagagagagagagagaacgagagagggaggggagagagagaaagagagtgtgtgtgagagagagagagagagagtgtatgagagagagagagaggagagagagagagaaagagagagggagggagagaattaataaaaaaaaaagataaattgatacagaaagaaaagaaaaacaaatagatgtgtgttacgaacacagagaaagaaggaactatagaatttaaaggacatgagagagagaggagaggagagaggaaaagagagagagaaaagaggcagaaagagaaaagtttttcaattcttaaggtttattttctgaacaattttcaggtcatttattaggggtgtattttccgattttattgcattttttgtggttcttgaaaaaacgccaaaaaggcagcaaaaaggaaaaatgccaaaaaaggcatttaaggcacgaaaatcccgtaaaaggcaaaaaaaggtataataaaagtcaatgtaggagcctcaaaccaagttgaaaatgcattatttatgcttaatataaagaaaatagtgcgcagaaa

SEQ ID NO: 26061 - DNA, 2253 bp, Heterodera glycines
ttttaagtgatcggaaacgaatctttttttttggaatttttcacataaatcattttttattggaaaagcattcattcatttctttttctgtgtgcggcaatgacattgaccaaattcgctgatatttttttgttttaatatccatttttctttccacatcactcctcccaatctcttcagcacttttgcagcaatttgcgggaaaaattggcggaaggaattgaaagaataaattgggggggggggaaaggtgaccttgggggatagggaggaataaatggtgatgatgaatatgacgagaatggcgaacttttggtggtgtggaaaaggcggaatttgaatgcaaattgagacgacgacggcacagaggtcaccgatgagaattttagcaaattggcataggggacggaccaaatttcagaaatctttcaaagtctatgattccatccctggttggcatgagggaagtgagggagggttgatccccaaattttgcatttttgccaaaagcctctgaattgccacattgattacctgaataagcggagtaagcggtcactgccggcttcggcggcaacaaaataaacagacaaaggaaaagcattgagaggaaaaaggatgaagcagttgctgccgaagttcgatgttgatgaaaaccagcagtaatagatggaaaaagccatgagaaaatggcacaaatttgcacagtgattaagccgccttcatccacgctcgacttccattgttggcatttgccgagccttcgtaacggaaggggccaattaggctcatggtgccgccaccgttgttcaatttgccgccgctgtcctgccactgttttctgctgctcctgcttccttccactggtgattagcatcgtttgcgcttcttccgctggctggtgccccactttcgctgccaccgctttttgggccattcgccgccgcgacctttgcgcgtcgttgttgtgcccgctcaaagtgttgctaatttgttgcccgtttttttcggttgcgccgctggcagtagcgtccgttgtcccaacagaagcacaacaaaaactcatcgccatactcaaaatgagctgccacaccaaacaaaacgcagcagtgggcgagagattgagcaaaagcaattttaaataaaaaactttttcatttgtttaaaaaaaaatttaatagatttaattttgagaaaaaataaagctggttttaaaacaataataatttgttttcatttaaaaagggggaaatttaagtaaaatgaaagagcgcgggttctgttcggctgggagcgccaaaaatttggaaataataagtacagagattccaaatatttgtacttgttgcattccatcggcacaatgcatttgatgacatacacatggatttttggaaagcgggatggggggggggggcgataggcaaaaatggactgaccgcggcgcgtgaaaacagttaaaatacaatataaataataatagtaacagttgagccgatgcgcctgatgatgtcgtcacagaacataccaccgagcagcagcagagatagccggggggggggggggagaaattggaatgacacgaaattgggcgggaccgggaaaaaatcctctttcctaggcagcatagcagcgattgtgatggtggtggcggagagtgttctgctccgtcgccccgctgttgccgctgctgctgactgtgattgtggtggtcttcgtcggtcggctgcgtattgtataattttggacgaccggacgggcggatgatgacggaaggccggatttgatagatttgtcacttccatcactgttgttgttgttgttgtggttgctgcttatcgcttatctcggcgcgacgcccttaactgtgcgctctcatcagcggtcgccggtgtggcgcccggcgacggcggcggcggaggagggcctccccactgcgggcgggcgtttttggcgctggggtcggcggtgcgcaagcgatggcggccgtggcggatgggcgggccggcgcaaaacaacagcgtccatccatcaccacaaccacaacaacaaaatatgtaataataatgagagaaaggcgaatgaatgatttgggaccgggggaaggagggattttgtgggaggaatgactcaaaaacacggggacgaaaagatggagaggaatatgcggaaaaggagggaagaagaagcggcggctgaaagcagaagcgaacgttggttgcagccatgttttgtggtggtggagatgggtgg

SEQ ID NO: 26062 - DNA, 1115 bp, Heterodera glycines
ttatgcgtaacgactttcctgctcgatgggcaaatttcaccgatgaaattttgccacttctccgcgtgtcagagcctgaaacacttatgggcactttgctaatacttcacagactttgcaaaatttacgagttggtctttgattatatataagagcacttctccttataatatatagaattcagatctaattgtaagtcatttggtctagtccaagtatacttacattttcattgtttccagaacattgaaaacccggtggtctgatcggcccattttgggcattgtcccacgggcacttgccctttcccagtcggaaaggtctccacttttaaatcggcttattgataaaatcccgatgaaaataattttttgcaataaatattggacctttgcttaaaattttaagattaatattaagtgtccacaatcaggttaagaatccttttaaatatattatatgcagggttgccagatgaaaattttaaaaagcctcattttgggtcaaaaagcctcattttgacaaaatttattcaaaacacgtataaaatgttcaaatgttatatttttgattgtccatgatcgatttgagcattttttttgttagaaataagcattttgtgagattttgagcatgaaaaatcgaagttgatttttttgcggcgctttttccaaaaaacttgggaatgaaaggggccggccggtgccgataggcgccgccgggaaaatttttgtaaatgtgatttgttaacagatttgttcacaaaatggccaaattttgcaattttgagtaaaattgaaaaaaaaagaaaaaggatttttagggtccggcggtgccgataggcgccgccggagggggaaaaattgagaattttgaccatatttttagcagattttcattgaaaaaattcataattttgtggattttcgaaaaaaattgtaattttctggctaaatttgggtgagatttccgtttgatactctattaaaaaccaaaattcaaattaaataattgctaagcattatgccaatttatcaaaatttaaaagattctgaggatttttcccaaaaagcttaaaaatcctcaaatttctcaaaaagccacaaaaatcctca

SEQ ID NO: 26063 - DNA, 1611 bp, Heterodera glycines
  unsure (1)..(1611): unsure at all n locations
tccttgggcaatgacaaagagctgctcaatcgtttgattctcgctccgcacattgacacgtgtgatgaagtcaacgagatcatgatggcgaatgtgccaggtcaagtgcgggaatacttgtccacggataagccccttgacgaccgcccactggacatcgatgagatcgagtccgaagtggctgcgttgaaccggcgcacagactcgggcatgcccccgcacagtctccggcttaaagtcggatgcgtcgtcgtccttcttatcaataaaagtgataaggaaggactgatcaatggcacacgcatagttctggaagaacttggcgatgatcgcctcattggtcgtgttatcaatagcaatgctattggcggccaagtgagattctttcttgaaagaacacgaaatgtctatgaagacaaatcgcctggcggcataaaatatgagcgtttgcagttcccaataaagcctgcattcgctatgaccattcaaaaaggtcagggccaaacaatccgcactgtcggcattgatctggaaagggaagtattttcccacggtcaattgtatacggccttctctcgggcaacagacggaaacaatgtccgtgttcatgctcccaaccgggaaattgatgcccaaggccgagccaaagtgctgaatattgtagctactaatatgctcaagttacaataaatggcttagtccagagcagttgggcacatggtttttggagagatgccaatcccattcccatctgcactatgttgggtgcgaaaatggtgagaagcttggatccgggacatggaccggtcagccctctttagggcctacaggtgaattgccatttagcgctcaacccaataacgtgccaacgcctggactaagggagggaggagggccatgacgtgcaacgttagggcacttccggtttccattgcattatgcgatgtgtcaactccaattattggaggaaaccaagtgcatgtcggctgacgcaaagaccctaacagactaaaacgcgcctaggtagcgaagctcaagaagcgcgcagcgctttcccaagcgccaccctcgcatgcacacacccgctagtttaataagttatatagtatttttttaataataaaaaacaatgataattagacatattattattaatttgaaattttatttaaattttagtataatatgctacatataaaaaaaattagttggattataaatgttctttattttattattttgaaaaactaacattttaggaatttattttataatttgtgagtttttttgaaaattaacatatgtttttgtatcaggttgagttcaatgattatactgattattattttttattttgtgaaagttatcagcagataatctgcaagattttaatgaatacatatttaatcatagcattttttcttgttcgttagttccttatttgcatgagaattgagaaatatacaagaaataataaatagtccatatttatttacaattcatatnacctattggcggacttatgaaacgtaccagcacgaataaatacttntatttttgaattcgtaactttataagttcagttcaatagttatttaaattttcatttta

SEQ ID NO: 26064 - DNA, 986 bp, Heterodera glycines
atgcaaataattttgcttgtgctgtccgcatttattctttttcactcggtcggcgcaaaagaattgccatcggcgctgattcagttgccttcccgcggtccttcttcattgaaaatgcgagaagcgccgatgaatcagatctttctgcacggcttcggcggagatgtgcaccagggatgggccaaattgaaaaataaaaagcgaaatgcgaaaagcgaaatttgcgaaactgaaaaatgcgaaatgaaaaaaaaagcgaaatgcgaaaagccaaaaaatgcgaaatgaaaaaaaagcgaaatgcgaaaagccaaaatatgcgaaaatgcgaaaagcgaaatgcgaaaagcgaaattttttctacaaatttttaatagttaaaatcataaagcaaaaatcattttttaaaattttattccaaatttaaaaatcaataaaacgctttattgaggcgcgctttttccaaaaaaactttttgggaagagggggcaggcggcgccgggaaaatttttgaaaatttgattaaaatttgttgacagattttcaccaaaaaatcatcaaattttgtgatttttgtatcatttttctaatgagaaataagagttttggcgcgccgctgagaacagtttttcagcaaattaccaaatttcgcgattttgggccattttctaagaaaaataggagttttgggggcgcggcggtgccgataggcgccgccggggaaaaaattggaaattttgatcatttataaacagtttttcactgaaaattagccaatttataggtaaaattttgaaaaattttatgggaatttaatccaattcttaggggtgtaaaagtcgcatttcgcgccaaaaagcgaaatgcgaaaagcgaaatgcgaaacgccaaaaaatgcgaataatgcgaaaggcgaaatgcgaaaagcgaaacctcggcccatccctgatgtgcacccgggaagcgaagaagaggcggtgaatcat

SEQ ID NO: 26065 - DNA, 1156 bp, Heterodera glycines
ttttttttaatttggtgtcatcaaaaaagacaactttactcaatttacgaggtgttttttaaagaatttttaaaattattttagtgcgtcaaacatttcaatcggagtttccgtttgtctttagacgaatctcaaatcaaaatcaaggacgacatatcattacaaaatggccacatatagtgaatttgccaacttaaaataaatagaatttattgctttattatatcaaaaattagataaaatttagaatggttcgacaaaaaaaaaaggataaaaataaatctgccaaataccgtatccattcacttgctgaatactgtatttgtttaattaaaaggtctgatactctgaaataaacattatcactacaaaaaaattgtgtgaaaattcaattattttctgagaaaactaaggtaatgctgtgcaattaataaaagcataaaaatgcatttttattcgtatggcattcaaatttttttgaattggcatgacaacaatttgatttataaattaaaaagttaccaatattttatataaaatttgtggactatatttaaaacaaatttattttaggttcatttatggggagaataatgaaagtttaaaattgattttcataaaaaatcaatccccaaattattcccaaactatcaatgaaatcaattttcaaattattcaaacgattttaaaaataatgcagggcttccagatctgaggttttatcctcattttgtggtttttgatagatcaatgaggatttttttgaaatgaggattgaggatttttgaggcttttggagaaaatcgtctgaatctgttaaattttacgattaatttaaatagtttggcataatgtttggcaatcatttaatttgggtttttaatagagcattaaaacaaaaatctcacccaaattttccaaaaaaaatgctaaatttttcatgagaaccagaaattttaatttgtccgaaaacaaaattatgaattttgtaacgcttttcaaaatgttgtccctttttcaattctctttttttgtgaatcattcactttccatccaaacaaatgcgtctgttctgatcagagacgggcgaagctcggcttcgcactcgaagccaaagacgaagcccaattttttttgaagcacgaagctccaagtt

SEQ ID NO: 26066 - DNA, 1654 bp, Heterodera glycines
  unsure (1)..(1654): unsure at all n locations
atttattcatctccctttttgatagaaaaagcatcacatttacgaaactagcatgtaaataaaatttggtgcgtttcacagcattttctgaaaaaaatatttatgaattaattatgcaaaaataaataaaaatttctaaaaatttgatcgtccataaataatttgtaattgatcaggggctcaccaaattttgcaggaatacgtatcggaacactacaaatgcttactaattttcctagattttttaaacccggtgaaaattttttgcagacaccaccacttttgcacttaaaaaaatttcaaaaaactttaaaaattcatagaaaatttaaattcataggtactactgctaaatcaacgcagagacgcctttccttgacctttttaggcccctgcaaaatctggtgcgcttctgatcactactcgaaaaatgagtgattgaattttcactaaaaagttaagcctaaactttttggcctgtttaaaaaggaattaaaaattttaaaaattttattcatctccctttttgatagaaaaagcatcagagtgcctaaactaacatgtaaataaaatttggtgcgtttcagaaccctttctgaaaaaaatatttatgaaacaaaaaaatcgattttttcaagtgtccgtttggggtactcaaacaattatggggagcaaaaatccaacgcagaattaaagtacaggctatagggaagctattcccgaaggattcggtctccccataaatctgggcgcatcggttcggggggactgccccgaaaacaaaaataaatcgattttttcaagtgtccgtttggggtactcaaacaattatggggagcaaaaatccaacgcagaattaaagtacaggctatagggaagctattccggaaggattcggtctccccataaatctgggcgcatcggttcggggggactgccccgaaaacaaaaaaatcgattttttcaagtgtccgtttggggtactcaaacaattatggggagcaaaactccaacgcagaattaaagtacagactatagggaagctattcccgaaggattcggtctccccataaatctgggcgcatcggttcagggggactgccccgaaaacccaaaaaaaaattttttggataaaaattatttaaatgaactgactagataatatttaaaataggttatttctcttcctttcagtatccctgcaaagtttggtgcgcttctgataagtttctgaaaaaaaaagttaagcctaaactttttggcctgtttaaaaaggaattaaaaatttttaaaaattttattcatctccctttttgatagaaaaagcatcagagtgcctaaactaacatgtaaataaaatctggtgcgtttcagaaccctttctgaaaaaatatttaagaattaattttgcaaaaaataaataaaaacgaaagactcagattttcgaaaatttttttgagccagctagctcggcgctcatttcagtgtaagtagtcctttaccggggagatccctgcaaagtttggtacgcttctgctcattagcaaaaatatgagtgatcgaatttcactaaaaaagtaagcctacattttttggcatatttnaaagcanntaaaattnttaaattaataatttcctgcacgaggtactatcg

SEQ ID NO: 26067 - DNA, 1440 bp, Heterodera glycines
atataatagaaataatcttaaataaattgctttatacttcatgcatgatttccattaaaaaataaaataatacagaccattctttatcaacatcagaccattaaacactgttttttttctatttcatcaaaagcaataaaatagtgaaaatatactcctgaggaatgatccgaaaaaaatttcagaaaatacacccataagaattgaaaaattttctcaaaaataatcgtcaaattctaattttgctaaacatggttaaaattctcaatttctccctcggaggcgcctataggcaccgccagaccccctattccacaaaagatttttggaaaaagtgcagcaaaaaagtggtgtaaaaagagaaaaaaaaatgaaaaagaaaaaaggacattcattgcccggataggagtaccccaaatcatggaaccgtccctgatagacaatcattttaagcgtgttttaaaattttgtaaaaatgatgctttttgacccaaaattagacttttttgcctaccaattaaggattttgaaaattttcatctgggagccatgttttgatttatattagcataataatctggctaaaaaataaataatataaaagttttaaaattaatatgtgaaaataaaccaatcaattttcgagaatcggaaatacaattaaatcaataacaggtggcataatttaaagttggtgacaaattacaggaaaatttataaaacattaaaaacaaatgaaaaaattaaaatgtaaattaaaatgaataatttattagcaaaattgctttatcttttttatccatgacaattaagtaaaatataatttattctcgtcgtagaactcaagtgatgaacaaacggacttgatttcgaaagttagttttgtgcttctgaaaaaatattaaggaatgcacaaaaaaaaatattttaaaaaatgaaaaaatgcaaatatacaacttaacgaaaaggtaatactataaataatccaggctgatcgtattgctttaatttaattatcatatttattgtaatcattaaaaacgaattaaaatacttataaaaataacatcttgtgacccaaaacacctagaaaacgagacttcaagtagtaatgggttacaggggcaggggtccagggctttaccacaaacctaatccaattagccatcctcctcaggaatctcgcgcagttttttttagttttttaaattatttaaattcgggagaattttaataaaaattaaattcgccgcggggtgggggactcgaacccttggaaacgggagctctaaccactcggccacggaggcggttgaaatgatgggagcaaatgttggatatgtgccgataattttcctcccgatcctcccccagggcggcggcgatgatcggacccctccccctctccggacccctccccctctcccggacccctccccc

SEQ ID NO: 26068 - DNA, 1723 bp, Heterodera glycines
  unsure (1)..(1723): unsure at all n locations
tttcatttttaacccctcaaaagtttaatcatttttgatatatttattatttatggtattttttggcctttttttttttcatattgttttaaatgacgcgctcaattgatcagctgatcaccaaagcactttttttcatgtttttttgagtcattttggcgccacccaaagttttttaactttaactttttttcattgtcaaccagatcaaaaatattggtattattcgatctcttaaaaggctctattagccttacaattagaaaaatcacaaaagtgttttctagcttataaaaaagaggtttcgaaaaaatttcaataattttgtcttttttgcaattttagtgttataacttttttgggaattgtcgaatctccaagcaatagcatacaaacagcttctaaacacttcccctcccccccccnccccccgattcattatgtaccagggctggccgtgattgaatttccaatcacggaaatccgtgagccgtgatcacggggctttaaaaaaaatccgtgacccgtgaaccgtgatcacggcaccccaaaatccccgtgatttccgtgatccgtgagccgtgatccgtgattataaaaaaaaattttctaatgattttttatttaaatttatttaaaaaacggaatttaatcgcgggaaaaattcccaaaaaatgttttaaagaaaccaaaacatataaaccgctttttttgcggcgaccttttccaaaaaatgactaagtttacgatttttggcaattttttgaggaaaattagagctttttgtagaaatctccaaggaaaattttttatttttaactaatttattaagaaaatttttcaaatttttaaatttttcaaatttttcttaaatttaaccaaaaatctatttatgtagagaaaaaaatttcctctaatttgtaagctaacttttgatgctgaaaaaaatcttttggaccaacatgctcagtccttcatgacgatctgaacaccccaaaagatactgaaagtcgggaaaattttagaaaaaattcttagagggttgggaaaattttctgaaaattttgattaggcctttcgttttaaatttaagcgacggagagaaaaaatagggtttttagcagtttatatgccaaaaatggtaatttttctgccattttggggtcaaaatttcaaaaatacggtaaaatgggggtccgtctgccggtggtgccgacaggcgccgccgggaaaaattttgaaattttgagtgaatttgttgacagattttgtccaaaatatgtccaatcattggttaatttattggtctatggacgttttaaaaaataaagaaaaataattttcaatgttatgaaatttcttgttaattaaatttcaattaaaattatcaaaacaaaatatataaattgtcctatcccaatggggaattgaacccaagggacagacaacgaaagacagaaggcttaaccaccagactacatatatatgttacttgctaacttgtaagcaggaaagaatttatttatttttctcaaaaaattcttcacaccactttcctattttcgtctcaataaaaattccctatataaaatgccaatcacggatcaaaatcacggaaaatttgaaaaaatccgtgacccgtgatccgagatcacggcaccccaaaaactccgtgatttccgtgatccgtgagccgtgatccgtgatcacggccagccctggt

SEQ ID NO: 26069 - DNA, 1077 bp, Heterodera glycines
tttaagtttcagaatttttggaattttttaaaaattcgaaaatatttggcaattttttggccctcgggattttggcctaatatttgaaaattcataacaaatcgaagggttgatcaattttacagcaataaagccttaaaaatagagaaaaatcaggagaattttatggactttatttggaatttctatctaaaaaaggaaaaaagttattccagaatttctggaaaaattcgaattttcagaaaaaaattcataactcggttctgaaaagatattctggacaaataaaatactacaaaaatccgcagttttttgctctattatataaattttatttggcatttttatcacttttttaagaatttttataaaataaaagtgattttgagattcgggaccaaaggggtgagcataggatttttgagcggaaatttttttttcacaaaaatcttccaaaaatatgtctttaggggttatttgggccgctgatcacgaatacgtgatcagattttacttttgacatcgttaagacctcagaatccctgtgtgattggggattctgaggcatcattttttgggggggggggcaaagttcgaatccggacggtgtaacaatatttttctgtgcatttttgggttattttgactgtttttaattaatttgaagatttcttttaaattatttaaatttatttttttttaaattaaagaatttcattatttttttttgaatttgtaaaaaaaataatttaatttcaaattaaataattattcaattaataatttccaacgttgtttttaattaataactaccatttttttcgtattttcattgttttattcatttaaaatattttttattttattaataataaattacatttttttatttgaattaaatttttataaaaacttttcattatttatttaattttaaaccatgttgtacctcttctaatcacttttgtacctcttctgatcactgttggactcatcttaagacctcagaatccctgtgtgattggggattctgatttggatggtttgataaatttataatacatcctaataatacaa

SEQ ID NO: 26070 - DNA, 973 bp, Heterodera glycines
tggaatttcaaaattctcgaaaactggcatcttagtgagaattgaaaacggtacgggagaattacaaaataagtccccatttgcgcttaaaagggcgagaaatgtcaattggagcaatattttcggcatgtagtgctggaatttcaaaattctcgaaaactggcatctttgtgagaattgaaaacggtacgggagaattacaaaataagtccccatttgcgcttaaaagggcgagaaatgtcaattggagcaatattttcggcatgtagtgctggaatttcaaaattctcgaaaactggcatctttgtgagaattgaaaacggtacgggagaattacaaaataagtccccatttgcgcttaaaagggcgagaaatgtcaattggagcaatattttcggcatgtagtgctggaatttcaaaattctcgaaaactggcatctttgtgagaattgaaaacggtacgggagaattacaaaataagtccccatttgcgcttaaaagggcgagaaatgtcaattggagcaatattttcggcatgtagtgctggaatttcagaattctcgaaaactggcatctttgtgagaattgaaaacggtacgggagaattacaaaataagtccccatttgcgcttaaaagggcgagaaatgtcaattggagcaatattttcggcatgtagtgctggaatttcaaaattctcgaaaactggcatctttgtgagaattgaaaacggtacgggagaattacaaaataagtccccatttgcgcttaaaagggcgagaaatgtcaattggagcaatattttcggcatgtagtgctggaatttcagaattctcgaaaactggcatcttagtgagaactgaaaacggtacgggagaattacaaaataagtccccatttgcgcttaaaagggcgagaaatgtcaattggagcaatattttcggcatgtagtgctggaatttcagaatctcgaaa

SEQ ID NO: 26071 - DNA, 1154 bp, Heterodera glycines
ttggtcaaacgccagaatgcaagtaattcactgatgactcctcccaagtggtgcgcatctcgtcaaaaatggatatccgatcgcaagaagtagagttgagcggtaccggtaccggtactggccggtaaaatgtatgcagctataaatttacaacgaatacaaaatatattctacagataatataaaatgataagtatatagtaattttttattcgacaaaaatcaagcattcatgcttttttatattttgcaggtaaatgtatgcagctataaatttacaacgaatacaaaatatattctacagagaatataaaatgataagtatatattaattttttattcgacaaaaatcaagcattcatgtttttttatattttgcaggtaaatgtatgcagctataaatttacaacgaatacaaaatatattctacagagaatataaaatgttaagtatatattaattttttattcgacaaaaatcaagcattcatgcttttttatattttgcaggtaaatgtatgcagctataaatttacaacgaatacaaaatatattctacagagaatataaatgttaagtatatattaattttttattcgacaaaaatcaagcattcatgcttttttatattttgcaggtaaatttatgcagctataaatttacaacgaatacaaaatatattctacagagaatataaaatgttaagtatatattaattttttattcgacaaaaatcaagcattcatgcttttttatattttgcaggtaaatgtatgcagctataaatttacaacgaatacaaaatatattctacaaagaatataattttttattcgacaaaaatcaagcattcatgcttttttatattttgcaggtaaatgtatgcagctataaatttacaacgaatacaaaatatattctacagagaatataaatgttaagtatatattaattttttattcgacaaaaatcaagcattcatgcttttttatattttgcaggtaaatttatgcagctataaatttacaacgaatacaaaatatattctacagagaaaatataaatgtaagtatatattaattttttatttcgacaaaaatcagcatccatgcttttttatattttgcagggtaatgtatgcagctataaatttac

SEQ ID NO: 26072 - DNA, 1114 bp, Heterodera glycines
  unsure (1)..(1114): unsure at all n locations
ctgtttttgctaactttgcgtggcgcncagcgctgaagtttggcgccgctgaacgaaatgcgtgccatccgaaggggagcataatgaaaaaaattttggcgccattcgactactttgcgctgagatatgctaacttttgttgcccactttgcaccatagagagccaacattggggccagcgctgctagagagtcagaatttttttccccgcgcgtcccgcaccctgaaaggctgggaaaacaaattgccgtctggcgccgggcgctttgcgctgagttgtgctaacctgtttttgctaacttttcgcgaatggcgcctagcgcctggcgctgcagagtagctgtcttgcggttgcttggcgaaagttgcgccgcgccatggggagcattttaaaaaaaagttcgacccgattcgacaagtctgaagggtcgaaccccctttagcccctggggggtgcaaaatgcaaagtcgctattttcgcgggaagcggtgtttttttagtgtaaaggatgggcgcagacgtaaaaagcacatttttcgcaaatttggtcaaaacggacaaagtgtcgacactcaaaacggacaaagtgtctacacacttgctgggacaaagtgtcgacaccgtgttttttgtgcgtgtagggcagtggcaagtgcatgactgtctgttttagaccatttggtcaccacagggacaaagtgtctaccccgtgacagtgggtcgacgcgatgtctgtctgtctgtcatccactggcctttgtataatatttcttttattggcttccactggccatttagacaattttcttttaattggcatccattggccattttataatgtttcttttattggcatccactggccttttcttttcttggcttccactggccattagacaattttcttttattggcttccactggccatttgacaattttcttttattggcttccgctggccattttataatgtttcttttattgtcatccactggccattttcttttcttggcatccgctgaacattagacaattttcttttcttggcaaactgctcacgggtgccacgcatgccaatgccaactgctcacggacgccacgcatgcccattcg

SEQ ID NO: 26073 - DNA, 1045 bp, Heterodera glycines
ccaatatttcaaaaactacgtaatgacaacaatgacttcacaggtgaacaaggggtgcgccggcgcactcccccccccccccccgtaagggggggcggctgtaaaggagggggggggaggtcgtaacgaagggggaaaaatttaaaatttgagcaatttcttagcggcgaaatccatacaaaatttaaaaaattttcccggcggcgcctatctcggcaccgccggaccgccccagccccttcccaaaaagtttttggaaaaacgcgccgcaaaaaaaaagaaaatatgagaaatttatgtgatcctttttttcatgactggtcatttctattttagggcaacaacagcaaaatgcaccggcgacaatggaaattgacgagcagcaccagtcgaacagtgcgggccatgttgttgcgtcgggggaatgcgtacagcaaagtgagcagcagcaggaaatgcccgatttgtcagcaatgaccgaagaggaacagttggaggtaggtaattaattcagtgataattagggtcgcgacttttagtgacgaaaaagtgccaaaaaagtggcaaaaagtccgaaatagtgacgaataatgacataattttcagccaaaaattgagcaaaaataatttttattcactgattgcagttgcaaatgaagtgtacatttcctttctaatattttcttaacaaatatttaactttttaaatcaaaatttttgtcaagaaaaaaaagatttggtcgatgaatttttgagaaaactttccaaaaaaaattttatgtcgattcgtaggggtgtattttttggttttattgcatttctgttaaggaattttccaaaaaatgtcgaaaaagtgaaaaaatagtgacaaaatgccaaaagagtgaattttcactattttaagtgacgaactgcaaaaacagtgattttctagtgacgaaaaatgacgtccaattgaaagaattttaatgcagaaaatgcgtttttccaagctccttttcttccaaaacaattgaagcaaaaaaaaaaaagaaagtttttttcc

SEQ ID NO: 26074 - DNA, 1807 bp, Heterodera glycines
  unsure (1)..(1807): unsure at all n locations
aaaccgccacattgggcgtttcttaaaaccgccagggcgtttcttaaaaccgccagggcgtttcttaaaaccgccaggtgggcgtttcttaaaaccgccactttgggcgtttcttaaaaccgccagggcgtttcttaaaaccgccaggtgggcgtttcttaaaaccgccactttgggcgtttcttaaaaccgccaactcatatgattatgtatgtatatccgttaaattaaatattcaataatatctattaatttttatttgttgtgcaagtaagtgtcagccggaaatattattagtctagcagtgacagactaaaaatctttattaaattaatttacaattatttacttaatttttatttggttgtaccaataggtgtcagcaggaaatatgaggctggcagttttattacaatttaaatggtataagtagctaaatttctttaacatacatttattataaaaaatattattgccttaattcctttaataaattaatccaatgttattagcatttatattcttttcattcataaatattattaattgtattagctttgatgaatttgtttcaaacaatggcgcaaaaggcttggttgaccaataccttaaaaaagaaataaaatccaaaggagaattgttggaaaaactagccgaaattaagttgacctaagcttcaggacgctggaaagatatatttcaaaaataaaaaatcgaaaatcaacagaaggaaacaaagacaacatggaaaacgctgaagtgtcacaatgtttttcaaaattcgacaataaattcctatttataattggtcatgataatcaatatcgaaaattcaaaaaaacaaatgaaagaacggatacgatttatctctattgcatgaactgtgagaactataataagcagaattctgctgggttggtttcagttatttcgtgattcttctatataattagattatagagttattggaagtgctattattagagagggccaattagatagaactcatcaaatcatgcaccatcttcagtgcaaaggtgtgccactagagcaacttactgctgaacaaattgataggaatcaaagaagagaattaattcaatgttcagcagattctaaatctatttggcgagaagtgatttgaatatttcataaaaactaatccaattggtacgataaatttaggggtctgacagggctagagagcatgatacagctgaggatatcgaaattgatgatcccactggaatttcatttaattatccaaattggcaaagcgtaagacgtgcctacaaccgacgaaaaatgaacaaataggggattgttctgatccatttaatgtgccagaaaaattttagctaactaaacgcggagcaattaaattaattcttcaaaaaagctgacttctgaagatatgtaagagttagttttatctgataatttttgattaaaaaaaatctaaaaaaaattcatattttaaagatggctacggtttcgagataaagatatgggtgttatgctctttatgacacatacacagaaaagagctgtcgctaattgtaaagtcttggtttctgatggcacctttgaattagcacctctgaattttcagcaaatttggacaatcccatggattggtcagattatatttatatttctacttaggtattcttaagatagaaacaactagtgggcgccgaatgggcaccattattaatgggcttntgatgaaaagacggtagcaaaaacatatttaaaattttaattttaatattttttagtacccaagcatcatacgaaaaagttt

SEQ ID NO: 26075 - DNA, 1537 bp, Heterodera glycines
ttttaattatttaaataacatttttaatttaaattttctctatgctaatgagtctcattaagccattttattaattttaatcgcttctcaaagcaaaaacattttcgcaaaatttctatgttattaaaaatgtttttttttactttttaatgaacaaaaggagaaaaatgaaaaaaacgaattgtcgttaattacccgtgacaaattttggacgaacgcttttcgaagaaatattccctctgtcaaattgcttggacagcccaacaatttgaaaggcgaagaagcggtttcgggcggctaattgcgctgtttgccgatagtcttttcggtgggcgcaattttccggcccaaaggattttttggtcggtttcccgtcccgtctcttgtcattctcatcatccgatattaaattagggagtgcgccagtggagaaaatcccaaccaaacgaagccgaggcgcgcattccttagacagaaaatgatcacaacgttgctcttcagcaatttttgctcaattcctacccccactcacatgttccgtctcccctctgtggcacccgcctcctttgccctcccattccctctcctctcccctctcctctcccaaccctctcctgtcccctcacctcccctcacctctcctctcccctctcctctcccaaccctctcgtgtcccctctcctcccctcacctctcctctcccctctcctctcccaaccctctcctgtcccctcacctcccctctcctctccactatcctctcctcactcaaataactgatgtcacctgtaataaacttacctttctactcataaaaatcatttcttcgtaaagagtcagtgtcttccttagcgaatgcctgtcaccatggcggatacataggaacacaaagccaatatttcacaagaaataaaaaaataagaaaatgttgctttattatatctaattatttatctgaaatttataaaaattttaaaaccaaatatacaatttacacaaaacctcattactcaattacaaaaagttaagtacatacttagtgaacacaaaaaccttgtttttaaattcatttaaatcttttaataagtatcttcaatatataattgtatagtcaaaaaaatttcatattaaaattaagtgatttagctttaccacaaaaataatttaaaagctttttaacataacgaaatgcaactgaagatgcttacgcgggcgagattaatcatgaaaatatattataatctttttttaaaatcaaaaatttcaaatataaaaaataaataatccaccatgaatggtaaatgcaaaattctgataaaagaaaattgcagacaggaaaaaatgcatataaatgaacagtcaaataaatattctaaattagttattttattataaataaaatataattataatactagagtttgatttcctttctgctttactcaacatgtttataatttaaacaattaaaaaacataaactcaattattcacttaattaaactaatgtaagccgtgactcgggtctcggctaccga

SEQ ID NO: 26076 - DNA, 1176 bp, Heterodera glycines
  unsure (1)..(1176): unsure at all n locations
ataaatttatcaaaaaaagagatagccattttttgggatagagtataaatttaaaaattncctcaaaaataaaaggtctatggcgcaccgcccttccctatcatgctcgagagcatttgtatgtgtataaaatttatcaaaaaaagagatagcatttttctgggatagagtataaattaaaaaattcccctgtaaaataaaaaggcgattgtgcacagcccctccgtctcatccgcaagcccttttgtgaggtataaaatttctcaaaaaaagagatagccatttttctgggataacctctaaatataaaaatcctctgtgaaataaaatggcgattgtgcacagccctccgtctcatacgcaagcgcttttgtgaggtataaaatttctcaaaaaaagagatagacatttttctgggatagagtataaatttaaaaattccctcaaaaataaaaggtctattgcgcaccgccctccctatcatgctcgagagcatttgtatgtgtataaaatttatcaaaaaaagagatagccatttttctgggataacctctaaatataaaaatcctctgtgaaataaaatggcgattgtgcacagccctccgtctcatacgcaagcgcttttgtgaggtataaaatttctcaaaaaaagagatagccatttttctgggatagagtataaatttaaaaattccctcaaaaataaaaggtctattgcgcaccgccctccctatcatgctcgagagcatttgtatgtgtataaaatttatcaaaaaaagagatagccatttttctgggatagagtataaatttaaaaattccctcaaaaataaaaggtctattgcgcaccgccctccctatcatgctcgagagcatttgtatgtgtataaaatttatcaaaaaaagagatagccatttttctgggatagagtataaatttaaaaattccctcaaaaataaaaggtctattgcgcaccgccctccctatcatgctcgagagcatttgtatgtgtataaaatttatcaaaaaaagagatagccatttttctgggatagagtataaatttaaaaattccctcaaaaataaaaggtctattgcgcaccgccctccctatcatgctcgagagcatttgtatgtgtataaaatttatcaaaaaaagagatagccatttttct

SEQ ID NO: 26077 - DNA, 1522 bp, Heterodera glycines
ggagaagagccggacgagtccaagctgtacatccaacagccggcaggtgtgaccatttggtgttggttcaaatggtggtccatcgacggacgatggtggtgggagaccatcgaagagcacgatttggtggatgacgactgcgaggatgaggaggaggacaccgtggccagaaacgggggcaactccatgctgcacgagggtaccggtggtggtaattgcaaagcgtgatggcactttcacaatgaatgcgttggatcgatgtgctttcgctgttaatgtccccgggggataaatggcgcccacggcgatgacacgcacaacgtcggctgttcgtagagcgaaatgcgccgccgacagcagctgtcttcgctcggccttatcgtaatccgcgccgcgcagtcagagggccttccccccccccccccccccgctttgattgcccgagggccaaatgcttaaagaccttttggtggctcaggcaccatacgctcgcgcacaacgcaaccgccgttttggccattagcgacaacaaacggaagggttggcatgggaaccaaagtcttaacggaaatggcagaccgcagcaagcaaatttaattggtgaaaaagtttaattggaaggtcgatttagggtgaggaaattgttgaagcaaatggcaaattgagtgtcaaataaaaagcatttgttttttcattaattaaacctaattggtgcaattgcccttttaaccctttcccttgaattgcccccccttctcccactctttcccacctgctgctgttgttgttgttgctgctgttgttgttgttgttgatagtaaacgttctgttgtcccccatattccgcgctgttccgctggtgtccccctgcattgttgtgctgctcgaattcgccatttgtcactgccgccgctgcgtaagcgttctgctgctgtctgaacaacgacggattattctgctgcagctgatggtgaggctcaaagttcgacgggtgcggcgccggtggcaattccaaccagcaccaatcgggcgaaaggtccgccgctgtggaagcggacgaaaacgggcacggcggactgtcgccgccatcgcggggccccgtcccccccactgtccccgacaaattgtcattgtcgccaattagtggaggcaaaaagttgtaattgtgaaggtggtgggggtggtatgggccattgctgctgctgtgccgaatgtctaactcctcaatcactacaacggcaccacccggtgccgaactcggcggacccaaagcgggggccggcacaaaaatgggaggattgctaacggacattccatcctcctcaaaattgcttgagcacacaaacatcattttgttggcacttggcacagaatatttttgggattttcagagaaatgcgaaaattttgggcttaatgatgcgaattctgcccataggtgaggtgcgaaatggctcaatttgtgctcatttaggcgcagtgggcggtgccgggcgaaggggggggggagacggggggggggg

SEQ ID NO: 26078 - DNA, 2043 bp, Heterodera glycines
  unsure (1)..(2043): unsure at all n locations
ttgtcaaaataaacccaaatagagtcttnnttcgttggtcatttggtctaaattacaaagaggaaaaattgtctataaaatgacngatgaatgtataaatattttctgattgcatattccatntaaatgcgcgagcaaattggaattttggtcgttttcaaaattttataccttcaaatcagggatgggccaaattgaaaaataaaaagcgaaatgcgaaaagcgaaatttgcgaaactgaaaaatgcgaaatgaaaaaaaaagcgaaatgcgaaaagccaaaatatgcgaaaatgcgaaatgcgaaaagcgaaattttttctacaactttttaatagttaaaatcataaagcaaaaatcatttcttaaaattttattccaaatttaaaaatcaataaaacgcttttttgaggcgcgctttttccaaaaaaactttttgggaagagggggcaggcgccgccgggaaaattttagaaaatttgattaaaatttgttgacagattttcactaaaaatgatcaaattttgtggtttttatcatttttctaatgagaaataagagttttggggcgccgctgagaacagtttttcatcaaattaccaaattttgcgattttgggccattttctaagaaaaaataggagttttgggggcgcggcggtgccgataggcgccgccggggaaaaaaatggaaattttgatcatttataaacaggttttcactgaaaattagccaatttataggtaaaattttgaaaaattttatgggaatttaatccaattcttaggggtgtaaaagtcgcttttcgcgccaaaaagcgaaatgcgaaaagcgaaatgcgaaacgccaaaaaatgcgaataatgcgaaaggcgaaatgcgaaaagcgaaacctcggcccatccctgcttcaaatctaaatattcaaaaaagaaaatcgcttcaataaattttctttataaaaattttgccctaaaaaatgcgcggcgcgccgcgcacagaaaaatcccgcggtcgcggatcgcgcatcgcggattcaaattgccgcggtcacggatcgcggatcgcgcaaaaaaaacgccgcgaatcgcggatcgcggtcgcgtcccagccctgatggatggtgagccattaattttttgaatggcaattttggccatttgttcaattccaactagagttgcacgggaccgggagttttgacaaaaaccgggaccgggaattttcgggctaaaaaaccgggactttttggctgggtaaaccgggaaaaaaccgggactagtcccggtccaggtcaaaaccgggactaggtactcagttgtacgttttttcagtaccagtcccggtcccgtgcaactctaattccaagtttttaaacgggtccgggtaatcgggtccaaccggatcctgaaaaaacccatgaaaaaaaagtttatacattaaaaatattataaaatatattcaagaaaaatattattttttacaaattactctatatttatcataatctacgaaattttcaaggattttggcatgggacggggtgggtaccccgccctcgggccatgaccctttttactatcaaatcactctttaggtgagtttttatggattaagggctttataaagagttccaaggttttttcatcttttatttcgcgacgcgaccttttaaatttgcccccattttcaacaaaaaagtaagagagagtttgtttgtgctggcgattgagccaaattaagttttgtactgaataatgaaactcctttttattttttagaatacatttttttaaaatgacaacaaatgggaagataataacgaatgatggcacattagtgccaaaacggcaccaaaaaacgaatggcctcattccggggatttttttttttgttcttttcattcgctttatttcaaattttgtaaattttttgttatgaaccaatcattttttgctattattgtaaatagtgccattttaatagtaaaaaaaactttcgatggcatttactctaaaatcattcgcgaattgcacaattctgg

SEQ ID NO: 26079 - DNA, 1548 bp, Heterodera glycines
tgttacgcccaaaagtccgaaaaggaataaaagaatatttattcaaattggaaaagggacaaagggcgaacagagtcaaagatattgattgggaaacaaaaggaacaaaataaatgaatgaatggagaagtacaactgagggaggaaaaagaggctatttatgcaaagacagaggggtcaaagaagggatggggcataacaaataaatgggaacggaatgccaatataataaataaatcaaataaccaggcccatcccgaacacctccccctttaaaagagtgggttcttatcatctgggcgaataacgatcaggcggacgacggtttcgcttgggtcgttcgttctgaacattcggttgaacggcgccttcttcaatgacttcgtttggctgttgtggcgcatcggggcgcggagatggtggcgcattctcaatcacttctccagctggctgtgccacaacatcaccaagattttgattggctggtgccaatggaagcccgaaagcgtcattcaagacgtccagagggtcttcctcattcacgtctgaatgtcgaaccagaagttggttcgcgtgaaatcgtccaactgatccgtcctgaaaagtgacgtcgtacatcacaccttttttcagggtgatatgcccgggtcgccaattttgcgacattcgatgccgagcgtagaccttatcgtctaaatcgaacgatctcggcctcgcgccatggcgccgattgaactttcgttccattgcttcgtcgcggatgacgattggacggttttttggtttcaataggtccaatgtcgatcggagtttcctttgaaggaacaactccgctgggcttttgcattcaggcaaagactcagtcggcgtgacacggtacgtggccagaaatgtgtccaacatttcggtgattccctccttcttcaatttgcgacacgtccgtttaaatgtgtcaacgaaccgttcggcttgtccgttggacatcggacaataaggtgccgaaaacaaatggtttatgccgttgagtcgggtgaattccttgaattccttcgacgaaaactgggtgccgttatcggtgaccaaggtttcgggcagtccatgccgagcgcaaagatagcgcaatttaccaatcgtggcggctgaaccggtggaattcatctcgaagatttcgggccacttggaaaatgcgtctacaatgacgaggaacatctttccaaagaatggtcccgcatagtccatgtgaacacgcttccatgggccatcggattttggccatgaatgaagggtcgtcttgactggtgcttttgcctccgaagcacatatttgacaggaacgaacaacttcttcaatttgttcatcgatttgttgccagtaaacgtactggcgagccaaatttttcatgcgtttgatgcccgggtgtccgtgatgtaatcgttgaagcactcccttttgaagtgattttggaatcacgacccgatcggcatacatcaaacaatcgttctcgattggccacgcttctctcccgtcgtgaaaagggacaatgtcctc

SEQ ID NO: 26080 - DNA, 1796 bp, Heterodera glycines
tcgccttcaaattgccaattgatgtgaaactgtcctacccattttgtgtcaatgaaaattgcgatttcatttatccttgcggcaattgaagtgccaatgttcacggattataaaaacactaagagcattcaattgataaaaagtgggtattttttacagaaattttaattaggtaaaatgcgattttttgccaaaaaagtttgcaaaaatggaatttcatatggctttttcataaatgcgcaaaaaaaaaaacgaaatttcgcaattgtttcatacatattttttatgtttgttttcaaaaaaaaaacaaaaaaaaattgcttttctggcgttttgtattatttttaaataattgttctcgcgtcaggatcagtcagctgggtaacaaactcagcctaggacaattcagccgaggacaaactcagttgatgcgacaattcggctgatgaacaactcagctttacaagaatttacaaaacgcaactcgtacaatggcttaggctggccaagcaaggcatacgcttaagcctaagctttaggcgaggcataggcttaggcttgcttgggcctaggcttaggctttattttgtaattttttattgtatggctgagttgtccatcagccgaattgtctcatcagctgaatagcccagaagacgttcttgcattttattaaaaaaatttcttttttttaagaagaaaaaacaattctcaaagaaatgaagaagaagctaacagaaattttttatgctttgttcaaaaagttcaacatcgatgcgtacaatatgaaaattttggccaatacatttgaacaaaatgtgccaaaaacattgtccaacattggcacaatgttacgggagcaggacaaaattgatgatgaaaagcaatatgtgcgcatttattggcgaaaatgcatcattactgctcgtaaccaattggaatcgttgaaggacggcattttgtcccaaattttcaattatttggatgagtataaaacggtggaaaacattgagcaaattggtgaaacattgaagataattcgcgaaactttgctggctgacgactgagtgaagaaattttggaatttatgaaaaaatgtggattttttttaataaaattaatttgaaattttgggatttaatcgaatctaaacacgaattagaattggattattgtgatcaaaaagcattttccattcgaatttggcatatcatttgaaagcgctacttttttgaagcaaattttattcattaataagtaaatgtgccagtaagcattaagcaattttcaaaaatatgtagccgcacaaaatcgaaaaacacacaaaatttttggattattcttatagtaatccaataaaatcctttttgattatgaaatgatttcaaatgataacaaattagtaattatttttccaatgccccactttttaacaaatttttcatttaaaatatatatattatcatttcaattttttgtctaattaccttattttttacatgtgtttatgtcataaaatgattaatatattggatttattatgttcttccaaatgttattactccattttttgatcaattttggcatttttgtccaaatttgcgccaattcaacgcttcttttgtgccgttatgcgcaaaatgccggcacgtgtgatgttggagcggatgcttttcgggtccacatcatccggcaatttatagttgcgctgaacctcacgcgatgttgtgcccagcatgccctcgcgctggtcatgtttgcagtggatgaacaaattttggcccatccgattcacc

SEQ ID NO: 26081 - DNA, 1171 bp, Heterodera glycines
atttcggtcggtcggtttcggtataaaaaccgaaaaaaaccgaaaaactcaaaaaattttcggtcggtcggtttcggttaaaaacccgaaaccgaaaaataccgaaaaaacccgaaaaaaaaccgaccggtccgatctctaaatgaaacggtgcccaattggggagacggcgacggttcaacagcagcagagctatacaaatgtgtaccatataaaaaatgtacgcattgatttgaatgatgattatgacaaagattgcatgccattgttcgattctcattgtattcaaattttgcatttaaaacaggccattgactccgccagcagtgtaagaagcggatcaaagcaacgcagagggagggccgattgagtccggggccaagtaatcaatgaaaaaagtgaatgaagattgaaatgtttcaagaagtatctttgaattttgctaattgatttgatgcgattttagttttgaacagctttcattaaccttaagggactttcctcagaattttgaaagccatctaagcagaaagctgaggtcaagcttaagctttggcttagcttgcgcatgtaagcctaggcttaggtgagcgtttggagaatgaataatggggggcatttccatcattgtttagtctatcgccaagcacattctcccaccatcattattataattattatttatttttttaacattgcaatattttattgaattatgtccgacaatggaacaatgcccaagaaacgaaaaattttcatttataccaacatatgaattaatgaaatactgccaacattaatttcatgtgtgattaaaatataatgatcagaaagtcatttattgaaacaaataacaatacaaaatatgtgaattgaaatggtttaacataaattaaataaatcaaggggtgggatgatatttaatttcaacaatttccccattaaaatttttaaaaattcttaattatttctgccctgctgattgatcaatgcatgtatttttgcctcaaagcttgcgaggtccctttccctcaagcagcggtaatactcctgtcgccacccctcatcaagcgtgaccggcccgcgtcgcatcccgcggcgcaaaatcaaattcagaaacaatcgggccgtgcggccattgccgtcaaaaaacgggtggattcgcacctta

SEQ ID NO: 26082 - DNA, 1437 bp, Heterodera glycines
tttggatcatcgaattcacttgggcttcgaaggtcgttcctttcgttggaatgtctgaagctaaattaaaattttaaagcatgtaaaaattgtgatgcgaacacatggaaaattaaaattcacccggaagttttcttccagcggagacaattttatcgtcgaattcgacgaattgtcgaatagggagcacgacagaaagtaaaatgggacaattgtgctcgatggccaattcgcgcaaagaattcagcaattttttaggatccggaaaacagtggtggataaataaagttagaatcgaaaactttacatggtgtcggtcgagcagattcagtgccgttatcaacgaatatggtccactccgttgccatttgtacatcggcagaacggtgaagccgcgcctggccaaccgccactccatcacctgtacaaaaggggggggggcttaagcaacccgatccctctgggaatgaaaactttggatgcttcaacaacacaaatggaagcgaaaaatgaggcgaatttcgccgtcactgcgccgtcaccggccccaatgtcgagcaattgacgaccgatgggggaccaatcgtcgggaatggcgaggaacactttcagatgggagtgggagaagatgaacatgcgacccctgacaatgagtgcattcgatgaccatccgaatttaataagacctgtgcaacaatccgttgatgctcgtctttgcgaggaaaacagaaagcagtgaagtgaagagagagtaatacacctgcaaagggaatggatggaagaacgctaattgaaagtcccattaatactaattagttccagttaatagaattatttgtccgtttccatctcacaatcagcacgtactctattttttagaatttttacctgaaggcaaaagctgttgctaataacgagggaagcactcagaaattcgttggtttcttcgtccatttggaggctgaggaagcgattccgcgcctctcctcccaattgacagtggtcgacagagtaccaatggccaactgaaatgtaatagaaattggacctaaaatgctgaaaaactttgctccgttgaaaataatttacggtccaattcatccttttccaccaaaatacgcactaagcgtttctggcgccacattcactgtcgaagaaaagcaatcttatgaaattaaattgaattaaaattcaaaagcaattataaaacagaattccatctgtaatatttaaacaaatttattttcacatatagacaatctgaattgcattttggcattttataggctttgttgttaatcattttgaaatgaaatgagaggaatatcgaccaatttaacaacggggaccaccgattcactgcagcattccaacggaagttggacgagtcgctgttttccgtttgccacccctttcaacatttgctgccgttcattt

SEQ ID NO: 26083 - DNA, 1124 bp, Heterodera glycines
  unsure (1)..(1124): unsure at all n locations
tatttccgacttttgtggcacagacgaaacatgcggtgacaagctttgcaatttcgttcattaagcctttgatctcggagatcaccgcgtccacctgaatcacattcattttattntgggagatagaaggtgccgagttttcttctctactttactaaaagtggcacttttgccgactgtcggacttttgaccaacacttgaagctgctgacagtgaaaagggattttgtccagaatttgcaacagttcgttcttttctgcacttccggggaccttaaccagcgaggggggaagaaagtgtaattggtagggagggaaatgcataagcattgtcccacttcaaaagcgaattccatcacagttttgtgcattttgttggcctgttccgcgaaaaactccgcttgggtgaataagtcgtgggtcgtcttcagagggccgtctcccttcgtgaacaaatacatgttgtaactcattgcggacattgcctatcaaaaaatgaaagaaaagtcaaacgcttcaaaaacggtatagccttttctaaaattggaggactctccgccgaccttcgctctcttcacaatgtcattctccgcgtattcgtcccatttctccgcctccgcttccacttcggccgtcaacagtttcatctccagcccaaccttggcaattttctgctggtcttccacgtccaaagtgatgggctttgtcggttttgacgtggtcccatggcgctgcaatttctttcatcggttgaattatgcaaaaaccaaaacgtaaaaatttatacgaataagaaaaaacaaattacacaacaaaacacaccgtaacaacagaaagaaggggtaaatacatacagtaggcaaataaaatgaggcagattttgaaaacgaacaccttttacacagcaaaagaatttattgttggctactatcccatttgccactcattttgtccacaaagcactctccgtccatctccccatttctccgcttgttctcactgcctcttccccgtcttctcctcgtccttgcctcccctgttggagtcggatcagactttcggcctcctgctgcagactttccagaatttggctgattctctgctcaaattttctgtccccatgc

SEQ ID NO: 26084 - DNA, 2150 bp, Heterodera glycines
  unsure (1)..(2150): unsure at all n locations
acaaagtccccaacaaaatgtagccgaatacttctaaaagcaaacaccgatcagctgttagcactggtcgaatttttttaaacattgtctgatcccgcttccaattgactactcgacagaaaaaacgtttaatgcctcatgtggattttgtgcgatgcatgaggagcgaaaagcgagcggggcgcgaaacggaccattgttcagaaaggagcggggattggtacattcgctgccctattgacacctgtactcattgaattagcaaaatcagttgtatccaaaactatataaacaattccctaacaattattgttgaatcattttaaatgactaataaatttattcttgttccacaagaaatttaccgtggtctcacatccgcacctagtacgggggatattaatttggataccgtacggcatgatttggaccgtttcagaggtgaacatgccaacccttctactaaaaatgtccgctataatcaacagcttaggcgctacttacagatgagacgggaggttgcagatcggccatccaaagttgagcttaccaagggaataagtgtgctgttaaaaagaggtagcgaagacggagacggccaagttgtggatacaccaccccgtcctcctggtccccctctcctccgccacctcgacctcgtggtccccctcctccgccaccgccgcctggtcgtccaacaagccctccaggtcccggtccctcgccgccgggaagtcctccgcctcgtccacaacgtcctcctataccaagtagagctgtgcgcctcggaaaaaccgtcgtctggagcaatggcggaaaaggcgatacgatatacaacaaagacggcagccggctgtgcgcgactttcttgcggaagcagctgctgctcctttacccgaaagcgacgaataagctgattacatgctgtagaatggattcgcgctgccagcgccttcacaatactatggtgacgtgcctgtgctacaagacaatgcggatgaaattgaggaaatggacactgttcaacaacgattggctagcaggaggaaactaaaaaagcacgatgatgatgatgattggcaagacaaaaaatacaaaaatttactataaacctccccctgctcgccggcccccgtctcgtccagcaaaaattgaaccaatgcctccaccacgtcctaagaagagagagccacagccaaaggtcgaccctcggccatccacatcaaagaaggccgatataaaacctaaaagggagccaaagtttgagccggatccgcgaccatccacatcacggcaagccgggtacaaccccgctccacctgctcccaaaaaagagccaaagcatgagtggaaacagacaaagcgactccattctcctcctcgcaccgcaccccatcggattccgaaaagagagccagaaattgaagaaacaccacaagagcaacctccgtgcggacctattggaagaacgggttaggcaggacccaattttgtattcattgaccgctccaccaaagagaccatcacagagtacaaccaccaggacgggatcgaaaatcaaaaaagagtttcgcccgaaaaaatggaattaataaatgccactcttgacaaactgtacaacgagccatcctcccccgcgtgtttttccggcgttactgcagtgtggaaagaggagagaaaaaagataaaacaatcaagtaaaaaagaagtgcggaactatttggaaagtcatcgtagctacacgttaatgcgcccccgacgcgtgcacttccggagagcaaaaactgatgcagcaggattcatgacagatgtgcaagtggatttggccgattttcgagcgctttctcgtcaaaatcgaggccatcggtatctgctcgttgcggttgacgtcttgtcaaaacgcttgtttgttgttccgttgaaaaataagagggccgaggagatgctggaggcattcaaggaacttgttaagcaaatgccaatggttccacatcgcattctctccgacaaagggactgaattcaaaaagcaattactcaaaaaatttttcgatgagcaggaaattcagaaacatgagccagtccactcatccgtgaaggcatcagtagctgaaagagccattcngaatgtannagcacgactgtacagat

SEQ ID NO: 26085 - DNA, 1202 bp, Heterodera glycines
tcttttacatttatggtcttttttaaaatcgcgcactcaaattcgaacactttgaataaaagttacgaaattcttaaattttcaacttttcgccttgattcgctaaaatgaatgtagaattatacaaaattcaaaaacctctcgcctttaatacccatttagattacctaattagttaattatcttcaaaatggacatgagtgaattgtgtgcaaaagttaatgcaatttataagaaggaaacggaccacaaagtgcaatcggaagggttcgtttttgggcagaaacactccaatgaatcaagaagaacaaaatgttaccaattcagacttcagaaactgcttgagggggtgctcacctccgtgccgtcggataatttgaagcaaattaccgaggccgtgagcaatttggtcgagactggtcgcattttccctttctttgtgtgcactttccctgccgtcccttttcagtggtgaacaatgagagtacctccatggtcgtgtcccgtcaattcatcgccgacatcgcttcctatttgagtcagccttcgctgaacaccgcactgatcaaaggcattggcgaggccgtgctcactcagcttcatgtcggtttattccgccattttgtcttgatcaaattgctaaaatgcactaattgtccgcctcaggcacgtgcacttgcctacgaggagcagagcacccaaatccgcatgattctggccaatgcgcttgagcgtgaccgccaatttgagcaatccgcgcggactcttatgggcataccaattgaaactggtcaaaggtgggaattcttagaaatataaatacgaaatttcagattttcattttgatttttaataaaacgaattttttatttgaatgtgtaggggctatcgccacgaattcaaaatggaactgtacttgcgaatcactgagctgtttttggaggccgacaatgtcgaggaagcggaccgacacgtgaaaagggcctcacttttgcagcaggacgtgaaggaggaggccctggtcatcaaatacaaggtgtttttcttggaagaactcattttccttgtttgttatccattttttctaagtattttcatgactttcgtctttcaaatccaccgaacatttccttttcaaaattatttaaacttcttaccacttttccccctttgttttggggggtgacctcaggcatcaagct

SEQ ID NO: 26086 - DNA, 1208 bp, Heterodera glycines
gaaaatcttttttggggcctaccaaatgaatgccaggcactgtcattgtttccaaagagattttttatacccagattgccaaaaaaagagaatagccatttttttggcccttcccatacctcacatatactcaaacggcccgaaaatcatttttggagcataacaactgatgacagccactgtcattgtttccaaagagatttctattaccagattgccaaaaaaagagatagccatttttttggaccgtccatacctcacatatactcaaacggcccgaaaatcatttttagagcataacaactgatgacagccactgtcattgtttccaaagagatttctattaccagattgccaaaaaaagagatagccatttttttggaccgtccatacctcacatatactcaaacggcccgaaaatcatttttagagcataacaactgatgacagccactgtcattgtttccaaagagatttctattaccagattgccaaaaaaagagatagccatttttttggaccgtccatacctcacatatactcaaacggcccgaaaatcatttttagagcataacaactgatgacagccactgtcattgtttccaaagagatttctattaccagattgccaaaaaaagagatagccatttttttggaccgtccatacctcacatatactcaaacggcccgaaaatcatttttagagcataacaactgatgacagccactgtcattgtttccaaagagatttctattaccagattgccaaaaaaagagatagccatttttttggaccgtccatacctcacatatactcaaacggcccgaaaatcatttttagagcataacaactgatgacagccactgtcattgtttccaaagagatttctattaccagattgccaaaaaaagagatagccatttttttggaccgtccatacctcacatatactcaaacggcccgaaaatcatttttagagcataacaactgatgacagccactgtcattgtttccaaagagatttctattaccagattgccaaaaaaagagatagccatttttttggaccgtccatacctcacatatactcaaacggcccgaaaatcatttttagagcataacaactgatgacagccccctgtctttgtttccaaaaaaatttctattaccacattggcccaaaaaaaaaatacccttttttttggac

SEQ ID NO: 26087 - DNA, 1361 bp, Heterodera glycines
tagggttgcgtccccgacgtcggggttggaactgtcggggttcggggtcggggttgccaaatcgttcggggttcggggtcggggtttttcaatttttgccttatgccaaatagtcaaaaattttttaatattttttcggaaataatatttattaatttccataataatatttgtattgtttttatattttttttatttcttttttatcagaaattttgtatagaattaatttttttttcttaaaattttaaaattctttattacttttttgttttccaaaacacattttttcacgtcgctcttttctaaagacttaaggagaaagggtacggcgtccggcggtgccgataggcgccgccgggaaaattttgaaaatttggttagatctgttaacagattttgtccaaaatatctaaattttgcgattttgagccaatttttttaataaggtttatgactttttgggccctgtgatgccgataggcagcgctaaattttggaattaagctctattttctaagatttttcaccaaaaaaatttatgaatttcggtaaatttttctttttcttcgatatgtattttgtcaaaatatgccaagattggtcgatttctattatttaatttaaaaaaaacaatttgtcacaaagaaaataattaaagaagaaaacgtcaaacggtatcgaactcacgacagaaagtaatgtcaatgtgatgcactaacctctacaccacattccaaatgtccaaaatcgagcaaattttctttatttaataaaaatttggcaaatggttaaaaaaattcaaattttgtctaacttttttgcattttctcccacgaaaatgccattcttaggggtgtatatttaaccccgaccccgatcggggttaagggtcggggttcggggttgtcggggtatgaagcgtcggggttcggggtcggggttttccccgaaaatggccaaaaatgtcggggttcggggtcgggggcggggtcggggacgcaaccctagtttttaggatgcttaacatgaaagaaaaaagttggaatattttttaaaattaaaattttaattaaaataatggtaaagaaaatgtgaggaatattctatccaagtggggaattgaacccaggcgaaaaattatgaaagaaagtaaccactacaccacatgtgcatgtgtgtaattccatgactaaatgaaataaaatttaattttttctcaaaaatttctccttcttcaccaatttcctactcttttctcgaccagacccccattcttaccagtgcaaatttttaccggcggtaccggtactagacaaaccggtaacggtaatttcatttttgaaaaaaccggtaccggt

SEQ ID NO: 26088 - DNA, 1519 bp, Heterodera glycines
aaaacattaatttccattatattgacactcactaacgccttatttagcaacataacagatacagccgaattacaaattaatgtttaaaatcaaagcaataatgttagagacacaattggccattgtgagtaaatataattaagggggggggggtcggagacgaaagattatgaagtcaactttattcttagttcataaaattttcccatatattttaatttgatttcttaaagattttcgttaaaatgatctaattttgcgatgttgatccatttttttaatgaaaatgaaggtttttggcaccctctgaggaaattttttaaccttagatttccaaaattttatctagtaaattttttatgaatttttgttcataaattcacgaaataaaaggaatgggcgaaaatttaacattaatctttaatttgaaaaaatcttagaaattgtttaattattttgccttacgaagacgcctctctctctattgccccttcgtctccgatcttttcccaaataagaagaatataaacataataattcggatgtgtatttttgttaatttcttatatgtattgtaaggtttattgaatcgaaaaaagcataatcgtcaaagaaaaattgtactttatagtcgaattttaaaaatgtattaatttaggccacagaatcttatattaatcagtgattaattgggaatttttgtggaacaagtataattagagaaagtgataaaatatggagatatcataggattgcacaacttaattgagccttccaaagagcattaattgaaaactcatattcacacttattaaggataaaaaataaagaaatataaagataatttcgctctcaatttataatagaagaaaatgaacggagacaaaacatgaaaatgacaaaaatatcaaactataaaaaattaagaagagttatttgaaataatatttgttagattttgcttgtaaattagagtaaaacagtacttgcaactttgaaaatcgatcttgacctttatttttatgatattaacaataaaaagaatcagatgaaaaatagaattatgaattgtcaaatttaatgacagagataatgcggcagaaataaagattcaattctggacgaactcgaaatgtaaacaaattattctatcagaatggctttttttaaataagcaaagggcaattaactaacaaattaattaaatgattgggtatttccttaagaaaaaaaaacaaaaattataagagcagaccagaatactaataaagataaagacaatttcatactttctaaaaaggtgggatttaaatattattaaagaataaacaggagggaaaggaaatgacaatgtgtagatggataaaagttgttgtggtcgtgttcaaaaataaaacaaaaaatgagcactattaaaataaacaccaaaaaacaaacaacaaaaagcgtgctaatacaaaatgcttgtaaacttttaagccttgccttaattttataaatcattcataaaataaattta

SEQ ID NO: 26089 - DNA, 982 bp, Heterodera glycines
tttttgtaacaaattctctgtcccatcattcattctttcgtcactgaatttgctttcaaatgaatccgatcattttgctctgatcagatcagcatccgatcaaattccatcggctcaatttgactgttcccattgcggtccatgtggccaaaccattcgccgttcttggccaaatggctagcggatctgccgttctttgttttcaccaaatacgcaatggcttccttcatcgaaatggtgccgcttttatccgcatcgatctaattaaataaatagctaatgtaaaagctaaaaattaatatgcttacgcctggttgattcatttataaattaccgtatcaaatttttgtcgcaattgtttcacctcctccaatggatgcacaaatgttgagttaccaccagccctaacaaattgggttaaatgaagaataataaatgtataatggaataaaacaatctttgtcttatctaatgcctatctcctcaaattatattaaataaattttttctatactatggtaaaaaaaatgctttagctttagatgaagctttattcgtggttttctatccatattttccatattcaaaatttatgtccatatttccatattgtgcatgttttggcattaaaatgtcaatcccaaatgtggagccctcatatctatggtcctcaactgttggaaaactcaaatttcaagcgctaggacctcaaaatgtcaaatcttcaaatgccgcaccacatctctctatccatactgtacctgctgcttgcgagacgggcatttggcttattgttctccggacatccgccctcgccgtccttgcggcaattttggcacccttgcggacagtctttggcatattgtttctcgcaacagtagtaacagctgcacgacacatctagtatacaatattccttggagcgatcttcgtgagtgagatcaaacgcgcagaccagacagttattgtggaaaatgttgca

SEQ ID NO: 26090 - DNA, 922 bp, Heterodera glycines
cgagctgagactcgagacctgaactctacgagcgtcattagtgaacagtcagacgacggacttggaatgttcggctgctttgcgcccatttctaatttgcagctcggctatttcggaattttttgcttttgtccgtttcccaaaatatccgcccccttcctaggattttaagttggagggtgcctaagatagaaagaaatctagacttctatcaaacagacttaaatttcgccagtgaaactgcctcaaatttgaaaatataataattattttggcgaaatgcctttaatccaaagtttgcggtttgagatgttgcacaagcgtcagattgaaaaagaaaagcttcacaacaaatataccaaaatttaattttactttcacatataaatttgctatcgaaatttataaagttaacaaaaaatttatacagtttagaattttttccatttctttttcaccttgcaagtggaaaacataccgttattagattttcagggtcgctggtctcgaatcaggcatccatttcaaacaatttgcgaccctggacccgatctcgagtaaaacccagaaattcacttttcactataattcagagcaacgactggtgaactcgattataggcatttggcgacgcttgttatattacacaaattttgaaaagtccggttccggcgggtgcccggcaaaattttgaaccgggacgcccggtaaatgggcgtttcttgaacgggcggcccggctccggtcaattgtctgatcccggttccggttccgctacttcggtctctacttactatataagcatttatgaaaattaggttttcaaccaaatatttattcaaatatatagtttcaaaatctaaatcacgttagcaattatttaattgaaccgttaaaaaataccgaatccctaaaactcgaa

SEQ ID NO: 26091 - DNA, 1615 bp, Heterodera glycines
caacgtggtttgctgacattccctacggggtttatgtcgtacaaatatggttcgctgacaggcccttcgggcttttgtcgcgcaaatgtggttcgctaacagggccttcgggcttttgtcgcaccaatgttgttcggtgacaggctcttcggggcatgtcgcactcattctgcactcttgtatgggatgtgtgagtcgatccatggctgatggattcggcgcgacgactacacattgtggcaaagaaagatgtctgataaaattcatatgtacatttgaataaattttatttatgtgtgcattattggttaattttacctcatatttttgccaccttttcatacatttatcattttgttgtttaagatgccttcaaaacaacataatttacgtatgaagatgaaggaggaccgacggcggacggagaaatctgtcagcccaggtcgctcacccgtcccagacgggagtgcagatgagaatggggtggtatcacacccgggcaacgtaacgcccaatattggtgctttgcaattaagcaccccggcttcttcaattggaagtagaagaagggctagaccctcaaacgccggaacggagtcaattacggcttcgcaaaaaagtgcgtcatcagttgacacacaaagcatatctcaaaatgccgaatccttgccgtgcaaaaagaaagcgaaggttgatcaagcagaccaaccaaaaaattatgaagcaattacttcaacgcctatttccacgcaaagaagctgtggaggacggccgaccaagatgaggcgcggcccaggcaggagcaaagctaatgattccatgaacgagagctcgtcaatgaatcagagttctgaagctattacaaatctgatcgttttgccaaatgtgactgaaaagataaacttcagcacagtgcaaattaagttcgccacatcgcgaaatatggcatgcaaaattcggagatgggccgatgttgggctttacgagcgtgatggcgaaacagcacaaggcccacgctctggcccaagattcattgagacctgttggaatgatctgacacagtttctaaatgatgcctttgttgtcgagtatttggcatacttggcaagtatatcacaacgaaaagtggtcgttgttgatccagttgtgtggcaaatgggcatagaccgggtcatgcaatataaaaaaatgacatttgggtatgaccctaatgttccggcagaagtcatacttttgccagtacatttccctggacactggactctaattatccatgatgtgcaatttggcactcattttgccgattctttgcctaccccatatggcaggttggatccgcaactgacggataaaattagaaagattatttctgacattttgccgtcaacagttttaaccgggatttttaatgccgtaaatctgacggttcaacacgatggaaatagctgcgggtactttgtgtgcctgtatgctgaatcctggctcatgaacaatcgcacgtttgttctgccagatctgtcgatcaattatgaaaagcggcgcatattgtggcacattaacgagctttatggcacagataatgtgccataccatccgagggaaggggtaccaactc

SEQ ID NO: 26092 - DNA, 1555 bp, Heterodera glycines
ctttttagctaaaccattaaattattgaaccttaattttaattatttcgaaaaaacaaaatttaaacaaatattttctgacctgcataaaacacgtccatggcattgtctccgtctaattcactcaaatcgtccgtgtagatgaagctcaacatcactttgaatgcattggcactaatgtcagggatctctaccggacctttaggggggggggggggggggtggtacttgtattttcgggaatacggtatgttgaaatagcataattgtacggaattaatcactcatcaaccacatgaaaaaagcgaaacaaaacggtcaaataaacattaatttctaatgtgaaattattttgtctattttctatgagaacgaaatcttattcgttagtggtgtaaacatagaagggatctcaaaaatagaaattcggattcgggacaagtttaggattctaatttaaaagttttaaattttaacaattaaatcttataagcatggttttgtcatttcaagcagattggccttaaccgcgtcttaccattttccgttctttcgctttttgagtcaaaatcaatcattgccttaaatacgtcggaagatccaataatgatgactttgtgagcacggaaaagcttaaaaattcagaaataaattcatagatttaaaatatcccttttgaaaactcgcctcctttccctctccttcccccacattaaaattctctttattttggatccctaatgaataagtgaaaaaattctttttgttcttcaaatgtctccatggaccacaaggaattccatttttgtacagaatttatttcagccaaaatccaagaaaaatattaaagaaattaattaaaattaaaattctctttattttggatccctaatgaataagtgaaaaaattctttttgttcttcaaatgtctccatggaccacaaggaattccatttttgtacagaatttatttcagccaaaatccaagaaaaatattaaagaaattaattaaaattaaaattctctttattttggatccctaatgaattagtgaaaaaattctttttgttcttcaaatgtctccatggaccacaaggaattccatttttgtacagaatttatttcagccaaaatccaagaaaaatattaaagaaattaattaaaattaaaattctctttattttggatccctaatgaattagtgaaaaaattctttttgttcttcaaatgtctccatggaccacaaggaattccatttttgtacagaatttatttcagccaaaatccaaggaaaatcttaaagaaattaattaaaattaaaattctctttattttggatccctaatgaattagtaaaaaaattctttttgttcttcaaatgtctccatggaccacaaggaattccatttttgtacagaatttatttcagccaaaatccaagaaaaatattagtgtttgtggagggcgttggggaattattggaaaatgtgctcgtttgatggggattctcatttgttgttttgcttatcgggcggcccgggattggtgggttttaa

SEQ ID NO: 26093 - DNA, 1528 bp, Heterodera glycines
ttgtggttgtgcattgtgacttaatgtaaaagaaaaatgtatacagtatacggcattaaatacttttgtttgcgtaatttctacagaaaattatatgaacgaaatctatgatatgtagtcacatgaaataaattttacaagatttagttctggcgtaatcaaaacatcttttatttcaccagtagtatttttgatggcctcggtgttggcaaacgaagagcctaggaaatctttaccctcagtatattccatttttcctgaaaaaaatatatggttaacaataagtaattcagaataaattcagcatgaaaaattcatttgagcaataaaggcgtaaaaaacagaagacgccatgccaggtgatttcgacaatacagataatttttaaaaatggagtacatatgatttgtttgtccccttttcgggttagtcaatgcgttaattgacttctgtcaattgttttacaaattttttttcctttccgggagtttgttaattttttcaattctttttttatttatttttcccggtgggttttcttattttggctcgtccttttgagttgagtttcctccttcccctcccattaaagccaaaagtttggctacgccattacctctattacttagggtgtaacataagtttctgcacaactttttttaaagaatttttttatgaatataaatttaaaaaaccacaatcatgatccgaaatatctgacattattattgagaatgagtttgctatttatcgggcaagggataaatcccattagaaaagtatttaaggagttagagttgataatgtaaaaatggtcattttcgaggtatgtatttttgatggctgatttaaagaaaatgaaaagagatacagaggcagagaaaacgtgagtaaatagagcaaagttaggactataaaaaattataagaaaaaaattttattacttcaaaaatgaattattggagggccgagtctaaaaatggtctccaaaaacggcatttttcaagaccatcaaataacaaaatgttttaagtggttttggaaattccgaatttaattaaactaagtaaattgaccacgctgagtccgaatatggctcggggtttagatttagagcccggtttcgggttccccgggagttgcggaaatgggtttagaacagggctcgtatccgtccttggatgccaaggacgtcctttgaaatgagcatttaaaaaatggaagaaataatcaaatgaaatttgacaaatttttgaatttctaacataccgcatttgctctttttatccccccggggggattatttttcaacctcctcagaaacggggggattattagatacggggggaaaaagggagaaggggggattatttttcgacagatttattttgtgtaaaatttttgaacatgtcgccaaaaaatgtcatcgcgtcaaaaaaaataaaattttttgaaattttatggtgtaaactagagatcggtattttgaaaaaagcctggacctggatttcctggacaaaaatccagg

SEQ ID NO: 26094 - DNA, 1887 bp, Heterodera glycines
  unsure (1)..(1887): unsure at all n locations
cattattagtgcaaaatctggtactaaattgcacaaaaattcncaaatttttttccggcggcgtctatcggcactgccgggatctctctttctatttttttaaatatgcttcaaaaaaacccctagaaataattgaaaaaatgaaaaaatattgggaaataaaatgtgaatatccaaaaatgagtgagtgacaaagaagttgctaaaatgttgaaaattgaaagaaacaatttgtggacgaaatgcagcagaactgaaatcattagcatattaatctagatttgttttttgttttttttttgtcatcataacaatgggagggattacgaaaatttttaaaattaaaagttgtcaaaaaaactctaattaattaatttttgtttcagcttagaaacaaaatggataacaaaaagaacaaataaatttgttaactcaaatatcaaacaaaaaagcatcgctttcgtcctcacacaaatcgatcttttaaatttccataatattcggctgttaaaagtccgggttaatttcaaaattttttgtcccgttaagcaatgaaaatcaaaactaattttattagccgtttctttggtttaccgtacttactaattagtaccccccggggcttctatttttcaacccccctcgagggggctattctaatttagggggggggggggggttactaattcagtaaatacggtatattgattatgaacatttcaccgcaacatgtagaaaccgtaattttgaaaaatactgactcggaccaggttctgaatatccgagttcgctggcaccggcctggcttagaacaaagcccggcgggcatatttcaacttcgagaaacaaattccgacaaagtcaattaaaaatggaatgagtttttcaaacttgttctgattttcacatttgtcctgagaaaaggaataaaatgacgattttttttgttattataattaatgtaaaatatttctgttttggatgaaaaatttgttaataaatgtcctgattttttatgtttgtactgacttttttataatcgatccaagcaataaattctcatttcttcatttaataaataattcataaagataaaatttcctttttttgaattgtaaattattagaatttattttatttttattgaaaatatgtttattattttcgaatgagctccagtagaaagtaataaaatttatttaatcattaatttaccaattggcaattattttgtcattaagataaaattattattattatttctttgaaattaaacaggatttccttattttattaagtaaaataatgatttattcagttttttaatcagaaaaaaaatcatttaaatgcctcaaaaaatgaattgcatttaattgaagaaaaataaaataaaatcatttccagacgacaaaaatgaaattatttccgctactattattaattattttatttttaattgacaaaattggatcagaaaggaaaaaattgcaacaaaagtcatttggcgaaatatttggagaaaaatggcaagaaaaagaagaagaaaaacgaaatgaactcaaaaaaagagaaataattgcaaaattttataaaataaaagagaaaattaagcaaaaaggaagaaaattctcaaaaaaagaatggaataaaattaatttgaaaatagcaaaaaaattgggcacaaatcaaacatatattcaaaaatggattaaacaatttggtcttcaaaaaaataaatgctataaatcaaaaagtgatgaagaaaaaattgtaattgtgcaaaaatttattaaaatggcaaatgaatataagcaaaagagaaaatattcagcaaaagaatgggaccaaaattaacgcgaaatttgtaaggaaattggagttagtcaa

SEQ ID NO: 26095 - DNA, 1206 bp, Heterodera glycines
aaaattaaagcaaattaaaagaataaatttccccaaaaaatcgaaaattaaagaaaaattaaaaaattaaatttcccaatggtaaagaatttcatcacacctttaatactagggatgccattttatgaattaaaatacttaaaaaaaaatgatttaagacaaaaaactcaaaataaaagtaatcataaatgttgggtgaaaaaagtaagtcaaggtgccaatttgtattaacaatttcaggcaaaatccaattatttctttgctaaaatgtggttttaaatcatctaaaatttacttttcgtttttaaaattgaagagacccaaaataaaatggcataactattacatatgcattaccatcaccattcaaatttcactccccaccacgccacccactattcctcgtccattggctcctctggcccgtgaacccgcgccttttttgcactcggcagcttttccgttgtcgcacgtcgacgaggcgccagaaaacggcgtccgcacaccgcgcatttgtttggcggtgcgcggacaccgaatgggttcgcgaaggtcgagcatgatggcagcggaagtggcgccggtgccagcggcggaagagcgagtggcgcaagtactgggctcatttgcggcggccgcgggcaaaacggcgccatgccgatttgtggcggcgacggtaaaaacggcaattgtggtggcggcggcgggaaaaccggcaattgtggtggcggcggcgggcaagacggtgccaaagggcgcggcggcgcgaccccttgaggcccctgaagttgaaagacacataagatttcattattttttgttgtttcgcaaaattttaccgcgtttcgtggcaccggcaccgtccacactatcatattgttgtttcccatttcgttcacggcaaagttccccgagaggatggagtcgcggatgagcttcatgtcttgctggagtttgtggagtgcgatgattttttttaaattttcagtcagctgctctcggtttgcggacatgtttattgctaaaaaaatgccaaaatggaaaaagtctggggaaaagtcaaaaaaagtttaaataacaaaaaaaattcgacagtacactttcaaaaaaaacaaacaaacatacttaggggaggcgctctttgaaagatggccgggtttggcgtgctaactaaacgccgtccgccttttcaatcgtgtaatctgg

SEQ ID NO: 26096 - DNA, 2124 bp, Heterodera glycines
  unsure (1)..(2124): unsure at all n locations
tttttgttagcagcttcaagtgtctcggcgcaaatggcccggcgcaaatgtccgcggcgcaagagtcttttttgctgagcggcgcaagtgtcgcggcgcaaatggcgcggcgcaaatgtccgcggtgcaaaagtcggctaaccctattagcaacacatcaaaaaggtttagatattaatatttttaaaattaaaaattttttattgcaaaaatttgaattttaattgcatctaataatttcattatttcaaaatattttttccttattatttttcgttataaataatatttttgtgagaataataaaaaattaataatttttatccatacgtcttttgcctttttatattcactttataccatgtatagttccttggcgcggtcgccagacttaagctttcccattttttaagcgctttctcgatccgcgctgaaagccgaatttatctttggtgtctccgtcgttcttttttggtgcttttttgctgaattttggcgccatataaaaatatcgaattgattatggaaaaacaatttaatttatgggcaatttttagatgtatttaagttttttggcctttaaattccaaaagggaatattgagttttaatttcttttcaaattattcttcatctttattttaagcatatttttatttttattttgtaaattattcattgtttcttttgtgaagctgtcttattttttaaaaacattttcttaattaatattctcaatttggtgggccattcaatcttttttataattattatttattttttatattgtttatgttaaaattttaaaatatattcaattataaaatgtacccatctctcattattattaaaaattgctgtaaacataatttgtttaactgtaaatttcttataaatctaaattttaaaaattatgttttttttgtcacatttatttttgtttttttacctaatgattcattaagaaattattattatttttagaatttgttaattaaaaataatataaatttatagaaacattaaaataatatattaaaatcagttaaatttccaatctttttatttttcttgatttatctgcaatataagcattgctaattttgaataaaaatttaattattccattctataaccggaaaaatttaaaaaattatttgataatctgtagtttaagtaatatattttaattttatcatttttgtatttttttttggtttttcggttttatttattttataattgcattgaaatatgcttaaagttgatatatgttgtattcttttttttccactaacgacggctttcattgtcaatatttagttcataatgataattaatttatttaattaattgttttttattcacgtgttttctaattgcttccttttattattgaattcacacgttacatatatttttttcttaagctgtttacgcacccttgctttcgaacgtagtaaaactgtgaaaaatacattgatgaataatattcattaattttcttctataaataatagatatattttctatcaatttcatatttgaatttttctataatatttaaatgaaaaaaaatttaaacaaatcaaataatttttattaaatcaatttaagtgcttaatttgctttattgaagtagaaaaatttaagtaaaaatgaatttgttattaaaacaatttttacaggctctcagntgttttttattcttttttgcttttttatttttatataaataaagataaattactgcttaaaataaatccttttaaaattaagtttgtattgctttttattggtcaaattggcataaatatttgtgctttcctctttcctaattttatttttgacnataattagatnattttttattcttttttattattgaantgataaaattttccaaaattaattttttaattatgctgtaaataaatctcttatatttaaacaaataanatattttttattaatcaaattaaagtgcttattttgctttattgcaggagaaaaatttaaggaaattttatctccaacaaataaatattgtccttattaaaaggaaaaaattggattacttaaaactttttaggggtaaaaaaaaataattaaagggggttttttt

SEQ ID NO: 26097 - DNA, 1238 bp, Heterodera glycines
gggggggctcccccgaaaaaaaaaaaaatcgtttttttcaagtgtccgtttgggggtcttcaaacattttggggggcaaaaattccaccccagaattaaagtccgggtttaggggaagttttccggaaggattcggtttccccataaatctgggggcatcggttcgggggggctgccccgaaaacaaaaaaaatcgattttttcaagtgtccgtttggggttctcaaacaattatggggagcaaaaatccaccgcagaattaaagtacaggctatagggaagcttttccggaaggattcggtctccccataaatctgggcgcatcggttcggggggactgccccgaaaacaaaaaaaaatcgattttttcaagtgtccgtttggggtactcaacaattatggggagcaaaaatccaacgcagaattaaagtacaggctatagggaagctattccggaaggattcggtctccccataaatctgggcgcatcggttcggggggactgccccgaaaacaaaaaaaatcgattttttcaagtgtccgtttggggtactcaaacaattatggggagcaaaaatccaacgcagaattaaagtacaggctatagggaagctattcccgaaggattcggtctccccataaatctgggcgcatcggttcggggggactgccccgaaaacaaaaaaatcgattttttcaagtgtccgtttggggtactcaaacaattatggggagcaaaaatccaacgcagaattaaagtacaggctatagggaagctattcccgaaggattcggtctccccataaatctgggcgcatcggttcggggggactgccccgaaaacaaaaaaaatcgattttttcaagtgtccgtttggggtactcaaacaattatggggagcaaaaatccaacgcaaaattaaagtacaggctatagggaagctattccggaaggattcggtctccccataaatctgggcgcatcggttcggggggactgccccgaaaacccaaaaaaaaattttttggataaacaattatttaaatgaactgactagataatatttaaaataggttatttctcttcctttcagtatccctgcaaagtttggtgcgcttctgatcagtttctgaaaaaaaagttaagcctaaactttttggcctgtttaaaaaggaattaaaaatttttaaaaattttattcatctccctttttgatagaaaaagcatcagagtgccta

SEQ ID NO: 26098 - DNA, 1437 bp, Heterodera glycines
  unsure (1)..(1437): unsure at all n locations
ccagaatttttcagaacgattcntggtgtttactagaacttcctgaggcattctgacgtttaccagaatttttcagaactcttctggtgtttaccagaattttcagaaccattctgacgtttaccagaatttttataactattctggtgtttaacagaattttcagaacaattctgatgtttacaagaatttacagaacattctgacgtttaccagaattttcagaacaatgacgcttaccagaattttcagaagaattctgacgtttaccagaatttacagaaccattctgacgcttgccagaatttttcagaactattctggtgtttaccagaattttcagaaccattctgacgtttaccagaattttcataactattctggtgtttaacagaattatcagaattttaaaagcacatttgttttaataattaactcagttaaattttttccaagttgagacgcgtacaagattgatatgttgtgcaatggatttctggtaaaaaatcacagaatgttaaatcatttgtaaattagttttattttttgttggtaaagtaaatagttttatataatccttattttaatttgtcttattttttatctcaacacactttaatcgttttaattaggaatttttttttacataaatttatttatttattataaaaatcaaaataaaagctttttttcactatttattctatttggtcgctttgtttttgcctagatttcatattagagtgctcatatatttttgaacaacacacataaatcaattcttgatttaattttaatcgctatttattaattctttaattaataataaacttttttctttataaaatataaaaatgaatgtttttaatgtttatttgttatctttgataaatattattagaaataatgtgtattaatttttctctcgatatattaaatttttattgttcaaatgatttgttttaatataacaaaatttattatataataagaaatattaaaaataatattaagactttatgttgattatattttatcattttaattaaaaggaaaccattttatgtccgatttaaccttttttaaattgcttaagatcttcaatccgagccattcgacttgcggggttggggggtcttccagctttgactgttgtgaaaattataaaaaaattacaaaaaaccgtttaaattgctgctttaccaacagacgttttttaatatattatttctattgtaaagataagagttacaatttccggtagctttcgctctagttaaattaagattctctcttttcatttttaatattttatttatattttattggttttatttttatcattttaataatacttgtggtacattgggttagagtagttaaatcgacgaatagctgataaataattttttaaacaatttggtgtttatattattt

SEQ ID NO: 26099 - DNA, 2172 bp, Heterodera glycines
agatcacctctgatctctggcattgaagatgcggtcctgactcgacacttgaaaaccaccaaacctttatgacctaagtaccatttcataattttctttttctttttgcttatgcttgccccaccaataagcctaataatttgtatattttggctaataaaaatcagagaggggaatggaaaatttttaactattttaatttgttaataaatccttccaatttagtcgggctctgagccttacgctttcgtggaatttgtcgaccattacacggccgcccaagcgcttcagtcgatgaatcggcgcctacttttggacaaagtcgtcattcatttccatttcatttgtcatttttctgatttcaggagatgaaagtcaattgggccattcagccgggcactcagcagaaaatcgacaccagcagttcgttgctacctttttaactataaaaaagaaaagccgccttttagaacatttccacatttttgtcggagatctttcgcccgaaatcgacaataaaactctcaaagatgcttttgttccgtttggagatgtttcgttagtcattttttaaacatcattttcttgtttgccggtctgaccacaattcggttttagggactcaaaagtcattcgcgacccgaccactttgatgtccaagggctatggctttgtctcttttccaaagcgcgaggaagcggagcgtgcaattgagcaaatgaatggccaatggctggggcgaaggacaatccgaactaattgggtaaacggaatacgaaagatagcggactctttcacggccacccaaacgctaatatttgaaggccactcgtaagcctggcgcaatgggcggtggagttgaatattcgagcaaaccgacggtggacgaaattatggcgcagacgagtccagaaaacacgtccgtttatgttggtggtgttcctcccggtgcgacaggtcgttttaccattttttcaatggaaatttatcatctttgtcgttcagaggaagacatacggtcgactttcagacgattcggaaacatcgtggacattcgctactttaagccgcaaggatacgccttcgtatgttccaaatttttttgtgaaatattttcctattctgtgaaggtgaaatacgagaccaaattggccgccgggaaagccatccacgaaatgaacagcaacgaattcatgggccaaacgcttcgtctcaattggggcaaagtcgatgtgagtgggtggtccagggacggtcccaggattttggcttgggggtcttattttaacataatgactgaaattaaatctttctcacaaagcagtgccggattaattctccccgatataatcaagttttttgttatttagcaaaaatgtcaaatatctgggaatattctccaccgctgggttgattgtgacagatctgagaaaacgtttattgcctgagaatgtggacaaacttttatttttgcatcacaatcttaaaatttatgattttgattatgaataaaatttttgggaaaaaattatttaaaaaaaatcggaatcgtaatcggaatcgcaattaatcggattttgggccataatcgtaatcggttttaaaaccgtatcggatttttggccataatcggaatcggcgatttaatcggaatcggattttgtctggctcggcacatccctgatacatagtattaaaaataaataaaatgatgatgcaaaaaagatttagtgagcatctatctgatcagtgatcacacttcggataactaattgggaataaattcttactaaaaactttacatcaatcaaaattttatctactaatataatggaacatacaatacacaacacatagaatacagcagtttatggttttgaaatagataatctgatacatatatacatatacatacatctactaatataatggaatagacaacggaatacaacagtttacgtagaattagattatatcgatcatatgtcttatccatcacattgttgtttcatcgcattggttatgttttgttggcatcagcatcgttcccgatttcgtgtctgcttaagctcagtcgatggcacattccgtgaccaaataatcatcatcatcatcgtagtcgtcggttgaaacagaagcacacacggggcacttctttttcagcaccgaatt

SEQ ID NO: 26100 - DNA, 261 bp, Heterodera glycines
gaaaaagagcaaaatgttgaggggggggggaagaaaaagagcaaaatgttgagggggggggaagcaaaagagaaaaatgttgaggaggggggaagaaaaagagcaaaattttgaaaaatagtgcaacagaaacaattacatatttaaaaaaaattaatgttgaggggagggggaagaataagagcactcaacattttgctctttttcttcccccctcctcaacatttttctcttttgcttccctcccccccctcaacattt

SEQ ID NO: 26101 - DNA, 2651 bp, Heterodera glycines
ttttagccgccttttttttgaaaaaatctcaattttcggctcagaattcgattaattagtttaaacattttttttgtttttgtgcggggtggtgggtgattaggcacaaaaaatgaattaaaaagcaaatttttttggcattgaaatttttcaaaaaaaatatacacagagtacggtaaaggttatgatatgttcggtacagtcccaaaaacagcaccataaacatttagtaattggtggctgaacggccgtatcggtaaatgtcgacaggaaaatcttttttttttaaatttgggcattgtcaatatggggacaattttgacaaatgacaccgcaaattgccgtccgtattccttcgtgccgcttaaaatattaattagtattttttaatataattaaatttaattaaaaaaagagtttgactctgtgtttttagctttgcccttccaaattggccatttaaatggaaattaatgccaccggcactttcctaaattacaaaaaaaaaaaaattaatttcgaaaatgatcgatttttttaaggcttttcatcaatccgatcgatatgcacctttggcacaggggatatttgtggttgcgggggtggaaaaaaaatgccgggccccttttaccgcatattaaaagggcttttcaagactttggtggcgatgtgtgtcttttggtgggttgcgtgatgatgccaatgtcattattattatcctatatgatgtgaaagtgccataattcgatggcaaatgaatgacgctgaggacggtgagcaacaaatccgcccccggggaaagatcggaaagtgccaatggcgggggatgagaggcggcattttcggtcggatttaataatgccagataaagcgaggccagactagctgaggaacttgcatgaagcataaacaaaaattcgtaaacaccattcatgattatttttttacgatttttgagagaaaaaaatggaaatttttaacggggcatcctatggaggcctgtcggtcggctgttgctgtgattttaaaaattttgcattgttggtaaatgccaaaattattaaaaaaataaaataatttcctggtataaattccaatgatgagatatatggaaaatgccaatcacatttttttttacattgccataaaagcttataacacaaaagcgaggtcaatgctattgaaatttagtaaattcaaatttttcagaaatattaaaaatttttaaatagaaaaaagctaatccatcggtttttaaatttttacattttaaaatgcctaaaaaattattttaatgaccttttttgcatgaaaattttgtaacaaaacatttcttcgaaactttctcaaaactaattatttttattattattcggggagcagcaacagacagaatggtgctctctggttgtttgttacattttggaaacaaagttcaccccaactaataatacaaattttaattgggacacaacggcacaaaaaaaaattgagccctcggaggcattcggccgaaataaattaaaaaatggaatttaaggagcaaaaaaagcgggctaacaaaaatgagaaattagaattttttttcatacttttcattcccttttaaaagaaaattaacaaaatctttattatatttttagataattttttttttgattaagaattaatttgcttttattaaatatattttaaaagaaattatttttcaaaattttaaaatataatttttttaagtttaataatattatttttttttggattttaaagtaagaaaagtttaaaaataatcattttcttgatctcaaactgacttttaagaactatgacaaggactgtgcttgccattttcaaggatgaatatgtgcaaatttttaaattgaaaataaatagcaaaaaaaaaatttaaaaaaaatttgtcaaaaagggtgtattaatgagaaaataagagtccaaattaagtggatggaattcgttggagaagatgttaaaaatggaataaacaagaagcaattaatgcacaattctttgaaattttttttttgtgaggaattccattttcttagaatcacatggatttccaaaatttgaaataccaatttagggatttcaaaaatcaaaattcatagtaaaacagagatgggagatctctcaaattttttaaaaatttgtaggctttatttgaggtagcagcgccgaaacttaagaattttaaatgtacttttaattttttggcggcgccaccgcggaaccccgaaatttcctcttttttccaaatttaatcaaaaaaatctgattataactattttttggctaaaaccaattaataaagcagcaaatttccatggtttttcgcttataagcaccgctgttcaatttatgataaagaaattggactcaaaaattgggtctccacatgaataaagtcaaattctgtatactcttagattgcaaaattacaattaaatctataaatgtcctttttgtttaataaaaatttctgtctcaaatcactttttaaccacttctatcgtgtagagcttagtcgatttactattgtaaattttcggctttttttttggctccgacgccaaaaatgatcagaaaaagtaatgaaacgttcgaaaaatcgataaaaatgacaaaatttt

SEQ ID NO: 26102 - DNA, 2839 bp, Heterodera glycines
  unsure (1)..(2839): unsure at all n locations
gtcggcgagtcaaccatcggcgagttggcgtcggcgagtcgaccatcggcgagtcggcgtcggcgagtcaaccatcggcgagtcggcgtcggcgagtcaaccatcgggcgaggtggcgtcggcgagtcgaccatcggcgagtcggcgtcggcgagtcaaccatcgggcgagttggcgtcggcgagtcgaccatcggcgagtcggcgtcggcgagtcaaccatcggcgaagttggcgtcggcgagtcgaccatcggcgagtcggcgtcggcgagtcaaccatcggcgagcgagtcgaccatcggcgagtcggcgtcggcgagttggcgtcggcgagtcgaccatcggcgagtcggcgtcggcgagtcaaccatcggcgagttggcgtcggcgagtcgaccatcggcgagtcggcgtcggcgagtcaaccatcggcgagttggcgtcggcgagtcgaccatcggcgagtcggcgtcggcgagtcaaccatcggcgagtcggcgtcggcgagtcgaccatcgccgagtcggcgtcggcgagtcgaccatcggcgagtcggcgtggcgcgttgaactgttcccctagtgcatgtatgtttgcaaaatggttaggacgctaagactcattttttgtctttatgctatttttaaaaatatttcattttatcataaaaacaaatttgaatatttatttattacaaaattttgaaataattaatattttttattgcaattaaaattaatatattcatctgattttatttaatgctcatcactaaaatttagttatttttttagatttgtagactaattttgagagttaattgttttacgtaatgatttgcatttgaatgattttgcatttttttaatcagaattttttataggaaattttttctaaatttactttatcaggatattttatttgcttctttctttgttcggctgaataaatgaatgttaggaatattgtatttgaaagttattaaatttatgcttttgtttttaattagatttctgtttttattaattaatagattttttaaaaattctctttgattaaattacggttttagttataaattaaatgttttttgaatcttttttattatttttttaagtttgagatatttaaattcttgaattttctcgacttcacgatgaaaaaattcaatttattgacgtccaactgcgatcgaaataagctatattataatatttttaatattatttttttaaaattaaatttgtagtgctataaaaacaattatttacataaaaatttttactcaaataattttcacgtaattttttctagagttcttggaaaggtgatatcagaatataattttaaaatttcttacaaaattgaaaaaaatttatgtaccagaaattctgagtcaagatttacttggacaaaaaaaaattttgttttcctaccccttagcggatttaagaaacaacctagcaccaaaatcttttcaggattggatttttgaccgattagtttctttgaaaattaaaaatgcaataaaatttttagaattttaccaaactttttatagaaactaaaaacaaaaaacaaaactggaatttttgaatatttagcaaataaattatttattaattcaaatatttaaaaacataaaaattattttaaattaatttactataaaaaattattgggtgcagcacatgaaatgaacccgataacgggaatattgcatggaaaaaattgtacaaaataagtaattaaaaattcataaagaacaaatgaaaaaaagaaatttgaactttatttaataaaattaaaatatatttaaatagatgaaggacaagtcgaatgtgaataggaaatcaattaaattaaccgataattaatgaaaaatttaataatatattggggtgttcggaaagttctttcatagcgaccaaaaatttatttaaaaaaatcgtaacaaattaactaattaaccaattttaatcaaaatatgctccgttattctcgaccatcttctcccatttttgagattttaaaaataatctatcgattaaattcaagatagttagactcaaataaactgatcggtctacttaaaaaagtggccaaattcaaccactgatttcttggccaagaaaaggctaaaggtgcaaaacaaattatggttttgtagagcaatgttgggactatctgacaagctggaaaagagccaccaagaccgatgggttatttttttaaagttgtcctgtctgaaaaaaatgattaatatttatccactaggttaattaaataattaattaaaataatttttaataaaacaataaaataattccaaatttaaaaatgaatgatgagaagatagaagagattgaaaaatataaaatgaaaaagtaataatttcctaaacaaatcttcaaaacacacggttaagtggttgtttaaaatatatatttatttcaaaaaactgcgtataaagtaatcaatatccgaattaaacaattaaaaataactttttataaatggaaatttattaatcaaatccaatttcaaaataaaaccaggccaaattgttattaatcaaaagctctttgagctatgtctaaaaattagttaaataaaaaaatgtaatttgaaatttgtcaatttctaatttgtaataatgaaataaaaaaataattgtaaaattaatatatgtcttcgcttattgagatgcattaattaaatcgaaattttgaaatttaagtttttatgaagaaatggtatatttaaataactaatatgaaaataattngcagaatttgatgggtattattgatttttattagaaatgccataaatttt

SEQ ID NO: 26103 - DNA, 1717 bp, Heterodera glycines
catggcgcataaaataatttaaggccgtacagatcttaatcctttattaaacctttgtgacatttctttttataatttaaaacaaaataattgtgcaaaaatccattcataggcggaatgcaccgctaaaattatatttttattaattaatcgaacaaaccgccagatgctaatgcactctaacagtgacgtaaaaaaggaattaaaaccaagattaatcataaatggtagtcaaaaatcacaaaataagtgccatattaaacacaataaaaataaatcacgcctctcaatagtgaaaatatgcattagtgcttattatttcttttgcaaaagccaaaagaatgttttgtattaggatttttaaaaaccagaaaaagccctgaggggatgcggagaagcctgccaattaacgccggcttaatttggaaatttcttttttttaaatcatcgataaaatataggataaaaattgctgacccccccctccccacctccttccttgtgaaatgtatggtaagtatgatgacatgaatccatgatcagatcatcccttcttggtgatcgcgatatttttttaatcccgtttttcatcgaaaggagtccattgtcaaattacttgcagattttcacaatttttctcacattaatccaaatcctggtaatagtaccgatggtagttcccccttttgaaaaaaaaaatttgtgatttcaaaataattaaaacaagtttttaggggttttctgggctgctgatcacgaatcttgcgtccatttcgaccaatccctaaacccggacccaaatttgaacaaaaagtcgaaaattaaacttttcgacttttgaatttttggttcaaaaacggcttaaacacatagaaacaaactaaaagtcatcaatcctgcaattatagatcaattaaactatttttatacataaaaacgcaaagttcgaaaagtttaattttcgactttttgttcgaatttgggtccggatttagggagaccaaattcaacattcttggtatcattcgaaagcccttcagatgcactattagcctgcaaaattccaaaaaatttcgttcagtataaaaaagttcgaaaaaaatttcgttcagtataaaaaagttcgagccaaaaaaagttggaaaatttggtttgttgaactcttctgaccataacttttttgaaccttaacggaatttttccaaattttgtaggctaatagagaacacttagggctatcgaatgataccaagattattggatttggttgacaaagaaaaagttatagttcaaaaactcgccccacgcgaaaacgaccccgacccaaaaaaaaatgatggaatgaagtgaaaaatgcgtaactttaaattttaaagtagaggaagttagcggacagatcaaacaaaaagacatttttatgaacacttcataataaactaatcaaaatatttatctaattcaaatcaaatggatcaatcacatcccactaattcattcatttctgtggatcacttgggcggaagtatttccgtcgttgtgctgatcacttgggccgggagtagttccgtcgttgtgctgatcacttgggccgggagtagttccgtcgttgtgctgatcacttgggccgggagtagttccgtcgttgtgctgatcacttgggccgggagtagttccgtcgttgtgctgatcacttgggccgggagtagttccgtcgttg

SEQ ID NO: 26104 - DNA, 2725 bp, Heterodera glycines
ctttttcattctaacaataagaattttcttatttttcctttctcgttgttataataatgattgaaaattttattatttttatttttggatttttaaaacgagaatgatttattttcaaaatttgaacaaaaaaatcataaaaattattcccacctaggacaaaaactcttaacaaatttttctatcaaaaattccaaaattatagagtaaaaggtgtaccataaaaatttttacaaaattctaatttaaaatccttcaaaatttaaactttagaacttttttctccgaatttttggttaattaataacttggaaaaccttaattaataaaaagaataagagattaaatattggtcagtagaatggcaaaaaagaccatcacaaaaagggtagaaacggaatcgatggcaccggagcaaatgttctcggcacaatcgaacggcacgaacgggttcaatagtgaaggatcagttggaccagttggcggatctaatttataagtccaaaaaaaatttagaaataaaaaatgcacttaaaatgggttaatctgtggtgaaaattggtcttaaatttttagagctttttgctcaaatttgattgctccagggaggtcaaaacggtcatcaattttttgtattaaattttggaaacaccttaacaaaaattaatgaaaattttttctagaccagcaggcccgtaaatttcccaccttctaaatgaaagatttaacaaacaaaatcgcctccttcggattgcccccccccccgcctaatactccgatttttttcaagttacgggactgttcttttttatttgcatgaacagcttataagttttctctattctcctgcaaaattttaaaaaattttgcaggctaataaaggatgtttgtggctatcgaaatgagtgaagaatgtttaatttgtgttacaccttaagcaaagtgctgattattttcatagcggatttttggaattacctagcacccaaaaaaaaaaaaaattcacaccagtttgttttacacgttgcgccggcgggatggttcggtcgttcttcaaaatgtaacgtcttgagcatttgtattgaccaccctggcattgactcgccacaacaagtccaatcagttcatcatcaggagtacaaacttgactatagccatgcttagcgcatagattgaacaccatttgcagttcaccatctacaattaataacaatcttaaataaactttaaatccaaaatgattcttaataaatttaaaaaataataattattattattaattactttttgataaataaactttaaatccaaaatgattcttaataaatttaaaaaataataataattattattaattactttttgataaataaactttaaacccaaaatgattcttaataaaaaataaaaattattattattaattactttttgataaataaactttaaatccaaaatgattcttaataaatcaaaaaataataataattattattaattactttttgataaataaactttaattccaaatgattcttacctgataaatttaaaagaaaaattaataattactttttgagatgacaatcaaactttaaattcagaatgattattaccggataaataaaatttttttttattaaattacttttttctataaattttttggcttattttttttgtgggctggtcgctccaaacttatattcagccttttatctatttaaattgtttaaaatactatgaaattgaacaagacaaatttggacttactgaataaatcagagctactcaaaatattctaattaataaacgtaaaaatatcaattatttaattaattaattacccttatagcacacgtgttcaacacattctttcacgtcctgtctactatctgattgatatattacacaaaggtgttttcgcatttcgccattgaaaatgagcgattttttgtcgctgccggaaatgttcactgtcaaaatattcgcttggccaccaacatggatgccttcatagcaccaaaccggtaatatcggctcttggtctataaatccgtggtattaaaattttggtcattaaaatttgtgcccctacatgagaaaacattggcgacgaatgccaaaaatagcacaggttggagcacagtcggcaacagtttcatgatgattgaaaaacagttttttaaatggaatttaaaattttatttttatcttaatttaatttaagtttttctttggttttgactttttattttatcattattatttcaaaaaaaaatcagtttagtaatgaaaaaataatgatttaatgttaaacactaataataattgtgtacaaatggaatgaatgttcttcttttccaaaaacattttcaccaaattattctgcataaattaaccaatatcagtttaaagtgttgatgactaatacataaataaaatgtaaatttaaaaataatttaaaaccttaagagaaaaataatttgaatttaaaaaatatttattaaaattggaccactaccaaatttatgttataacaataaattcatgttaaaatgaaaaaaaaaaaattagtttcgtaaaatatattcagtgcgtcgttttgactaaaaaattttaaaaaattaataaaaatttatgtaattattgtacaataataaataatttacctataatataatttattattgatttaacaatcgctaatttagcgcattaagtg

SEQ ID NO: 26105 - DNA, 2288 bp, Heterodera glycines
gataatttcggcaaccagaagtttttgtaaattcccttcctgttctttctgtacaggcgattttttaagctttctgactaattttttaatccgttcaagaaggctttttgtcgattcgtcatcattcaactttcgaacaccgtcccaaatggcctgaatacataatttaaggttacataatgcataaactatatttaaccaaattgcatttgtgcgcaaagcaatcgattgattttaagccaaggtcggtacaaactttgaccatcacctctgcagcatcccgtaaaacgacaaaaatttttgacttttctaatgaaaattcaacaaaaactttcattaataaatcctttaagacagtagcgttatgccgtcctaaaatttaataatttaataaaatatgatgacatttgttaacctttaattggcttagcagccaagacaacgaattttggttggccctcgtaaatgaagtgacaggtaactgaaagaagagagtgcgctgcatctttagaactccaacaatcgatagtcaaagagatgaaatttgtttttttaatgtcctttttaatgcgagcctaaaaatttatatatttcgggaatttaaaacggccaaacacctttaatgtttcaacaattttcggcattaaatttgttgtaaaaaatttgcggccaggcatatggtatttcggttgtaattcgtgaataagtcgtctgaatccttcattttcaaccatggaaagtggctgcaggtccactgcgatcatttccattattttggtgtttatgattaaagttttttcgccatctttttcccatgggcctaaaatcattatcaataaaaacaaaaacctaaatggaataactttttgcttgtaatgagtgcagtataatcgatttaatgtgctttggaggctgaactgattcgccatcaaaatcatcttcggcaattgttaatgggaccgaacagcttggagctgatgaacaaaaagccctaaattttaaaataaaaaatggctagaaatgttgcccagccttttaatgctcaattggtcaaatgcagcagaatcctttttcttttttgcaaactctttatgcaaatcagggtgtttgtgctccaaatgagaaattaacggtgttgtcggagctcttggtggataatcctttttaaaatcgcaaatattgcaaaaagcaacgcgaccagataatttgaaatatttccaaatcaatgacattttaaaggctaaagattattacaaagtattcagtaaaagttgaagaaaaagcaaataaaaataaaataaaaatgttataacaaatatgagcatgccaaaataataataaactgaagaattcgttataaaaatttaattttcaaatatatccaattcttaggcaaagagtgggacttcgatgagtaatttattttgctttccatttgtgtgtatattttttgatcagttgatttttaaattttgatgcattttacttttctaaaagcgccaataatttttatcttcttttaacaaaaagaatatttaaaattggtttatcatttgctaaaaaatgattaagaaaaagtgccattttatgcgttccattttgtcattcgttatattattgattaagcaccacaaaagaaggggataattagccccgggctatgccccgtaattgcccactgcagtggagttaattattctggttaattaacttttaactttacataacataatatacagattgaacaattccgtttttacatacacatattcctttagattattatatttttttgaaatataattttttggccataaaatgtcggaaagtccaaaaaaagtgggaaaacaaatggaaaaagcaatgtaaattttgatagaatcaattttcaattaattcattaattccgcgttcgtttagcttcatcactggcgacgattggctttcggtgttccatttggtccccccttttcagctgggccttggcattgcgttgctcagccaccgatttgaccgattggtggacgaacacttcaaaacgcggcgttgggcgttggacgaaattggaattcgtcgcacatttgaaaaggatggccaatatgagatgcaaattaccaattccaaattggatccgtcgccaattgagacaaaagtgttcgacttttacctaaagtgacggaaatggttgacattttatcagagagtttcggcacttacagatggaaacaatcgggcgccaattccgcaaaagcccggtgccgcacaaagtcttcgcattcaaaagcatt

SEQ ID NO: 26106 - DNA, 1589 bp, Heterodera glycines
tagggatgggatcttaaagggcgaaaattccaaaataaggtcgtaaataagggcaaaaaaatcggagaataagggcgaaaatacggtcgaaaaagttccgaatttagggtataatttttaaaattgctgttttttacagaaataatttcagactaaagcaaacaattttattactgattgcagttacaaaaagctatattttagaaaaaaattttcatttcttagggtcgattattgaaaaatttagtgtcgattcataggggtatatttttctgaaaattttttggttgattagtaggggtatattttttcgaaatttttttgggtcgattcttaggggtgtatttttcgttttttattgcatttttgttaataaattttggacaaaacgccaaaataagggcaaaaacttattttaaggacgaacatccaaaataaggatttttaagggcgaacatcaaaaataaggatttctaaggtcgaataagggcgtgaaaacgcaaaattttcagacaaaaaatgtgtttttcgtgtatttctcgttgagttaaagccgcagaaaaaaattaaaaacttagaaatcccatccctatttatcacttaatttgtgcgtttgtttagctgtgtcatcagtgttgccgtctgctgctgcagccgtgttcatcattccgccgtcaccgcgactgagcgttgcgcgtgcggtggtgccatcgctgcaagggacgcgcgccgaagcggcactgccccaagccgcaaatggcggcgagcatttgtcgccggcggaaggcagcagtgccaaaagtgccgtagcaactgtggacaaaaggctggggttttggccacaacaatcgtcgtcatcgtcatccaatggcagtgccaactgtggccaaggacaacaaaaacagtcagtgccattggcaacgacggcaaaagcggtgccgaatggtgcggaagcgctggtgccgttcaacggcaatcaccttgtaagcggaaacaaagaaattgagctgtagctatactcgagaccggaaaacccgagactcttctagagtcgagactctcgagtatcacacacttttgttagcaatgggtgcctgcgcgcgtggcggccaaaggcgtgccgacatcgtcagctaaccgaaggacaactgaggaagaggaggacaatttgggtaccaacagcgacactggcacacggcgatggccttgtcttggtaagaaatggcagcagttcaataatatctctctctctttctctctctctctctctctctctctctcttttacacttacttacagagttcccaagtttttttttcaaagtaaggacaaacgaggctaaaactaagattttgaccccaaaaataagaattttctaaaactaatagtagcgcgaagaaaatgcaataaaaacacgaaaaatctacttataaaatattttattaccgtaaaaactagagatcggaccggtcggtttttttcggtttttatccgaaaccgacccgacgaaataatcaaaaaacgaaacgaccgaccgatttttatgaaaaaccgaaaaaaaccgaatcaaatttgagcgatataacctg

SEQ ID NO: 26107 - DNA, 2422 bp, Heterodera glycines
gtgattggaatgcaggtggattgagtgattccaagtgattggaatgctggaggattgagtcccggcgactggaatgctggtgggttgagtcccggtgattgaaatgccggaggattgagtcccagtgattgaaatgctggagggttgagtgccggtgattgaaatgccggagaattgagtcccagtgactggaatgctggaggattgagtcccggtgattgaaatgctggagaattgagtcccagtgattgaaatgctggtgggttgagtcccggtgattgaaatgccggagaattgagtcccagtgactggaatgctggaggattgagtcccggtgattgaaatgccggagaattgagtcccagtgattgaaatgctggagaattgagtcccagtgactggaatgctggaggattgagtcccggtgattgaaatgctggagaattgagtcccagtgattgaaatgctggtgggttgagtcccagtgattgaaatgctagagggttgagtcccagtgttcggaatgccgaggattgagtcccagtgattgaaatgccggaggattgagtcccagtgattgaaatgctggagggttgagtgccggtgattgaaatgccggagaattgagtcccagtgactggaatgctggaggattgagtcccagtgattgaaatgctggagggttgagtcccggcgactggaatgctggtgggttgagtcccggtgattgaaatgctggagggttgagtcccggcgactggaatgctggagaattgagtaccagtgttcggaacgccgtagatttgactcccagtgattgaaatgagggttgactcccagtgattgaaatgcatgagaattgagtcccagtgactggaatgctggaggattgagtcccagtgattgaaatgccggagaattgagtcccagtgactggaatgctggagggttaactcccagtgattgaaatgcatgagaattgagtcccagtgactggaatgctggaggattgagtcccagtgatcgaaatgctggagaattgagtcccagtgattgaaatgctggagggatgagtcccgttgattgaaatgcacgacaattgagtcccagtgattgaaatgctgtagaattgagtcccagtgttcggaatgctcgtagatttgactcccagtgattgaaatgccggaggattgagtcccagtgattgaaatgctggagggttgagtcccggtgattgaaatgcaggagaatgagtcccagtgactggaatgctggtgggttggtcccagtgactggaatgccggagaattggtgagatagagttccgatgattgaaatgccgagggttgtttaagaaatgacaagaaacaaaaaggccagtagaatgttaaaatgttttgcctatgtagaattggtgagattgagtccaggtgtttcgagtgctgatggattgagtaacggtgattgaaggtcgtagaactgagtcccagcgattggtatgcagaagaatcggcgagatttattgttggtgattggaatgcaggtggattgagtgattccaagtgattggaatgctggagggttgagtcccggcgactggaatgctggtgggttgagtcccggtgattgaaatgatggagggttgagtcccggcgactggaatgctggtgggttgagtcccggtgattgaaatgccggagaattgagtcccagtgactggaatgctggaggattgagtcccggtgattgaaatgctggagaattgagtcccagtgattgaaatgctggtgggttgagtcccggtgattgaaatgccggagaattgagtcccagtgactggaatgctggaggattgagtcccggtgattgaaatgccggagaattgagtcccagtgattgaaatgctggagaattgagtcccagtgactggaatgctggaggattgagtcccggtgattgaaatgctggagaattgagtcccagtgattggaatgcaggtggattgagtgattccaagtgattggaatgctggagggttgagtcccggcgactggaatgctggtgggttgagtcccggtgattgaaatgccggaggattgagtcccagtgattgaaatgctggagggttgagtgccggtgattgaaatgccggagaattgagtcccagtgactggaatgctggaggattgagtcccggtgattgaaatgctggagaattgagtcccagtgattgaaatgctggtgggttgagtcccggtgattgaaatgccggagaattgagtcccagtgactggaatgctggaggattgagtcccggtgattgaaatgccggagaattgagtcccagtgattgaaatgctggagaattgagtcccagtgactggaatgctggaggattgagtcccggtgattgaaatgctgg

SEQ ID NO: 26108 - DNA, 907 bp, Heterodera glycines
ctgcatttctccgatttgcctatcgacacatcgccttcttaattctcatctgaaaggagcatgccgctacctttaccctcaattatttcaaattcaataataatggtcaaacctaaaaaccgacttcccggaccttacgccacctgctctgaatatgatactggatgtctttagggatacaatcgatgggcaagagattgacagagactagtcaaacttcatacatctaactatacagccttgtgaacaagatacagatcgacttgctataacagtgccttgtgaattttagtaaaaaccataagaaagggaggaccctttggttataagacttataatcgaattttattttttctcttgaagtcaaaaattttaattttttattttacacaaattcttaataaaacaaaatacgataagataaaaaacagatccataataaataccttaagaagggatcagccgaattttaaataattaaatcctcctaattttaaatgggttttctctattttctaattaattttctactcataaactttttaatttttaggcaccgatgaataaaatgagcaaaaatacctcaacaatgttattattttctctattagcaaaccgaatatttcttgttacaagcggtgattagtgaaaattaataaaaataataattcatttaatctatttcaagcctaaaatgggaaaatattcattttctaaattaaatattaatctttcttttcagtcaatgatttgacagaagcaattggttccatgaaggagaaattgttcaccatttatcaaaaatatgacactgactttacgccaaatattccttcaattcttgaaacggaacgtcaagaattttttaacaagttaaacgaaattacaaacaagcagttccaactgt

SEQ ID NO: 26109 - DNA, 2381 bp, Heterodera glycines
  unsure (1)..(2381): unsure at all n locations
tttaaaatgtaaaagaattaaatatttgtaaaaaatattattctcaaaatataaattngctaggttttaaatattaattcatttttcatccatcaaatctttgaaccaaatgcctntaatttactcaataattaataagaataaaaagtcaaaaataaattgaaaaataaatgtgacaataaataatagtaaaatattcaagtaaataaaaataatttttgatgaatataattaagagaaagcatttaataaaaaaatataaaaaagaaaataaaatattaggagaaaataaattgtaaataatttaaaaaattaaatttctacattttaaaaacttaattcagtaatcgcaaattaattcttttatatattagtccaatagtattttaaggcaaatgagctcaaccaatcagagcgaaggaccgccccttccgatcactcctaattaattgtttaatttaaaacagaaaacataagggtcgcaaattaaaatgattatatgtgttaatgaaaattattaaaacctaaaatattttttataaatcaataaaaacaatttacaaatgggaagccggagccacagcggacgagccactcctcctgaagcggacgaagctggatgaaaatagtgtttaagaaatttataatgtaaaaatcaaaaaaagagattaaaggaattactaatttataaattagaaatcaaaataaacgatctttcaataattttaaaagaaatattttactaccgacagaaactaaaaaaagcaaaactgagatcattcgataaaaaaaatcaaagaataaattataaaaaatggtaaaaaaataataaataaagaacattaatacttgaaatgtttatgtttagttaaaattaaatctaaaagattttggacaacaacaggacaattaattttaaatcaaattatgtttgaaaaacttctgaagacaaatatttaatacaataataaattttaaaaaatttcttaattataaataatgcaaatattgaaagccatatagcaaaatggtaatcaataaaaaacgtaaaattataaagaaaagacgaaaaaaaataatataaataaaataaaatttttgcatttctcattcgctaatgcataattaaatactaattaaagcaaacaattcaaaatgtaatgagttgagagattgacaatgcttgtctggctaattaaataaatagaataatattttattacggaaattatattattatatggatttcggtgcaaaaaagaatgaaaaacaatgtgtaatcattaacaattatatgtaaattctttaaggggacatcatgtcactactgaaaaagtaaaaaatagtgaaattaaacaaaataatttattttaattttatataaactccacgaattttttatttttttctaattattaaagttgcaattatttggatataaaacactaaataggcaccttttatatttatttttataaaagcggtcatcagcgatggatgcccttagacaaattaacttattttatataaacaattattacgaacaataaaaaattacatcaaaatgctgcttaattgtaataaaaaataatttcaaaaataaataaatattcttaaaattaaaaatgacatatccacttgacatttctgagaagcaatttcgttcatgctgccaagagataaacacaaagagaaattaataaatttaaacttaaaaaaatatttaatagtcgaaataaaagtttttaaattaatgcccttattttaccagaaaatttgcattgttttaaaattttaaaatttataatataaagcaaaaaacgagctatttatcatttcatacaatctaataaaaaaatgatacatctttttcaggtaaaagaatttattatttagtaaaattttaaaatttgcaaaattagtttaaacatatttgttttttacttttttaaagataaaccttagaaaaacaccaaaatagttgcaaattagttgttatatgaataataatttttgtttttgggtttgattaaaattattatttttgcgttaagtcaataaacgaaaagactttaggcatattacttatattaattttaacaataatgactttttttgtgactttttcggaattttatcatttttgattttttcaattattttcatgataaattctttgagttttaattgtattaggtatttagtttcgatgttactatgacacttttgtaaaaaaaacaattagtaaaaaaataaccaaattcaactttttaatataaatttcatagtatttcaacgccgctgatttttttattaacacattataaaacaagttgtcattaaaaataatctttgttaatagtaataactaattaaacaat

SEQ ID NO: 26110 - DNA, 1409 bp, Heterodera glycines
gccaaacaataaactgactttgaaaaaccatccgtcgccccctaatgaatgctccatattttcgatcattcttttcgttttttgcttttgctatttcacgagtcaaaaggcaacaaaaggcaagcgaaatcgaagttggcaaatgccatttgaatttgcagagaaaaagcattaatggccaatgggaaatatgggcataaaaaactttgaacttttaagggatttgcgaatggcaccgaaaatgacggagagtttaaaaagagaaggatggcaccgactaaggagcacattcttaattcatttgctctttccataatcccatcatgcttattaatttgcttttaaaagtcggctgactcaccactcttcattcatttatttattcattttgctttactttagcgatggcaaaaatcggaaggatttcaagaaaatgggaaattaatgaaacattaagtggaagaaagaattaagtaaggaattaacgggaaaaggcgacgcgacgacaacgcaacggaagagaaaaggtgagagggagggggataaagctgatcattatgaaggacagacaattattgggataaatcgcaaaatatgaccataatttccaaattgagctgaaaaaaaaactaaaatggctgagtactgtattaaaaatcattttagaagaaataataaaattatcttaataaacaaattttttttagaattttagatttttagggggccaaaaggccaattttatggaaaaaattgacataatttgacacatatggaaatacaaattgctttcctataagtttcaaaccaagctaaaaacatgtttttcgtgccttttagagctctaatccagaaaaaaaaaattatggatttggatttccattataattgcctggcgtactgatcatatgaacaaaaacacagtaagaaaacggaaattggggggggggcggcacgagacactcctcggcattattattctcattagtacgttcaaaagggggggggggagttgaaaaacaaacaaaaaagtgagagagagggcagtggaaaatgaaaattgggagaaccaaatgataaaacccattctgcttgcctgttttgtatcagtcagtacttaagcatttttcctggttttctcaaaaaggaaaaatttcagaattctctcgaagaaatgcgaacaatgccaagtcgaaagggcggaaggatttgctggcattgggacggatttcacatattagtattaggaagatttactaaattaagtcaaaatgcggtcattttgcccgccgatattttcatcaaattaaactgaggccgggagcgaaaaagatgttatacagattttaccgaaaaagattaatttataaatttttggctaggatttagtaaatcaatcaatcaataaa

SEQ ID NO: 26111 - DNA, 2428 bp, Heterodera glycines
cgtaattacgacgatttttcaatttcggaaatccgtaatccgtattccgggggtccaaaaccccgtaatttcccgtatccgcaatccttaatttcaaaaatcaatttttgtcagattttagaaaattttttttaaaatagtgattaataaaaatcaaaaaactgattttcttgatgcagtttcttcattttttatttcaatattacatatattttttttgtgtctgaaaaaaccattctttttgaatttatgggttgatttttgaaaatttttgaaagtctgatcattataattggatttatgtatgtatataattatttcaacattttaatattcagaaaaaaatttcgggggggggggggaatccgaagaatttttttggtcaaaatttgtttagattattttaaaaaattcagcgccggagagcaaaaacaggaattgtaactatttttagccaaaaaagactaatttttgccattttggagtcaaaatttaaaaaaataaggtaaaatcgagtaaattatggtccggcaatgccgataggtgccgccgggcaaattttttttgaaaattttaatgattttattaagaaaaatcgacaaaaaattttaaaaagtaagaaactttggtttttataaaaaaataatcttgcaggaaatcgtctcgaaaaataatcccaaaaagccaattacggatcaaaattacagaaaaatccacaaaaatccgtaagccgtaattacgggggtccaaaaaggccgtaattcccgtaatccgtaattgcgcccagccctgattgctatcattcaagagcccttcagattttattagcctgcaaaatttcataaaatttgtttaatatataaaaagttatggaaaaaatgctcgaaaatctgagtttttgaattcatctggccataacttttttgtatcttaaagaaattttctgacattttacaggctaatagaggacacttagggctatcgaatgataccggcaatgttgaatttggttgagaatggaaaaagttacagccaaaaacttgggcccgtgcgaaaacggcccgtacgaaaacgacccgaaaaaagggacaaagaatttaaaagactgaaatttgaaaaatgtacatttggcataatgtataatttattttaaattcaaatctttttgtatgtacacttaagaaaaatgaatgccaacttttacatcccaattagctaggtaattagctattcggacacaaaattttttgttgtttgatcattttcatgttacaggtgtttaaaataagagctgaatattcaaatatttttagaagatcaaaatggaccgagaaaacctggaagattcaaagaatgagaacaaacaactaaaggagaaaatccagaaacaagaagaggaaatggaaagaatgcgaaaggcactgaatgaagggcagagttcgtctgcgggtgcgggtacttcatcggccaaggttttgagcgattgtacgggaaggggggggggtgtttacaggggcgtcacggaaattgtatggcagttgcaattggggagggaggactatcaaaatgttgggacttggtttattttattttttgggtaatcaattgtcaattaatcggaaacaatttacaggcgtcagcgtctttctctgatcagaaaattcccgtccgtggccgtctttcgctttgtaaaagtgttaagtacgatgtaacactcggcgaaatcgaacgccgtgttacgggactcgagaagattactccgaacgagtacctccgttttctgcgcacacagaaggcaaaagggaaaggacgaaaattgcaggaagagatcgggaaggaggtttgtaaaacattcctaaacctgaaaagccaagagggacccttaggttttttgaaattttccgaacaaacttacttcggatgctaaaaacactgctgatttatttttactttattaaattttttgtccacagcgttggggaccagccattgctgctgcgatgcaattcaatctggaacgtgaaaagaatgaacaaacctgcttcactcctcttacagaaggggaggcatgcaaagcaagtttaagccatgggtgggggtggagaaactgttggatgattagccccaaaaagtttttcaaaaccaaattttgattttctaagaatgttcgtttttacgagcagagatattcctttgattttaatctgactcacaacactttattttaaatgcatttttaaaaatttagctcgcggatgacttcaggtcaatcatcaaaaaacattacccgtccgatgccattgcgcgtcaaattggtaagaaattggcctaaatttcaatcctgaaaaaacaaaatgtcatttgcctcagtcgctggtcaaggcgatgggtacacacagcaggagctgttcaaatttcggtaagaaat

SEQ ID NO: 26112 - DNA, 1471 bp, Heterodera glycines
  unsure (1)..(1471): unsure at all n locations
gtccaaaaatttctaaggaaaaataatattatggcggaaaaattttaggttttccatgcggggctggtaccccccccccagacctagccacacccaaattttccaagaaatgtcgctaaatttttcaaaaaatccacaaatttttaatgaaaatctgctaaaaatggctcaaaatcacaaaatttggtcattttttggacaaaatctgttaacaaaccgcatttaaaaccgcaaaaattttcccccctgtcccccaacaattttttttggaaaaaccgcgccacataaaaaacgggtgtgaaaagcaaaaaaaaaaaaaaggtgtcgcccggggggaggtgccccccccccnccaagccaaaatcctgggaccgtccctgctattttctccacccaaaaatggtgatccgattcaagacatcagaaaaatttgaatgtttaacagaggaaaaatgggaaattccacctttaaagcaatacacaaaaaaagagcaaaccatcgatggtaagtcagcctcctcttcatgctcctcttggtcatcatcctcaaaatcagcggcatcggtcgccggaactgcgccaaaaattgataaattatttattgtttcagcgaacatttcggagccaacattgtgtgctgctcgggggttcgagccccgctagatgtggcataatttgttagggtgcaccccaaaatctcgccgccggaatctcgccggccgaaatctcgccgcagaaatttcaaaaaaaaaatttcaaacttagaaatttttcaaggaaaaaattcttagaaaaatttttttataagaaaatttaaataaaaaaattgttgaaaaatttttcagcaattttttttgaaattttatgaaaatttactgtttttttttaattttcaaaaaaacttagcaaatagtttttttttggaattttcttataaaaaaattttctaaaattttttccttgaaaaatttctaagtttgaattttttttttttgaaatttctgcggcgagatttcagccggcgagattttgtctcggcgagatttcggccggcgagattccggcggcgagatttcggcggcgagatttcgtcccgtccccagaataagcttaccgtaaacacaaagtgattggaaacattcgtcgaatgtcgagcaaaattcctcccatgcctaaaaaccaaatgtttttattatataatatttgcaaattcttagactattggatgatcgatgtgtgatctgaattaagagtaatagaacagtgaaaacaaaacccacgcaattacctccaaatggcggactcttccgtcccgtgggtcggctgtttcgtcatgtacaagtcgccattctgactgatcgccacactttgaactttcccgtcaataatatgttcatgttcatttgttccatccaacgaaaaaattctgaacacggataaatcggacttttcttccgcgcaaacgtatata

SEQ ID NO: 26113 - DNA, 2324 bp, Heterodera glycines
  unsure (1)..(2324): unsure at all n locations
acaactgaatgacggtgaggtcagaggacgcatggtatttatgggggacagaagggaagagagatagaggagagaataaggggagagaaataaaggaatgaaaataatatgggcggacaatagagtaccggtctcaacatcttcccccttaaaaaaaaatcttttcctcggttcttccaatgatccgtccgtcttacacgtccgttcgattcgtccgtctgatccgtccgttcatgatggagtgtagcgatcaggcggtcgccgatttcgctgtgatcgtcgttgagcgggcacttcgggcgctcgatcagcttcctccacgacgggttcttcggccacggctggtgcgatgacagcagcgggtgccactacaggcaattgcgcttgtccaccatgctgaaccagcggtggtgccaatggcaaatcaaacgcatcattgaacacgttcaatgcgtttgtgccgttttcgtcagtgcttctcacaagcaactgattggcatggaaccttccgaattttccgtcaaataattcgacgtcgtaaatgacacctttacatttggtgacttttccggggcgccaaggctgagaaagacgatgccgagcgagaaccttatcgcccacggcaaaagatctcggtttggctccatggcgcctattaaattgcttctccatggcctcgtctcgaattatcggtgcctttggctttggcctcaacaagttcaaagtcgtgcgcggtttcctttgcaggaacatttcggccggacatttgcactccggcaaagctcacaaggcgtgatccggtatgttgccaaaaatgtggtcaacatttccgatgctcttctcccttgatcttccgacatgtcctcttgaacgtatcgacaaaacgctcggcttgtccgttcgacatgggattgtacggagcggagaacagatggttgatgccattttcggtcacaaattccttaaattcttttgaagcgaattgtgtgccgttgtccgtgactaaaatttcgggaaggccataactggcacagagtgatcgcaatttgtcgattgtagccgcggaattcgatgaacgcatttcgaagacctcgggccacttcgagtacgcgtcaacaattatgagaaacatttttcccataaacggtccggcgtagtccaaatgtacgcgtttccacggtccatcagctttcggccacgagtgaagctcagtcttcaccggcatctttgcttccattgtgcattcgttgcacattttgacaaaattctcaatttgttcgtccatcccaggccagtaaacgtactgcctggcgagacctttcattcgcttcattccgggatggcctcgatgcagaagttgtaagacatctttttgaagcgatgccggaatcacaactctgtccgcataaagcagacattcatcctcgatggtcaaagcgtatcgtcgtcgatggaacggaacaatgtctgcggccattttgttctttgttggccaatgtgagcagacaaatttcttcacatttttgatcgcctgatcacttttcgcggcattagccaaatcactgtgatcgagaggaagagttttcgtaacaaaattcaacactcccgtttcattgctctcacgaatgtttgcaatgatcactccgttgtccggcactggtgtcttagcgataagacgcgacaaaacatccgcttgaccaaaatcagcagtattttggtattcaatttcgaagtcatagccgagcaatgtgattgcccatctctgcaatcgattcgctgtgcaagccttaattccctttttgttcccaaaaatggacaacaacggcttgtggtccgtctgcagaacgaagtgtctcccgaagagatacttgtggaatttttgaacggcaaagacaatcgctaagccttctttctcgatttgagaataattcttttctgctgctgacagggacgatgatgcatgtgcgatggcttttagacttccatccgaaaagcgatgagagatcacggctccaattccatgctcagaagcatcagccgatacaatgatctcttgtgccgggtcatagtgtgtcagcaactgatcagatttcaaaatcttgatcacattctcaaaagcattttgacaatctgcccattgccacactttgtcctgcttcaacattcgtccatggctgtcggatgaacctcatgttcttcacgaattgttggtaatggttgatcattcccaaaaatgatcgaaactcggacacgtttgtcggaacagggatttcagaaatcgcctgnatttttgtttggtccggccgtctcccgtcctgatcaat

SEQ ID NO: 26114 - DNA, 1309 bp, Heterodera glycines
ggcgcgccccttgtgcacgtatgaaccatacttacttgattactggttctacataatgtagtataattatgaaaaatgataaattcaattagaaaaatatttaatatattgaagttcactaattaattaataggtgcttattaggctaattagggaaaataatgaaatagtaattattattccaaaaattgactaaatttaactgcttcaactacaacatgtcactgcatattaacaattttcttctgctggtgagcatgaatttgtatatttgaaatattttaaattgattcaattttgaaaaataaaagaaaatttgtgcattttttgagtttggtcctctcaatttatcgtccgccaacttcttctctgagtgctcaaaaaatttgtacgaaatttattttaaaaattggatagataattttctacggcattttttttttcatttttgcatatttaaatccaatgttggcagttgcaaatttacattttttacaatttcttaattataataataataatattaataataacacaattatttcttggtatcattcgaaagctcctcacatgctctattagccaaaaaatttttttttaattttagcctgtaaaaaaagtaatgaagaaaaaactcaaaaatttggacttttttgcaattttcatgatataactttttttgttaattgtctaattgcgaaacaatagcttagcaatagcttctaaacatgttaagctttcaaatgataccaagaacgttagatttagattgacaaagaaaaaaatagcccaaaaactgcgccaaacgaggtggaccccaaaaatggattcctcccgcagtgtttttcttttcactagagtgaagcgggaccgggaattttgggaaaaccgggaccgggacctaatctggttgaaaaaccgggaatttttggctgggaaaaccgggaatttcccggtcccggtcaaaatttgtcaaaaccgggacctcggtacactcagttgtccgtgttttggtcccggtcccgcttcactctacttttcacaagtaaatatttaatatttccattggaaattaaatttctttttaaatttcattttcatattctcacaaaatcatttacatctttctaaacatttgttttcgtaagaatacaaaaaaaaaatcttttgcccatccaattcatccttctgctgctgctgattcaccttcatttttgcatcttttttcttaccgattcacatttttgtgccttttcatcccttttttatgaataatgtttcctttttgcctattttgcgcctttttgcc

SEQ ID NO: 26115 - DNA, 2175 bp, Heterodera glycines
ttggattacacgaaaaaaccacaaatcccatgtttactaattttgttgtgtttttgacaatttcaatatttttgttaattttatatttgcaatatttccaattttttgatgggcccaaaaaaagcgccgccggcaagacgaaaggccgagccaagtgaaggcgaagaggaagtgaagagaaagaaggcgaagagaattgtcattgaggatgaaccggaagaaggagcgaatgggacaggaagtcaattgcaacaaaatgggcatgaagaagcaatggcaccggtagtgaagggaggggacgaagaagacgaagtcgtttctgaagtaagcgaaaatgatgaattactgttttcttaatctaaaaaatcggtgaaaaaattttgttcttctcgaaatttttttgaagtttccgcggcgcgaatcgatataaatggaaacggaattttttaaatttcgatcggaatttttttccctttctctgtgcaggtcggcatctatctgttgccgttggctccgtccgatgctggtggcattgcaaagatggcaaactctgctggtgctgcttcgtcggtgtccatcaatcgacttcaattcccccagcagcatccgaatgtgctccgacgtcgcttcaatggcgcgctgtccggacgcggaaatgcacaggacggagaggaggaggaggaagaccaggaggaacagcgaaccgaccgaactggacggaaattatttgcacagtacaaggcccaggtcaaacatttgcggcttgggttcggctcggactgcgatgaggaggcgatggcatcggccgtcatgcccactttcgccggtggagggggaattgccgaactgctgacaaagtcagtcccaaagaaatgggttggggggaagcgaccgattgaccacaatgagtgcaatgtgggtgcactacgtttcccccgcccctccttcgagaattatcttttttatttccaaactgaaatatttcaaagaaaaaattcttagaaaattaaaattttcttaaaaaatttcgcggaggtgggggaacgacttgctgcggggtaatgtaccaataaaacgtcatttcaggaatcacactccgtcttcgtccgcccttttctcgccgcccccttcggcgtcggcctcttcctctgcaatcaaaggggggagcgatttgacctccgacgaaatgttcaccggggaaggcttttcccagcaaggcttgcttaattacgctgtcggattcttcaaaaaaggtgatgatgcatgtcatcatttattcttttctttctcaaatgacaatgctttgtcatttttagagagcagctcgtttcctttcccaacgaaaaaaatgaaaacaatcttttaaactttcattttcacaatatattttttctaaaatttcttccaaaaacattttattctttgcaattttcgaaaaaaaaatattaagtgaaagtttaaaaaattcgttttttttttaaaaattttcatgaggggataaatgtatttcactcgtccttttttccttgcaattttttaatttggattatcctttggcttcatgtctttgtttcaggtcgtctttttttgttaccggtggacaaaaccttcgaaatgcgaaagcccttgcgggggaccattgagcgcgagtcgacggcgcgtaccaccgcattaaagcgtgagaaaattaagggagaggtccatgttctgtttaatagccatgcaaatgctctttccgccttcagcgtcttcgtccgtctcctccacttcgacacgttccgttgccgctgattctgctccttccggcactgcgtccgcttcgtcgtcttccgtcgctgttgccgcgccgttgcgcattcgctttgcacgtgccgaaaatgacttgcaacgacgccgccgagagcagtcgtccttctacaagcagaagctggtggagcaggaccagtggattccgctcaaagtggagcatagagtcagtctcttgaaccaaaattgacaaatttgcacaaaaaacagtgaattttgtcactggaaacactgtctttttcaggatttgttggaaatgtacgaaaaggacatcaacaaggtgctgctgtcttcagaatgtccgcccaagtagcaaaaaggcacaatgaatgcttatagacattatattgaaagtcaaaacaatttctc

SEQ ID NO: 26116 - DNA, 1307 bp, Heterodera glycines
acaaaaatcaaatgggaattggggcaaaaagcaaaaaacaaaacaattttaccgtcgggtcggagggaagcaagcattttgtcgcgatgcacttgaaactttcccctgccctgctgattggaaaagtctttggtgtctctgcagacgctgatccggcaatcgctcgcgtccaatgcataaatttggaattcggtcattactgggtcttcgccccgctgcagtccgacttggcgcaggaaaaatgaaacatctttgggagaaggaacactttaaggaaagaaatattttttacgacgcactattaacgtcttcttcgcgttttccgtttgggtaaacgtgcagctcccaaacaactgaggaaccaagaagtgcaggagaactgtttgccttcaaaaggtaaaatgacaaggaaagcacacattgatcaacaaccaagcaaacttactgatcagattctggccatttttcatcaatttcatcagcttttcaaaatggtcaatgcgccactcaagccttgacgaaattgccgccacctaaaagcaaaaactttcatttatgagttgctcagattgcaaaatcagatgacttgccttagtggtttgtttggaaaccatttccaagcgtctcgttgctcgattgatatttggcgatggttccatcatgcgcatgaaacgaattgggtaacgaagattagcattgttttgcattgcacgtggcttctgtaaggaatttaaaaaacgatttatttaaggaaattaaaaacatatgatcatttgtagaattgaaattggtctaaatcatattgcggaatttgtggctcaaaaaatagtgaatttaatattttggcaaatttatgtgtccaatgtgcttttttaattcgaaaattagcatttctacataagacgggggcagtcacaagcagaggaagcagcactacacggtttccaatccaacacacaagaaaaaacagaaatcaaaattagtgaaatatctggcgttttgtcttttcttctgttcgtggctgctgctgaatgagaaaatggcctccattctgttcgttgttcaacactttttgatgaaaattaatgtgaaacgattgaattcctttgtaacttataagcttataacatattcctacttaattttaacgtttgatgatattcgttctttacaaatagtctaaatcccaaatagaaattgattcaaaaatatatttaatttttcagatatttattaattatcatcatttttggttttacaaatgggtcaaaaccaccgcagggaggtgggcgaagccaggcgatgac

SEQ ID NO: 26117 - DNA, 2707 bp, Heterodera glycines
  unsure (1)..(2707): unsure at all n locations
tttttgtctcaaaatagaaaatggacattccagttttttacccatagaccaaaaatntaagaaataaaacttgtcagaaaatttttggcaggaagagcaaaaaaaaaataccgaaatttnttttctgcttattacgcgcgctaacagtgtaaatttaccacagtaatttctccatttgaaactttttaaattttggcttatccataattttcaaaaaagtaaatcatttttcagaattctaacaatttcagctatgggcggatcagtttatcagaattttcagcatttttcagatggcgcttaaagccgagttggaaacccagaaaaggttggcggagcacaatgagatgcaggcgatggaagagaagacggacaatgaaaaacagaagaaaaatgaaaaggaaaaatacggtaaagaaaattaacaaaaataaaaaagaaggcttttttaaattctataatttaggttttaagtttaggcaaattttaaaatttcgttacaatgtttaagattctgtttttggactcactcaacaattgcaaaatgaacagacaaaacttttcggacggatggacgaattggagaagcaatttggaaaattgctgcagaaaaaggaggaggaaaattgtaaatacggtaggggtactgtaaatttcgaaaaaaacagaaattaatcggatgagaatttggaaaaattaattaattacatttgtacttgacaataataatggcaatttccatgttaagcattggctgaacaaaagcatttggaaggaaatggtgaattgaacaaaactgacaatgagaagcagcaattggtattttcataagattggcatttaaattttttcctaaaatttgaaaatgcgactcaattttatttgaaaattatgaaaataatttattaggacttttatttacatattttgaggttctcaacaaattttatatatttacaatatttcgtataaattactgttaaaaaatatatttatttacatactttttcataattgaaaatgttaaggaattttgcgaaaagtttgccaaattggagttggaattgagcgaaaagcaaaatgaaacacgtgggttcttatttaaaaagaaacattaaaattgctcaaaatattttcatgacaatttcataatttaatttaagattttaagagaattttattgttaagtttcgctcggcagaatcgctcaattgataaatgaggagaagaaacaattggacaaaatcactgctgaatttaacaatcgtcatgaagaacaaacggtgaatgaattggcattggcaaaaacttaaataaaaataatttattttataaaatcaaaaatgatttatttaaattaataaagtaatttgataagaatttttaaataaggtgcaaaatgagttccgccaaaattgttgggatgccctcgcttgtcacaatcggctgtttattaatggcaaaagtttgacgatcaattacagaggatttttaatgtttggtaattaattctaatgaaaatatttttaaaatttgttttttcaaggctattgttccatcttcgctaaacattccattttgttgaacaaagattgctccaacattttttactttgaaatttcagtcgcaaaaatgaaaaggtgaggtgatcagaagaaaacaatgcgtttcagaaagtttggcttatcaaaacaaaaatatggcatgaaagatttaattttttaaactttagcttcaaaaaattaaatttaaatgatggatttttataaaataattcaatgactcttaaaaggcaaaaaaaatttttagattttctaccctctccactcctccttgaatacaatttaaaagcataaaacttgttttgttttttgacttcgaaaacagatgttcaaacttttttaaaagttttgccttttaaaaatttagttttattctaaataattgaaaattttttgccttttcgaaaaaatgttcaaaattttggaaaacttaagtcacactttttaaattaatcatgtaacaaatgatgaaagtagttgagagatggggcttgcacctttattaaatttaattttcgcattttatagcgatgtgatcatcggattcgccccaaaacagccgaaaatgccattaaatggtacgcttttgaaccgttgcggcacttacgcatattcgagcactgccaattgtgtgcttaatgggtcttggaaaaatgctgatgtcaaattttttcctggcgatgttgtcggatgcggcgttaatttggccacccaacaaattttcttcaccaaaaatggccatcgattgggttaggaaaataaattaatggaatttttaaaatttattttagattttgcctttttaaacaaccatttgttggatgcttcttctgctgatcaattgttcccatttgttattttgtggaattctggggatcaaattgaggcaaactttgggccaaagttcaaattcgatatgaccactctttgaagaaacacatattaaatgtatttaatggatttcttgacgttttgaccaattttgttggttgcttattccatttgtcgaattataaagcttttcaataaacaattttaatttaaaatttctcataacagtccccccagccagaaaatattttgggcgtgaaatacgaagaccctttttcgctaacggattcaaaaaattcttcttgaattctttt

SEQ ID NO: 26118 - DNA, 1138 bp, Heterodera glycines
ctatagctttttaagttgtcaaccaaattttataaaattggtatcaatggaaagagagagactgataagccctattagcttataaaatctcaaaaaaaaacttatggcaaaaaagctaaaaattgccttttattggtcttggcgccgaattcttagaacactgtatctcaacatttggtcgaaaaatattacagtaattcccctgccgcctcccccgattccgtacccaaaatagcgtttgttcgtgtcccagccgacaggcgtgttgaagccgttctcgtaaatgggtggcagcagccgaaggaatggcatttggctgacaccccatgttggatgctcaaaattgttgcactgaccggtgtacgaactgaataagtaaattaataatcaatggtgagtgatagtgggtggcgttacggtaatttattttattttattttatttaaaattttaccgatatttggagtggaagcacatgtcttggcaagcatctttgaactgcaatttgtaataacaaacgaacaaaaggaattgaatgtcacgaaattatgcaaaaaataaatttttggtgccgcttaaggagttggttgatgcaaccagaaaaaaagttcggatgagagaatccgaaggcctttttttgcttttcggatcaaaattttttttctcctaatattattttaaaaatttcagcgccggagagcaaaagaacaggaatttgtggcaattttacgccaaaaaatgtcaatttttgcaattttcgacctaaaatttcaaaaactaaggtaaaaaaggggtccggctgtaccgataggcgccgccgggaaatttttttgaagatttcaaaaaaattggctaacaaataagcgaagactacgaaaaattgaacatattacagaacattttgaaaagcatcgttattctaaaattagatttttggtaaaaggagaatttagcatgcaacccatgaaaaaatcttcaaggcttaaatttttttctaaataattcagaattcaaccaaaaattgccaaatttttgcgattttaaggcaaacgacgaattgttttgcttttaaaaatgttttttttttgtttgcgcgcgctttttctaaaaaactttttgggaacatgggggggggggg

SEQ ID NO: 26119 - DNA, 2007 bp, Heterodera glycines
tgaaaataataaatcagagaatattattaacccgatccttctaaatattgctgcagtatttatttagagattaagtagctgaaattgtgagattctctatttacatttcattagcactttgaaattctcaaaatttcagctcattatcatggaaatataaattgtataggcgtcgcagaaggatcgagtcgataagcgccaataattttacatttattattttggtttggccagcttgtataattcttacaatttcagctcattaccccctcaaaataaactgtataagtgttgcggaagtatggagttgataaacgctaataatttccgatttacaatttacttgagcaaatttatacagatacattttgaggaaaatgagctgaaaatgtgaaaatttcacaaagatggtcgtgaaaataataagtcggagattattggcgctatcaactcaatatttccgcaacgctgttagagtttatatttagatgataattagctgaaatttgagaatttcacaaggatggtcgtgaaaataataaatcagagaatattattaacccgatccttctacaatattgctgcagtatttatttagagattaagtagctgaaattgtgagattctctatttacatttcattatcactttgaaattctcaaaatttcagctcattatcatgagtagtatagagcgtcaaaacctcgcgggtttctcgcgggtgtttcccgcacgaacccgtgcctatgggaggggtgcagctctttgatgttgccgcccggacattttcccgcacgaacccatgcctataggaggggtgcgtgccaaccgaaacctatgtgagggtctgtttctttgaagtctgccgcctggcggtttttaattttccccgaaacctcgcgggtttcccggcctatgggaggggtgcagctctttgatgttgccgcccagacattttcccgcacaaaccaaagcctatgggaggggcgtgtgccaaatcccaaacctatgtgtcctttgaagttgccgcctaacatccatttccccaaatcctcgcgggtatttttttttccgcgccgcgcagcgccgcggaaggtcatcaatcaaccacctgtcaccaatgtgacaggtggaggaaatttgaatttttcttttgcaaatttaaaatttttttttccaatcggagattattagcgtttatcaactccatacttccgcaacacttatacagtttattttgagggggtaatgagctgaaattgtaagaattatacaagctggccaaaccaaaataataaatggaaaattattggcgcttattgactccatccttctgcgacgcctatacaatttatatttctagtatatggagctgaaattttgagaatttcaaagtgataatgaaatgtaaatagagaatctcacaatttcagctacttaatctctaaataaatactgcagcaatattgtagaaggatcgggttaatgatattctctgatttattattttcacgaccatccttgtgaaattctcaaaatttcagctaattatcatctaaatataaactctaacagcgttgcggaaatattgagttgatagcgccaataatctccgacttattattttcacgaccatctttgtgaaattttcacattttcagctcattttcctccaaatgtatctgtataaatttgcttaagtaaattgtaaatcggagattattagcgtttatcaactccatacttccgcaacacttatacagtttattttgagggggtaatgagctgaaattgtaagaattatacaagctggccaaaccaaaataataaatggaaaattattggcgcttattgactccatcttctgcgacgcctatacaatttatatttctagtatatggagctgaaattttgagaatttcaaagtgataatgaaatgtaaatagagaatctcacaatttcagctacttaatctctaaataaatactgcagcaatattgtagaagg

SEQ ID NO: 26120 - DNA, 562 bp, Heterodera glycines
ctctctctcactctctctctctctctctccactctctctttccctctctctctctctccactctctctctccctccctctctctctctctccactctctctctccctctccccctctctctctctccctctctctctctctcttttttctttttccctaaaaagaaatctgatcagagaatgccatccaattcattcgtttctctcctcaaatacattaatttcatttcatttattttatcccaattccctacgaattctgttctttcttccgcgtcactcacagccataaatagtcaaaattagttgaaatgaacgagcagcgggctgagaaaggacaggaggacgggggtgggataaagtgggataaatgcggaagataccggttccgatcagccgaccaccgatcgaatcccaccgtttttaccaacccaaaaaaacggtgaaattttgggtattaaaaaaagcgaaaaattcacagaaatttgtgttaattcatttggaaaagaagattagcagaaatcaaaagttaatttgttgagttacgaattgatggagggcaa

SEQ ID NO: 26121 - DNA, 1242 bp, Heterodera glycines
  unsure (1)..(1242): unsure at all n locations
agggctgctaattttatgtaagaaaattcgcggattatataaataaaatatgtataaaaaatgctaaaatatgtatgaaatatgtactaaaacctccaaatatgtactaaaatatgtaaataaaaatttttttaatggttatttttttggaaaaaattcttcgtaaaaagtgaactaatcacaaaatgccataaaaaggaccaaaataggtttagaatcactttttagtattttaaaaattaattttgatatctgatttttggaaaaaaccgattttttagtggtacattttcaaaaaaatttaaaaatttttcttaaaaaatttgttataaattctcaaaaattcccaaaatatgtaaaaaaaaaataaataaatatgtacgaaaaattgcgaaatatatactaaaaaatccaaaatatgtataaaaatatatacatatgtaatatgtagaaaaatccccaaatatgtaaaaatatgtaattaaaagtcccaacttttgttcgcaaacagaaaaaagaaagtgtttttcttactatttagagcatggagaagccaggaaaaaaagtatttacataaaattagcagccctactaatgagacacagccgatattagaaaatattcttaattgtctggcgggcattgagaagttggtctccaacagcaacaacaatggcacattaactgcccagcagcaggtggcggaacagatcaaagccacaaagccatcgctgaccatcacggcaacatgagcgcaaattaaacgtcaacaactttagcaaaagtaatcataattatatatataattcaatataagtgtactttttacaaatgttactcaaaaattgttttataatttcaaaaaagttgattattctgtataaattattaattttctttgactgaaatgaacttaatttgtaaaaaaatttatattgtttcttggtaattttaaaagaaattatatgtattgaattctctacaaagcaatgaatagaaaagttgaaattatcaggacatattatgaaataattaattattatcgtaaacaactctgctaatattctttttttagacaaataaaaatctgctttattggtagaacaattttattatgatgttcaaatggccttaaaatcgcatcaaaaaaaactgactttggtgactgtatctgatgaatgacatcattncacattgtgtagtgcctaatggaagcccattgtgcagtggaattacttgatt

SEQ ID NO: 26122 - DNA, 1583 bp, Heterodera glycines
  unsure (1)..(1583): unsure at all n locations
agcttctttctgattttttcacgttaattggacctccctcttttgattgtcccttttcgcttccttttgccgatttgccctcgttaagtttcgccaaaatatttgaaaattcatcatcgtggcaggcccaattggactcgcgagttcctccgctaaatccaaaacctattcggcggcatttaaaaacataaattatgaattacccacccattcacctctctgcgtgtggttcgcatttggcttcacattttctctaatgccgtctgccttttttcccaatccgagcccatctctccagcccatctgttccatcattcttttcccaaatgcatttgtgtcgtttagccagcttaaattttgggggtccaaacatatccgctgtttccgcctcggctcagataacattgacggcgagttatgcattgacaaacaataatggaaaatgttacagataaaaaacggaggcaattttaaaaagaaaaaatatatataattcatgtttatttgcatgtttctttacatcgataatgagataaaaaaataaatataaatttgatacatttttaccgaattgtaaaataaactaatttgaagtaaatttcgcaaaatagagatctatcattgttttctgggttcaatttcaatagaccaaatttccgacataaacggaattttcatcggcgcattttggaagagagtgccggccgaaacaaataatttagtcgcgccatccgacaacacatagaggccatagagataagggaggatgaagtaagcgaaaggcatcagaaccaaatactgggcattgtgagtgtgtcctcaatttcaattgatgaaagtaaaaaacgaacgggctttttgatacctgacaaaatcaaatcaacaggatggtcatttgattgcgaaaactcaaaaattttcctggcggcacttggattatgtgctaatacgatagtcgtcgcatttttagggcaatagtttatgaccgagacatccatcacgtgatttggaatgctaaaaatagatgaaacgtctttacattaatggatcaggaatgttagtcattcggcgctcacccactttcctcgctagtgatgtcgttaaggcctatcagacaatagccattaaatttgacaacacttaacaaaaggggaagcgtagaataattccgacaatgctcaaacgaactcattcttcagaacgcggatcccataagattcaaacagtgcaaaccattcctccgcattgccgtagtaatactcgtggttgccggttacgtaaaatgtgcccagctgcgctttcaaatggcgcaatgattcaaccctttcttcgatcaatttgcgcggcgcatcgacaatatcgccgatgagaaagacaacatccgcatcgagagagttcacacgtttaacgaccgatgaaatttgcttgccataaacactagcaccagcatgcaaatcagtcaacaccaccatctaaaaacatttgttctccttattttatgattanaataatgactgtcgttttgtgatttgtttttttattgataacatgccattcatttattatccaccttgagactcagt

SEQ ID NO: 26123 - DNA, 1212 bp, Heterodera glycines
aaaaaattgatttttttgttttcggggcagtccccccgacccgatgcgcccagatttatggggagaccgaatccttcgggaatagcttccctatagcctgttctttaattctgcgttggatttttgctccccataattgtttgagtaccccaaacggacacttgaaaaaatcgatttttttgttttcggggcagtccccccgaaccgatgcgcccagatttatggggagaccgaatccttcgggaatagcttccctatagtctgtactttaattctgcgttggatttttgctccccataattgtttgagtaccccaaacggacacttgaaaaaatcgatttttttgttttcggggcagtccccccgaaccgatgcgcccagatttatggggagaccgaatccttccggaatagcttccctatagcctgtactttaattctgcgttggatttttgctccccataattgtttgagtaccccaaacggacacttgaaaaaatcgatttttttgttttcggggcagtccccccgaaccgatgcgcccagatttatggggagaccgaatccttcgggaatagcttccctatagcctgtactttaattctgcgttggatttttgctccccataattgtttgagtaccccaaacggacacttgaaaaaatcgatttattttgttttcggggcagtccccccgaaccgatgcgcccagatttatggggagaccgaatccttcgggaatagcttccctatagcctgtactttaattctgcgttggatttttgctccccataattgtttgagtaccccaaacggccgagtgagtaccttcggtgcaggaaaattattaaggaagagagttcattatttatttgttttttgcataattaattcataaatatttttttcagaaagtgttctgaaacgcaccaaattttatttacatgttagtttaggcactctgatgctttttctatcaaaaggtagatgaataaaatttttaaaaatttttaattcctttttagacaggccaaaaagtttaggcttaactttttagtgaaaattcaatcactcatttttcgagtagtgatcagaagcgcaccagattttgcaggggcctaaaaggtcaaggaaaggcgtctctgccgtgatttagcagtagtacctatgaatttaaattttctatgaatttttaaagttttttgaaatttttt

SEQ ID NO: 26124 - DNA, 1538 bp, Heterodera glycines
tggtgggcaacaaatgtgacttggcacagcgcgccatggaccagcgctccatccaggagttggcccgctcatttggcattccgttcattgaaacgagcgcaaaaacgcgacggcacgttgacgaggcattccatgtgaggaatttttgtaaatttatcaaataattttttttaattcgtaaaatttagacaaaccaaatgaaaacattaagattacatttgtattttttgagtttttgaaaaattaattttttcaaaaaaatatgcctaatttcctatttttctgaatttcatccccttttcaggcattggtgcgcgaaattcgtaaacacaaggtgcgtaatgattgtttgttttctgctaaatattagctttttccaattaatgaaaggaaataattatgcatttactcactcagtggccattggtacagaggtattttgttagtctaacaatgttggttcacaggttcgaatcctctgcgtgcatttccattttataatttttattttagctttttatgcaaaatttattgtcaaaaaattgtttattatgaaacaaaatcttttttataaattaaaaacatttaaaaatcaataaaatattactgttcaaaaataaaattttaatttttatctaatattttattatgtatctatatgtcaaaataaataaaaaataaacattttatttaattaacaattttttgataattgactgcagcattaaaagcaaaaataaaaattataaaatggatttacatgctgaggttttgaacccgcggcccgaagggttgagaccaacacactacctctgcaccactgcaaatgggctcgggttcggcccccctcagctgcgcagaatttatttaagatttttttgttttaataacaaaaaacaagattctgttcaaaattaaatttctggaaaatagtgccaagcaaattttctttcctttttttgcaaattttcgaaatttacttccccgcaccttacacattttaattccaaccgtgctcattttttccaattttcattgtccaggacaaacaccgggagaagccgaaacggagaaagcgctgtgccgtcctctgacgaaagaaggggaaaatttaaaccaaaaaaagtcgtccaagtccaaaattcctttttctcctgaagcccttctcctctcctcctaccgtacaccaccacctataatatcacattcattgtgggacattttttccgtttttcctgtcttctctttttctttctttttgaaaatccaaattcatcgacgcctcatcatcccggatcaaaaaatgagacagcattttgcataaatattattatttaaaaaaaaacaaataaatattgaaaaagttaattaaggattgcgattccggtggaaaaaagttaaatattttgttttccacaattgtttgaacttggcgatgtaccatcggcactattaccgagatgcaaatcaagacgctattcaaatgtcagatgcggattctccgacagaagcaacccctaatacgagatgctttccag

SEQ ID NO: 26125 - DNA, 967 bp, Heterodera glycines
  unsure (1)..(967): unsure at all n locations
tctagagnntcatgccaaggaaaataaancggggaaaatgccaaggaaactatacggagaaaatgccaaggaaaataaagggggaaaagccaaggaaaataaacgggaaaaatgccaaggaaaataaagggggaaaatgccaaggaaaataaaccgggaaaatgccaaggaaaataaacggggaaaatgccaaggaaaataaacggggaaaatgccaaggaaaataaagggggaaaatgccaaggaaaataaacgggaaaaatgccaaggaaaataaagggggaaaatgccaaggaaaataaacggggaaaatgccaaggaaaataaagggggaaaatgccaaggaaaataaagggggaaaatgccaaggaaaataaacggggaaaatgccaaggaaaataaacggggaaaatgccaaggaaaataaagggggaaaagccaaggaaaataaacgggaaaaatgccaaggaaaataaagggggaaaatgccaaggaaaataaaccgggaaaatgccaaggaaaataaacggggaaaatgccaaggaaaataaacggggaaaatgccaaggaaaataaagggggaaaatgccaaggaaaataaacggggaaaatgccaaggaaaataaacggggaaaatgccaaggaaaataaagggggaaaatgccaaggaaaataaacggggaaaatgccaaggaaaataaacggggaaaatgccaaggaaaataaacggggaaaatgccaaggaaaataaacggggaaaatgccaaggaaaataaacggggaaaatgccaaggaaaataaagggggaaaatgccaaggaaaataaagggggaaaatgccaaggaaaataaacggggaaaatgccaaggaaaataaaccgggaaaatgccaaggaaaataaacgggggaaatgccaagaaaaataaacggggaaaatgccaaggaaaataaaggnggaaaaatgcca

SEQ ID NO: 26126 - DNA, 1826 bp, Heterodera glycines
aaatcattggttcccacattaaaatttatttgtcgacccttttgaatttatacatattttgtcaacattatataaatttataaaatatgtattattagtgcttaattgatcccaatcccccatcattttgcttcatctttcgccaattatttcctttcagtcgcccttcttctccccctttttgctcttttcgcagtgccttccccaaaaattggtttggcacacgcatttggcactgtcagaagtggccaagcaccacccgtgcccattgcatccgttgtgtccaggacaaaaggctgaaatttgttaaaaatggcgggcctctaacaaagccaatttttaattagccagtttagcaaatgacttgccccatttgcaaagagggccacagaagcccttgaaacaaaggcacaacggatcggacggaatgccaaaacaaatgccatttgaatggcaatcggacgaagtgcatctctgctgaggtcagagaaagtgcttacaattagcccgtgccctccctctctcggcttcacctcttcgttgcttccatttgaaaaagttcggatggcaattgccaaaatcgccgtccgttcggtgcccttctcctcgtccctccccgcctctgttgatgaattgcctttggcttctgctaacggtgcggctgtcgttgcgattgtttcggcatttttcggcggatcgtcgcattcttcggagacaccgcacgacgaagaagcgacggacgcttcgatgagctgacaaatgagacacaatttaagcattaaatccactacttggtcaattagtgtacttacaattcgtttgggacaaacgccgcaagggaaagggcgcactttggacaaagcgacggagaaaacaatcagcaaaaaatgttgccaacttaacggcattttgacgagactctgatccgaatctctgtcacttttaggccaatggctcagtcagtcccaaaacatttgccataattctctaatcggtcgcttttattaatcccccacaaaattggcattttattcgtccgtttgtttattttcatatttttattttgttttattgttttgttcatcccatcccctttttattgcctcataattttactttcactgaattttaatgggaaattccgctgcaataattggcgaattatttatttatttttgttttgaggacgttttttgtacgttccgccgtttccgccaattgatcactttctttcgttctttctttcctctttctgatcgttcgtttagtccgtttcgcccgccatcagttcccaaaattcctcaaattcgatctttccgctgccgtcctcgtcaatttcgtccaccgccgcctccaaatccttgtcgctgagatcgggtgcaatttcatgcagcagtcctttgagcgtggggcgcgaaatgtaaccattgccctgaggggaaattggaaatattaaacggtgccaattatagcaaaatgccaaaggcccaattagcatccggccaatggatgaataataataattatgagtgcttcatctgcccatgccattccaattttactcgcctccttgtcaaacagtcggaatgcctctctcagctcttttcgcaacgtgtctttgtccacagtgttggccacagtgtacaccaacgcgcagaattcgtcgaattccaatttgcccgagccgtccgcgtcaaattttcggatcaatctgtcgggagcgggggagaacatttgttgtatggccaagtgcaaattatacgcaattactacccactttctgagaatgttctcgtcaaagtcctgctccatcgcgttcataattt

SEQ ID NO: 26127 - DNA, 1569 bp, Heterodera glycines
  unsure (1)..(1569): unsure at all n locations
cttgcatttgcctgcannggtcaaatgtnacgatanntttttggcaaatnttggtgcaatacggcatatacgaatgcaagtttttcacaactattgttaaattgtgctactattattctgttaaagtgggaatacgcctgagtcacgtggtaccgcatttgttggtgagtccaatgaaataaaaaattacaattttgcaaagaataattattagtttacgaggacgtttttgatgcgaagaatgcctgtgatcacctcagtgggtttaacgtgtcgaaccgatatttggttgttctctactaccaagcgacgaaggtcttttatatttagatatttacacttttgaattgcttttttgctgcttttaaaattacttttaaacatgaaaaaattgtcaggcatggaaacggatggacacggacaaggctcgcgtaaaattggaggaagtgaaggaccgctacggattgggcggagacattgagaaggaaaaggagaaaatgggcatttacacgcccaaacacacgcccggagtgagcacgccgcgacacaaacactgacaataaggcgtggacaccgaatttttattttttttttaaagttaacatgaattataccaaaaaaataccatttcgacaggattgcaattttcataaatttttctgtaaagttttctggaattcatcgttaaaccaaagtttttagttattttaaatttggatctccaattgatatattttgctatttgacttgttatgactttcccatttcttaacttctaatatttccatatagtacaatggaaggcgatccaacctttgtaaatgttcaaccaaatttcgtacaacagaacttaagagaattgttagattcgcatttgccaaatcaaattgcccgttttgaggagagcagcgtaaatttggagagagtggctgccttttgtgaagcgaattaccttcaggtgaatttgattatctgtgttaacttttaagtgtttggtggtcatttatgcttgtgattggctatgacaagtccgaattgttcgctacgcaagaaaattttatttagtcgccaaacaaagccgaggcattggcggagacaaaacgttgcgcgctgcaaagtttggcgagttttgcttttatggttggcgatttgtcgcgctcacttttgaacgcacttgacttggaatcgctgaatctgtcggacaaaacttcacaaattcaaaacattgcgcaggcaaaaacgggattttcgaatggaacacattaatcgttcactaaatttttagttcgtttcaattcaaaaggaaaaatcggcaagacgagaaattggcaaattaacggcaaacaaaaatttgatccgtctcaacaaaatcacttatccttcttcagaagtacttacaactgctgaattatttttcaattgttttctttttaaaggagcgtaccccgcggtatcaccgaactccgattgattttgcgattctcgacggaattggaaatggcaagcgactagtgcaatcgactaatgactatggcacaattggggcggctcgtatgcaaggaacgtaca

SEQ ID NO: 26128 - DNA, 1313 bp, Heterodera glycines
  unsure (1)..(1313): unsure at all n locations
cggaatgggagagaaggaagagtgatcggaataggacctttggaggagtgaacggaatgggagcggaggaaaagtgatcgtgatgggagcggaagaaaaaactgatcggaataggagaggaggaaaattgatcggaatggaagcggatgaaaaagtgaacggaatgagaggaggaaaagtgatcggaatggaagcggatgaaaaagtgaacggaatgagaggaggaaaagtgatcggaatgggagcggaagaaaaactgatcggaataggagaggaggaaaagtgatcggaataggagaggagaaaatgacgcgagagtgaagggcatttgcgggttgaatgatcggcgattgtgaagtgaacagagaagttcaagcgggacgaaatagcataggcaaactcaaccaccacggaagaacgcaagcaaaaaaaaccaaatgtcgataaatcaataccaccaccaccaccactgatcagtgatcactgatcagtcaggcaatttccattagcaaaaaagtcttcattctcccacagcagagcagggacctcaaaaaatttttgacttttttatgggttccatttttattctatttttactccatttgtaaatacttcctcattaacctccccacacgattagcaaagggtagttttttgtgcgttaatgatttgctaattatctaattaaccaccactcactcacatatgaaaatcaaatgacaacctttgtttctatctatttttttttgttcatccggtagaagagaattttgtcgatttttttaatcgttcctccgattttcacatttcattctcctctttctttcctatccattttctttttttttgatcagccactccaatcagtttttgatcactttgatcaatttgtatgagtcatttaatccaggctcactgacacattgcgccccattgatcaattcattcatcccattttgattggcaaaaatctgattgcttggccctttggcacaaaactggtgattaactcaggttaattacctgttggccctacacagtaatcacacattattactaaatgtactacttcttttcggcctcccggtttatttaattatatatatttttttttgttgtccccgtgttttcttatccaataaaattatcttttccatttatattaactaaaaaattatttttcgataattatgataataatacgggaaataatgcaaaatcgtggtctctaagtaattttaatnctttatgttaaaaatactacncgggttaatggagtatgctggtcacgaatttccaaatcccggacacga

SEQ ID NO: 26129 - DNA, 1373 bp, Heterodera glycines
tatttagagaaacctatccattagcacaattttgacccgtcttaagcaccatatttggtcagtccggttaaaatgtatttacaaaaattattcatactgtacctacagtattttgggaaataccaaacttctgtcattatgcttatactttatcattataaaagattgattagccaaaaatttgttgtgtaaatctgaaaattttagtttcggcaaacgcgctctcttcccttcggtggcattggatgataagcgcaacccaccgcaaccattcggtaaattcttggcatttagcaaattgctaattttttttttcaaaaattaaaatttctagtccgctttggtcgctcagcagcagaaatggtggaccaacaacaacagcagccctattttccagcgttatgagctagaattttggagggaatgccaaagaatgttcaaaacaaaaaaatgacatcatttgaatttgtcagttcgccaaaacgccaatattttttttttgcattataaatgattctgtaaaatccaaaatatttttgactttatattaaacttgtaatataatttaataaaacttcacttgaaattttattttgaaaaaatcaaattattcttattaagacaaaatatttttttttatttagttttaattagttttttacatttcatatttaattttcttaaattgcagaattataaaaatgtgatgactatggagctgacttaaatggatttctatatttttaattgaactcatttcggacttaatgtttattgtgttttagcttcttggaagaattttattcccaaatctttctatgtttcaaaatttttttgtctctcttttgctggatactcatataaaattaatcatccttttaaaaattccaaaatggaaaaaaaacaggtaatttgttttactaatttgtaagattaaatttgggtttgtaacttgtaagctatatacgcctatcgaatttcaaagccgagatgaaaacgaattaaaacaccattttttatattttttaaattttcatttcttaatttgttcatttttattttgttagcagtggaaacgtattagcgatgacaaattgggaaaaaactgtgcaaattccattgattgaaaaagagataaaaaaatagaatgaataaattaattttataaaaaataaacgaacaaaaataatattcattaatagaaaatgtattaggtaaatgaaatgaatgaaaagaaaataaaattgaaagtgtaaaaaaggaacgattaaagaatgttaatgaacccaaattagagggaaaatggccgaaatgccattgcggtaatgccaaaaaacaatttgttctccgctgcgcattacgtccgcttctct

SEQ ID NO: 26130 - DNA, 1327 bp, Heterodera glycines
  unsure (1)..(1327): unsure at all n locations
gccgtgcaacaaaaccacccggcacagcaaaaaccctttcacaggaggaaaagcaattcgtggacaaccgacccagccgtgcgggtcatgtggggggacagatagatggagagggggaaaagaatgatgaagagagagacatagagtgggtgagagagcaagaaaaatggagagagatatagagagagagagcgagagagagagagagcaagacaaaaagtgagtgaggtagagagtgatcagaggaggtgtgaggcaagaaaaggaaagacaacgatagagactactaagcacactttcgctgatccctgatcagcttagttgacggatagaaattataatttaaaaaaaattatttttttaatccaattttatttaaatttatatttcccccaaatttcaaactttttatttcttagttgaagccttttaaagaaaaaaaagtcaatgccaacggattgcgtttgaataaattataattttggaaacaaaacaaagcaaaaaacggggcaaaaaagtttgcggagcacaaaggtaaagcttttggttggaaaacaaaagaaagcattttatgcaaaggcatttctgcaattttttgaaaaaattcaataaaataaaataacaatttggcacaaaatttttagttaaccattaaatggcacgaaaatgccatttttggcacatttaaatgccaatttgtgatcgttgtcaattaactcaaaacaaatgccctcattaggggactctgaaaatataaacacgctctttttgccgtgctcattggctgcccacccatcggacagacaaaaaatggcattttttctttattttaaataatggaaaaaacttaaactaataaatttgttttattaatataaactaatattttaaaattaattaataaacaataattatttaaaaaataattattgaaatagaaattagacataagcttttgtgcaattatccagtgcgaatattttgattaatgcaaaaaataaataaataaaaagtacacaaataataataatgaaaattgccatttttaattattatttttttggattttgctttttattggtaaagaaacaaaatttcttttattttttgaatttcataatcgaaaactgggttanatcttatttanattggtaaaaaattgcaaattcagacctataaaatgttcaaaaattatttaaaatttctgttttttaaattgtatgtatanattntgtcgtaaaaacgcaaaaatccagcaaaaaaaatgccgaattttnngcagatatgccagtccaaccctgccctctaatgatataaacctactact

SEQ ID NO: 26131 - DNA, 1002 bp, Heterodera glycines
caaaacgatataaccaaaatataaggaaaaattttttctccatcttcctttttgatactaaagcatcagagtgctaaaattaagttgtaaataaaattttggtgcactttagagcactttctgaaaaaaatatttatgaaacaaaaaaatcgattttttcaagtgtccgtttggggtactcaaacatttatggggagcaaaaatccaacgcagaattaaagtacaggctatagggaagctattcccgagggattcggtctccccataaatctgggcgcatcggttcggggggaatgccccgaaaacaaaaaatcgattttttcaagtgtccgtttggggtactcaaacaattatggggagcaaaaatccaacgcagaattaaagtacaggctatagggaagctattcccgaaggattcggtctccccataaatctgggcgcatcggttcggggggactgccccgaaaacaaaaaaatcgattttttcaagtgtccgtttggggtactcaaacaattatggggagcaaaaatccaaagcagaattaaagtacaggctatagggaagctattcccgaaggattcggcctccccataaatctgggcgcatcggttcggggggactgccccgaaaacaaaaaaatcgattttttcaagtgtccgtttggggtactcaaacaattatggggagcaaaaatccaacgcagaattaaagtacaggctatagggaagctattcccgaaggattcggtctccccataaatctgggcgcatcggttcggggggactgccccgaaaacaaaaaaatcgattttttcaagtgtccgtttggggtactcaaacaattattaaaaatttttagatttttattcatctccctttttgatagtgaaagcatctgagtgcctaaaataacttgttaataaaatttgggtgcgtttcagagcagtttgtgaaaaaatatttatgaattaattttgctaaaaaaataaaatagtgaagctt

SEQ ID NO: 26132 - DNA, 1919 bp, Heterodera glycines
  unsure (1)..(1919): unsure at all n locations
tacaaggaattcctcgttcacggacaataattgcaatgtccgatcccaatcacggcaaattttcaccggtttaccaacccctttcggggaaggacaagcacgctgattttgccagtgtagcgcgcgtgcagccccggacatctaagggcatcacagacctgttattgctcaatttcgtgcggctgaacaccgaaaatccctctaagaagttgtgcccacagaagcaatgagccaactatttagtaggctagagtctcgctcgttatcggaataaaccagacaaatcgctccacgaactaagaacggccatgcaccaccatccaccgaatcatgaaaaagctatcaatctgtcaatccttacggtgtccgggccgggtgagtttccccgtgttgagtcaaattaagccgcaggctccactcctggtggtgcccttccgtcaattcctttaagtttcagctttgcaaccatacttcccccggaaccggaagactttcgtttccgggaagctccccaccagggcgaataaatccgccggcggatcgctagttggcatcgtttacggtcagaactagggcggtatctgatcgccttcgaacctctgactttcgttcttgattaatgaagacattcttgccaaatgctttcgctgtagtccgtcttgctacggtccaagaatttcacctctcacgtagcaatacgaatggccccgtttgtctctgttaaccattatctcggtcagcaaaaccaataaaatcggaccgaaatcctcttctattattccatgcacgaacattcaagcgaaacgcctgtttgaagcactctgatttgttcaaagtaaactcgccagcccaccgacgccgaccggtaaggccaacgccgngggaagaccggcagaanagccaaccaaccagtaacacacaaaagtgtgcaccggacggctagcacagatccaactacgagcttttaaccgcagcaataattctatgcatttgagagctggaattaccgcggctgctggcaccagacttgccctctcatagatactcgttaaagggtttaaattgtacccattccgatgaccggcctcataagagatcggtctcgttatttctcgtcactacctcctcgcgttgagagtgggtaatttgcgcgcctgctgccatccttagacgtagtggccatttctcaggccccttctccggagtcgaacccttatcctccgttacccgtcatcaccatggtagtcagatacactaccatcgaaagttgataaggcagacacttgaaagacacgtcgccggtacaagaccgtgcgatcagcttagttgttctgagtcaacactggacgcccggagggcgcttggttttgtggcgaacaaatgcgctccgctctggggagattggagctttggtgcatgtattagctctagaattaccacagttatccaagtaagaagtcaaggtcaagtaaattatagctggtgtaatgagccgtacgcagtttccctgtctggcaggttaaacttacacatgcatggcttaatctttgaaatgaacacatcagttcaggcaggatcaaccagatagctgctagcgagcgttgccaagcgccgctattacagccgtcttgtaaagacggatagtttcagcagaaacaactccgttcagcgcaagcgtgcgcatgggcagcgaaggagacagagcaagtggtaatgacacagcgctggccaggcatccgagcttcccggacttgggaagaaccatctcgccgctggacacagctccgagggcagtgcacaggcactcacacgagcactccggatttcccggttaggacacttcctcaggccaaaggccttcgggcgcttatgtctcgtgttttttcgaatgcaagcacactggtccccaggcaaggagt

SEQ ID NO: 26133 - DNA, 1072 bp, Heterodera glycines
ttaaaaatgtctaaacaaaaaaaaagcaaattaataaaaacaaaaaaaaacatgaaaaaaagatggaatttgaaaaaaataataacaaatcataaaaaataattcatttttaagagttcaaataaccataaaaaataggataaaaattttaaaaaatggaaatgacaagatttagcatggaaataacaatcagaagcaatgattgattgtattgtcaagtgaaagttttgggtaaatttttcctcccaaaggcaaaaggataaaattacagaaatggcacaaagttgccacatttttctccatttatttgctcgactgatcggcgtccgctgcctccattgtgccgggtgcacccggcggaaggtcgacgcgcaattttccgcgattttgtgcggtcgaaggggcgaaattgtcggaattgtcccaattgttttgcgtttttgggggcgcgggggaggggaattgctgctgctgtcgtcgtccccatcctcctgtgtttcggataaattccgtttttttttcaatttttgccatttatttttcgattcttttcaatttggccaccttctacagctgctgttgctccctgctgctgctgcggctgtccccaattctgctgattctgtccccattgtcctcctcctcctctccatgcgttttgtcgctcgaattgtccattttcgccaccgttttgttcatgggtaccgtatctgctctgttgcccaccgtatccatagctgggctgtgttcttgagttaccgtaactgctgctccaataatttgttcctattgaaagaattaaaggaagataatgattgatttaacaggctcaataattataattataccagaattactcaaatatttcccactgaatttaaaaaccgctgggaatacatttaatgaaatgtatttttgcgtggatttttgttaaaagtaaatattttcttatgaacctttccttaagaaatacagcaagataaaacaaaaatggtatttttgctgcttttaccgtatgttccgctcccataactgtggctaccgtatcgctgagcattaatgacaataagaa

SEQ ID NO: 26134 - DNA, 1218 bp, Heterodera glycines
ggtaaaaagccagttttcagaaaccctatttttaccagtgcattttttggactcggaactaccgggttggctatgggtactggatttcctggatctgggtcttgaagccgggtaggtcaaccctaaaataattaaacatttcgttttgtatttctttctcaaattccaagtcgctttttcattttgtcccccgcttttcccggatccgataagcccatcaatcgacggatggactaatgaaactgtcattcacctgccgctgttgccccatcgtctaatgactctgctgtctctgctaattagtgttgagaatcatctcagggtttgctcctcaaattgtctcccattccaccgaattccccgggggataattcgcaaacattcgcttcacttctgtcgctcattcacttaacaattggactatttgctgcagtccatctgatccaaatcatcgcaaatcccacacttttgtccacttgatctgataattttttcggtcatttacgcctatgtacaaaatcagtttcatttttataattaataattgaaagtgtaaaaagcttttaacatttctctgttggttcatttttaaaatggcaaaaatgctcatttcacactttaaataattttgaaagaatgactttcttaaataaatttgaaatttgaaaaataaacaaaaaaagtggcaaatggcagagcactctctttttgaatcctttttctttctctgtcttggcataggtaaattgtttcatttggccaaatgttggcccttttttcttatcggcgggtgaaaacgcaaaaagcgcctccatttaattgatggccattaccaatagcaccacacaaaataacaattcatataaaatagcaaagaaataaaatgataggaattttatggtcgcataaattcgcattttttcatttgcttttgtcggattttctttgatcaaaatcaaagtccgttcttttgagtcattctttggcctcacaataacaaatagcgtgagcttctaatgacgccgctcatgctttaaaagtgctgctcgagggttaaaataattcataaactcgagaaccattaccaagaattgacaccgcaaatcgagacccaaaacccagagaaattactcaactcgaaaaccgagaatcccgagcagtgctacttaaaagcacattccgaccaatgcttgttggttactgctcgttttgtttgtt

SEQ ID NO: 26135 - DNA, 1937 bp, Heterodera glycines
  unsure (1)..(1937): unsure at all n locations
tctcaaggtcatatccaaccaatttcgtttttcctccttggacggaattttttacttttgggatgaaccacccccctttggaggataaatttaccaaatcggcagattttctccccacatgtggtttttccttgggtgggtgtctctccacacttttcgcattttttgtactccctacaagcagtcttcttgtgagactcaaaacattccgtattgtagaagttgcgattacactccgcgcaataaatcccagcacacacatccgcacatggaaacccgaaccccattctacagcacttcttgcatctttccttacattccaatcgatgtctctccggcctttcgcgtgtcacttcacagctgacacaaaagtttcgaacacagaagaattgcgtaactgatttcattccgtcccagtggtctccatcttttatcacacatacttcatttttacgaattccttctcccttgaaaataggtttgattcccgttctctggaaaattaaatgttttttcaaagtgcgtaatttttttaccatgtcaaatgccactatgcgaaacatttccgggtattccttgtcccaaaagttctggatgagaccgaggtgttgtagaccaaaagttttttcctccccgcttatcccggccttttccatcaatttgacagccatttctctttgttttttctctgttttcatgagataacgaaacttgttttccgttatctcctttccaatcaatcggtaatttcgggcgaattcaagggagtaaaataggcctaaacaaaagttaaagatttgcaaatcttgtgctgaatttaaagtgatttcgaactcactaaatttccccttcggagcggaaaggcgtcccaattccttggtttcaacgcgagggcagaaacgagacattttcagcaaaaaaagttgaagaaaagggaataaatagaagacgaaatgtcaggacaaaaaaacagatagagagaagaagaattgaaaaaggacgaattaaattaggaaattgaagacaataaaaaagaaattagctgggcgagaaggttggttgaaaaagctgattttttgagagagtagaagagtgaatgaaaggacgccaattccggcacaaatgcgaaggggcggagtaattagcggaagggtgtgatcgattttcagtggtgtgtgtggtgaaagaagggaaaagaccggcgaaagaagcaatttgaacgccagcagagaaggatggcttgcgagagaaccaaaatttgaattttggcaggctacgaaatttgattgacaggtgggaaggggatggcaccccgagaggggacgttttttggtgcatgacttccgccagaagggaaaacgaagcgcatagagtcccgaaagattgaaatttgattgacaggtgagagggaaaacggtacgctagagtcaaatttgaatttggtcggcgacgaaatggaaaaggaagccgtcacattatttcactgctgcgtatttttttggctggcaccaatttttttggttggcacgggcgcaaaatgccgcttttgaaatatgattgggaaaaactgaccattaaatcacataataacacaacaatacctgtcaccccataccaattacattacgaaacattttttcaccattttcacctgttttgacatattttttcatatgtttcacacctgttatggaatattttgcccctcttttcaccacttattcctggacatttcacatatttccttggttttaacctcttttcaccaggacattttataagcaataaattcgtctctanattctgtttttgggtctcggcctttccaaatctatttgcttgtctcgcatttgttcttttaatttattgggccactctccaatgcctaaatcgggctgtgagtaagcgccccgataggtttgaccaatttcctttct

SEQ ID NO: 26136 - DNA, 1175 bp, Heterodera glycines
ttgccctggaatccggtgacaattgccagcgacaaatttcaagtacacaaaaaataatatatccatggacaaggacctatgctaggacaccaaattaaggacagtttaaaaagccccttgaaaatgttcaaggaccgaagtctgagtgtaaatttcatttcaagaacattaaaaagcctaagaacgagtcgattttaagtactgttcttgaaagcttaaaactaaaaaaaaatcgattttcaaggactttcttgaaattttatgtatccagtccctcgcctaaggtttaaaaaaaagttgatttccagctgcccgattttcgttttgtcaacctgagctatggacgccaaatgcgccagtacaatgccggcgcgtttgatcagttaaaggtgaccttccagttcaaacggctctacgggtattacattgttcaggtgataaagaagaatttaatttgataattttaaaatttaatttcaattttaaaaattaaattgaaaattattgtgcaattttttttaaatttcttcgttcacttaaggcttatttgccttcgtacctttttgtgttcatttcctggatcaggtagcatatttttttttgaaaataaattattgattgaaaatctacaaattctaagtttttggatcgatcgctacgcacttccggcacgaattttattgtgtgttaatgcggcatgtgcgctcatttaccaagtgggtgattaatagggcacatcaaaaaatatggatataaatttcataaagctttaaaataaattgtgtttttaatttagttttcttagaaaaatgacttaaaattaatgcgaaatttccctagcattttctacaatcaaatgatttgtttttttttacaaaaattcactgtttttccaaacttgaaaattgtcatgcatgtataattcaacatttttcaagttattgaaattttgaaattttgcttaaagatgtgatttttattgccaaaaaaattccatggctaatgccaaaatttgcctctgttcagatgggcaatgttgttcagaatttgccaagagtctcttatgtgaaagtaaaaaaaaatatacattttttggcaaaacattttttatttaggccttggatttgtttttctttgtcagcatttttttcatcttcatgtcattgtgtgaaatg

SEQ ID NO: 26137 - DNA, 1651 bp, Heterodera glycines
  unsure (1)..(1651): unsure at all n locations
ttatgaagcctcaaagtcgntcacactcaaattgccnactttcaaagactcccacagcgaaatgacgatgttcccatttgttacagaaacagaaaataatggagttgaccatctgctgtcaacgacagatcagcggcaaggttggacaataattcaaaaattcgagatttattttttaattgttttgtcaatctggcatgataatggggattatgccattgatggggagatgagataaactgctggtctctattcggggtctctttgttctgtcactttcccatactttcaccttttaaaacctaaagtttcgaaaatttgtaaccagaagagctcttcacaatagtttttggttgttaaaaatttgtaaaaattcccaaaaaattttaaattaattttttaaatgccacaaagttcaaaaagggataatttgttgcttgagatttaatttaaaataattaatgcaaaaaatttattacattaaaagctttttaattactgttttttaacagttgaacaaaacgctacagaaaaaaatatgtgcaaatttggtgccatttcgtgtgctaattgtttaaaagaaaaggcaaaaaatgagaaaattcaggtgagtattttgcagttcatcttaaaggatcatcatcaatagggatgggatttctaagtttttacttattttttctgcggctttaactcaacgagaaatacacgaaaaacacattttttgtctgaaaattttgcgttttcacgcccttattcgaccttagaaatccttatttttgatgttcgcccttaaaaatccttattttggatgttcgcccttaaaataagtttttgcccttattttggcgttttgtccaaaatttattaacaaaaatgcaataaaaaacgaaaaatacacccctaagaatcgacccaaaaaaatttcgaaaaaatatacccctaagaatcgacccaaaaaaatttcgaaaaaatatacccctatgaatcgacactaaatttttcaaaaatagaccctaagaaatgaaaaaatttttctaaaatatagcttatttgtaactgcaatcagtgaataaaattgtttgccttagtctgaaattatttcatgtaaaaaacagcaattttaaaaattatgccctaaatttgactttttcgaccttattttcgcccttatttcgcgaatttttcgcccttatttacggccttattttggactttttcacccttaaaaatcccatccctatctatgagatatatttacccaatttttaagaaaaataagggttatagtggaaaatttttgaaaatttgtttggatttgttaactgattttgcctaattcggagatgattttttgataacaattttccatttcataggggtgtatttttctgaaatttttcggatcggttcttagggggtgtatttttcgtttttattgcatatttgttaataatttttttgaaaattgctgaaaatatttttaaaaatttctcaaaatgacagaaacagcacaaaaaagcactaaaatgccaaatcagcacaaaaatcaaaaaatcgagaaattagcaaaaatccgcatgaaaaagtgggcttagaagtctcaaaccaagttagaaatgcgtttttcatgcttattatcacgccccaa

SEQ ID NO: 26138 - DNA, 1450 bp, Heterodera glycines
caaaaaaaaaccagaatttctaaaaaaaaatcgctggaaaatgttacagaataaaaattaatataagatttttaaaatccaattttatattttgacaattccaataatcaaattaaatttatttttcttttacccttgacagaattggctttgtgtttgtgctcaacgattcgtcggcagttaacggcctcaacgatttgggccatgccattcacaacgtttaccaattcgtcaagatggacaagggcgccgccggagcgctgctcttcctcaaaaaagtacaacagaaatacaattttaaacccctacatggaaacacttaaaaagttcctaacccttattcaattaagacggaaaatttttcaaagttcaaaaatctcgcgaatgcgagaaattattaaaattgaaaaactggaccgggatttgaggcaggtcgtttccccagccgattcccatcccccggaaaattaaaaaaaataagtttaaacaaatttttcaagaaaaaattcttaaaaacttttgtttgtaagaaattttaatgaaaaaaaattataataaattttcagcgattttttggatttttttttttgaaaaacagtaactcatcataaaatttcaaaaaaacgctagaaaaattttttacaattttttttttgagcattgaaatgaattggccaattttttggatttctatttgtatcctgctgcagatgcttgaccaaattgcgccgcccaccggcagcgccgacaccgataaaatggtggccgatgtgcacgcctacttcctgcgccaccacacggaccaggaggtcgctgatgtgttcgggcctgactcggactacgccggcggcggcaccgccggcacgcgcaccgatggcacggcattccttcgtcgcagcggtctccaacggttgcccgccctgctggtcaacggggtgccgttggacaacgcattggtcggtggaaaccaataaagtttagacgactcaaacaaaaaacaatttttttattgggttgattaaaaagttctgaccctttaagcacttcaacattaaacaattttttatttcacaaaaaacaaatgttcaatcaatgatgcactcaccattttgatcaatgatcctcccccatcgttcgggcaacatttctatcccctttttataaaactgatcatttttcgatccaaaaaagccatccaatgcattttcgacctcgttttgatcagcaaattctttccctctcaagaagtgctccatagatcgaaacagatagtagtcacacgggctgatgtctgggctgtatggtggatgaggaagaaccgcccatcgaagtttctcaattttttgttgcgttgagaacgcaacatgtgggcgtgcgttgtcatggagaaggagtacgccgccgcggaatatgcggaaaatggaggacgacgaatttggtcatgaagatg

SEQ ID NO: 26139 - DNA, 1265 bp, Heterodera glycines
caaaataggcactaaatagcacaaaaatcctcaatattcactaaaataagcaaatagaaatttctttaacgcttttaaggtagcaaaacgtaaaacttgataaaaagaaagtaaatctggttaaatttaaattgtaaatgaataattaaatatctaagttttttttggaataagaacaaaattttaaatttaaaagattaccaaaataaatttttatttttaaattaatttttgggaaaattttttcaattcttaggggtgtattgtcagaaaatttttgggccatttcataggtgtgtatttttcgtttttattgtaggattttcagaaaattctgagaaaggcaccaaaagtggcgaaataggcacaaaaataggcgtttaggcattaagcacaaaaagcccataataggcaaaattgggcattataaaagtcatcgtagacaccccaaaccagagcggaaagggcttttttcgtgcttatctgtgcgtattaagtgcgcaaaaattttaggcattttccttaaaacgaatccctattagtggttgattaatgctaattgtctcttcacctttctgttaacaatatgcacggtcaaatcgtcggctggcgaactcagcggagggcatggactggagaaaaattaaaaaataaataataatttatttttaatggaaattttcacttttcgtccatgttttcgcgttttttgagaatccgtaccagcactgattgtgtgggtgagatgggcatcatgggttgattagtgccaggctttactgacgccgatggagtgccaagtcttaccgtcgccggctgctggaaattttgggccccgtagttggatgggccctgggagatcgcataaaaaattgtcaaaaaaaactagaaaaccgagccacagtcattagtgctgttcgagaacgaaaaattttccgatccaagaccgagacctgaccccgagaccgaaaaaacccgagacttttctcaagtcgagactctcgaacaacactaacagtcatgtcaccaaagtaactccccatccctctaacatgcctgctgggaaacaaactgcagttgggcatatggctgctgttgctgtacggcataatacgttggcattccgcccatggcattcggttgggcttgaagtgttggcgttccgcccatagtgttggcattcgtttgggcttggtgttggcgttccgcccatagtgttggcattcggttgggcttgaagtgttggcgttccgcccatagtgttg

SEQ ID NO: 26140 - DNA, 1716 bp, Heterodera glycines
agatacataacttgagaaaagcaggaatttttatactaccccaaaataaatgcagccaattagtgctaatgactcggtccttcaaaagtttccgaattgtgagcactaagcacaaaatgtaattggcctgagaaaaaagtaccctctaaagaaacatctgctgcttggctctcatttctcttctttcagttgacaaaattctccatttctttgattgcctttttccgaattgctaattgtcgatgccctccctcatttttggcacttttgccccattgttagttacgattcggcaaatagccacaggtgaaattggattaagagttcaacaattggattaagagttcaattcagagaatcttattcttcatttttacagttacttacaaaggaaggtccccaggtgtccttgaaagttttcgagaaaaaaaagtcggcacatcgagacagagacttttgtttatcaaatgattttatgacaaattaattgcttgtaacgcgccgaaaaaggcagctgacaaatgagttgaagtcagcttacaaattaggaaaaaaatttatgattctaattaaaaaaataaattgtggaaaataggttaattgtaagtctctcttttaaaaatcatattttggctaaaaaacgaagttttcatgaagtttaaaaaaactaatatatctttttgaattacaatcagagttgggctgattatgtagaaggcctcataattagggcgtgtaattatatggatataaaatcgcgaaatatggccataaaatatggaccaaaaatcgcaaaatatggacataaaatggcaaaatcgcgaaatatggacataaatggcaaaaatgtcaaaatatggacataaatttttcaaaattgagtgcaaaatttcttcaaatttattggttgaaattgcatatgagatacatttccaaattttttgactcggtaaggcgctttgacaaagacggctttcgttttgcaattagtcggtcaacattcggaaattggtctcgaattttttcggcaattacgtgcaatcattttaaaagaaaaaaaacataaaagctaaaatttattaatttttttagcgcaaaatcaacaacaaaagcgaaattttcgcttttttgcttatttttgacataaatttattaatttttaagaaaatttaaatgtattcaatattctcgagaaattttggcgaaaaaatgattttttgaaaaatttttcgggttttgggctcaaaaaggctaatttagctgctgggggccgttctaatagaggtttttttgaaaaatgccaaaatatggacataaaatatggacaaaatgccaaaatatggaaataaatcgcgaaatatggaaaaatatggaaaatatggatatagaaatccttcctagaagcttcaaaccaagctaaaaacatgtttttcgtgcgtttcaggcctcccacagtccaggaaaaaaatatggatttccatgtaattctattccctactgatcatgaatacggcatccatttcgaccgatttctaatcacgaacccaattcgaacaaaaagtcgaaaagtcacattttcgaattttgagtttgtgggtcgaactagctctaaataccttaaaatgaacttcaaaatcacataaaatactaaaaaatattattaagactctttttggtccaaaacccaaaattcgaaaatttgacatttcgactttt

SEQ ID NO: 26141 - DNA, 1164 bp, Heterodera glycines
caaatgtttggggtcagatgctgtgaatgcgaccgattcattgctgggagagtgctcgaggtctgttggcccgggttttcgaaccttcttccgtttttaggccggtggctacaaattccacccgacttgcgctcgctgttcacgctgtcagctgcccttcgacgacggggccgagatgtacatgcagggcaacgagatatggcacccgaattgtgagcactaccggacgacggagaacattgcagtgagaaggcggcgggggcaaaagcggagacgaatgggcgaataattggccatttcggacagatttcgaagcccagcgtaaagggcagcaaattccaatcgcaatttggtcagcacctcacttacatgtgagtgggaaggccgacaagtgaattgaagaacaattgccgcaggtatatgttgccggagactgaacagactttgctgaaacatccgatcgcgccgaatccgccccagccaactcagtaccacacgccgcaggggccggtgatcaaaatacggaagtcgcgctattcaatgctgaagacggggatgcagcggctcagtgagtccatcggattggaattcaaatggggaaaagggcattttgtgccttccattgtcagccgaagacttggaacggactcggccccgttctcgctcctcttccgtggacaacgacgaacccattgaattggctcatttccccggcgccaaagtgcccgacaaagacgcggtgccgcccattgatgtgtgtcggggttgggctgggccattcccaccgccccaatgccaatgcttcagagggaagactttcccgcgccgccttacccttatgctgtggaagagttaaagcgccgtttgtcctcctcctcggtggaaaatgacgacgaagaggaagaggaagaagcggtcaaattggcacatcacagggcgaacaaagcggagaaagtgatgaaccgagcgcagaaagtgttggacgacatcgaacagcactcgtccattgcgcacgtcatcaaacagaaattggtggaggacagcgagcggaagcagcgattgtgggagggggggggaagcgactgaggggacgcacacttttcagggggatggaccagcgactgcattgggacccccggtaattgcggacgggggggggggaat

SEQ ID NO: 26142 - DNA, 1051 bp, Heterodera glycines
  unsure (1)..(1051): unsure at all n locations
tcgcatcaccgtttgctatggcttcgcatcacccgcttcaacgggtgctcagtgtaaatatagactggccattcaaattctgcctttccagccttatggaaagatattatggaacttttggttccatctcagttgtcaacgccgcgactgcatcgttattatatcagtcgatagaattttcgaatcgcttttaaatcatctcttttgcgtcccttaatcttcactctgagccgagttactgcggtctaaacacgtttttggtagaattgcagccagaatttaaaaatacagtttgctatggcttcgcatcacccgcttcaacgggtgctcagtgtaaatatcgactggccattcaaattctgcctttccagccttatggaaagatattatggaacttttggttccatctcagttgtcaacgccgcgactgcatcgttattatatcagtcgatagaattttcgaatcgcttttaaatcatctcttttgcgtcccttaatcttcactctgagccgagttactgcggtctaaacacgtttttggtagaattgcggccagaatttaaaaatacagtttgctatggcttcgcatcacccgcttcaacgggtgctcagtgtaaatatagactggccattcaaattctgcctttccagccttatggaaagatattatggaacttttggttccatctcagttgtcaacgccgcgactgcatcgttattatatcagtcgatagaattttcgaatcgcttttaaatcatctcttttgcgtcccttaatcttcactctgagccgagttactgcggtctaaacacgtttttggtagaattgcagccagaatttaaaaatacagtttgctatggcttcgcatcacccgcttcaacgggcgctcattgtaaatatcgactggccattcaaattctgcctttccagccttatggaaagatattatgggaaactttggttccatctcanngtgtcacgccgcgactgaatcgttattatatcagtcgatagattttcgaatcgcttttaatcatctcttttgcgtcc

SEQ ID NO: 26143 - DNA, 1351 bp, Heterodera glycines
attcgactctacttatggcaatagtgacgttctagaccgaaaaattttcgacacattaaaccgagacctagagacttacaaaaaaatttcacacacttaaaaaccgaaacacacctgcaataaataaattttaaaaaactaatttattttttgtaggttttcctgtctagaccagagatggcacggaattccgggttcagactccgttttccgtcattttggggtcggaatttcgatttacaaaaatttttggggactcggaatgccatccttggaccagacgcgacaccaattcctcccgaacattatgaaatgggcaacacccgctgaaatgttttggctcaccgcgtcggccattccgtaattaggcaagtacaacacactgtcatacaattgtgctgcatcatctactgcttttgttgatgatgtcgaagctgctccgttgaatgatcgcaatgataatggccagcccttggccatttgccaaaagtttttttccgaacttttttctaatttgtctctttccattgctttttcttccaattttttgaacattttttccattaatttgtcaaattttgcccgtgccgatgactcaccactttttgaattttgcccaaacttttccttataataatccaaggtttcctgctcattttcaagttgaattgtttcggccaatgtcgaatcatttctttcaattaatttcaattcataaatacaaaatttcgaaaattttgccattaattccaatgccgacattaatgacatcaaaattgatatttgaaatccaattggttgcttgaaaattggtttcattatatcctcttgttcggcataaacattgaacaaaaattcgtaaacaatgcacaaataattttgaaacagttgacattcctctgggtcgataaattcttcaaattcttccctaacattggcacaatgccaattctttcgcatgtaaaacaaaatgcctagatgagtgccataaatttgtgccaacagttctttgctttggtcattagtgaccccttttccggcgcaaaatttgtcaaaattggcaggtcctttcacgaaggcaagaaatgcttcatcgtcaaactgcaattaattctcaattcaaatttttttgaaagattctaacaatttcgctaatttttttcaggccttcttatcttagaatataattaaaaaacgcctgcgggcaataatttaataaattagtaaaatggccaattcgtctctattaaacttaccgcaaacgagttaacaagtgagaaaagggagaaataaataattaaaggaagaaataaagaataaaataattcattttaatgcgttgggtggattt

SEQ ID NO: 26144 - DNA, 1631 bp, Heterodera glycines
ccaacgggaagtccaagcagttcgttctcgttgtgctggtccaactccacctcctctcccgctaatgaaagagtgtcgttgtctaaacgtcgagggagcatgttttggagaacaaaattttgagccggtggtgcaacggggtcccggttctgattattgggactcgaagttcgaattgggacccgaagtgagctaaaagctatttcgcgccgatgattttccataaaaacggcggctggttgaaaattcggcgacgcttcgaagttttccgccgcgtaatccgtccaatttgtgcgcaatccttgctgatgtgcgacgtttatctcgttgtcctcaatttcgactgcaactccattgtctaacagacgacgcaactcctgtcgtgtcatataccgacgactgttttccattgtgaagagaagagaagaatttgcaagtttctacaagaatgcttgctgctgctttttcttgtacacttctacaagaaagtgcacaaatgttgggcgatgggacgatggcgattttgtagtttttttttgatggtttgttactcttctacaagaatgagtaacaggcgcgtcaattgatgactcctttatttctctgtcgaatttgtggtgtggacaattgctaatagtccccgaattgttgttgcaccaccaaatcaatagaaattaatcgaacaaactctgctcacccttgtccaggagcgccatgtcgtacttttctggtgcgaaatgagatgtcggtgcggcaatgtcaatggaaagcaattagggataattcgactccttttgaaagcaattcacttttggttcgactttccaaaattccaaactcagtcaattggtggtcaaaaatagaatccaaattatatttagcacaaaacaataaaattaatgagaagacaaccaaaaaacataaaacataatggtccaaaaactgagaaaagaaaataactaaattaaaagagacaaaatgccacacaatatagcactaatttaaataattatccaattatcacatcccacccctttaaaatatcaacgtccctgttgagaatgaaaagtcaagagatcaaaataaatcaaaaataggcaattcggcagagtcaaaaaggctttgggtggcggatgagcagagatcactgttgtccacgtcgagagctacgaaactgatcagaaccacgacgtcgccaagacgccgaagcccattccgagcggtcgcgtcgacgccattcctgctggtgtccttcacgattagacgtttgaagagatggacgagaaaagctgtgccgacggtggtcgacaagaccaaacccgcggctaatgttgggacggcggcgctcttcagaagtactagcaccaggtcgcacaacttcagaacgcggtcgcgggcggcccaattccttctcaccaggaaatttcccaacttcgtaaatccatgccatcattgtcttcgctccatgttcagtcaagagtcccgactggttcactcgatttcccgcgtttgttcctccatagcgaaacacttccatgaggcttcttccttcttccgtcacagctccgaaccgaaatgtgagtgtcagtcgcagagtttgggcaagcgtcgaacgagttcgagaaattgag

SEQ ID NO: 26145 - DNA, 1505 bp, Heterodera glycines
ccccccccctaccgggggcaaaatcatcatccgtctgatcactcacttccctaggccatcaacaccctctctctccctctccaacctccccgccccaaactccgtcatatccgtcagccgcctttgccgcggcgatattttgtgagtctgacggcgtacggtaatttcgagcagatgagtggcggcgatggtcgtccaatttcccctcctctgcttctgctgctgtcatttcggcctcaaatataataaataagcttcccccccccgggcgcctcggctaaatgcttttcctcggccaacaaaacgccgcgggcaataaagtcacttttattgggccgtaaaagcaacttggaagccgagcggaccctgcacatttcggtttcaatcgcaactcacaaatgttgccattttgagtttttccccgccggcgatggtccgtcactttttttttggcttaacttttctcctttaaacaaattttctctgggggtaatccgtcgcgcggtcccccgcggcgatttaatggggcacgactcggcacattaaaactttgtgcgcggatggcgacattttgggcggacaaacacacaaataataagcggttttgaatgggggggggggagggaatgtccgatcagtgagggcaattggatgtccgaccgatgtttgttgggatggcgcggcgtttggaggtgtcggacgaaaaaagcaaagagcgcaacgaattgaatggatgcttcacaatgttacggtaaaagtgggtagggctacggtagggcaactcaaagtacggtgggccaattcaaagggcgacaaatgccaatttaatttctctgccttcggcacattgttcaaatgcttgttgcttcaagtttggccatttcccttctcctttctgtacggtattacaaatgattgccattggcaaatgaatgaatgaccgtcaccccctagggattttcgccattcattcgccgccgttccgctcaaatccgtcgaatgatagcgatctgtccggcgggcagtcattcagtcagtcggccattacatatcatttcagcgtcctcctcggccatccgtccgtcctctcaatcaattggccatactttgtccgccatcgttcctttcccaatcaatctccccccccctttttttccccttttccctctccgttttccccgggtgtctcccaacttttgccggcgattttgggcttttgttgaggttggatggacagacgaagtccaattgacaaattgacttcagtttaagttttcgcttaaccttcggggggaagagcatccaatcgccaaaagggacaatttttggatgagaaatcgaatgagagctgaatttttttaatgagtctaaaatttagggaatttgtcgcatatttttgcttttcatttggcccattcgtcccccgccgcttgagcagcacaatctcatcctcttgcacatctctcgaggctttctcacgagcggaattttatctgcccgtccgt

SEQ ID NO: 26146 - DNA, 1232 bp, Heterodera glycines
cccccccccccccccctcacctccctcccgttcgaatgatcgattattttattttctatttgaaataaaaatatgaataaaatttaaattgttaaaaaacatttaattccttacccttgggaattttgattttttaatctttcttttttttcataattttcgacttgtttgcattttctgagttttggcgatttcggattttttggctatttttttttggatttttatgattttttgcgatttctgatttttttttgttattttaggaatttttacgaattctatttttggcattttttaccaatttatcattaatttttatgataagcaaaatatgtatagtccttaacttaataataatgatgggtggaattactaattagcaaattttgatcattatgggaattctgaacgatccttcaaatatatttgatatttttttcttaattattttaaaattgaaattaagagtattttacctttataaattttttataggcataaggaatgtgtaattatgctcgtaaaaattttttggcaaagttctaatcatattttttcgaagaaatgaccaataaattttcctcaaattatttttattcaatgccgatattttttcaaaaaatttgaacaaatatcacaattatcgtcacatttggctcttaattttctcacaacttcctttttcattttgtctgactttgttgtggctcctctttccctttttgacccttgtgaggaggaactagagattgagccacacgtcgatgctgtgagggcttggcgagcattttcgcgttcctcaggtctttcgattcctagtcggttatatgcccgtcgtacatgttcctgagtttgcttttgtgttgcccacgtgtttttttgagaagaggcagagcgttccgatttgtcactatcgagttgctaaatcggagaagagtgttaccccgaaaattttatttgatatttatattacatccaaaagactcctcatcggggttgcttcgaccggaaattgctcctcttccgtgatttgaagcaacgggctttcggaaatgtctgagaaaacattttgatggtatggcggttctttaaagaaaataagattaccaattttgataatttaataagcaaagaacgaatttgtctaaaaaacagggtaataaccggaaaaattttggggtaataggattaataagaagtttttcagatttttatttgggggactggtg

SEQ ID NO: 26147 - DNA, 1239 bp, Heterodera glycines
agggcgcgaagcggtcaaattccccaaaaaattaaaaaacgggcgcgaagcgcccgtcctgaggccgcgaagcggccgaatgtcccccaaaaacttaaaaaacgggcgcgaagcgcccgtcctgaggccgcgaagcggccgaattccccccaaaaattaaaaaacgagcgcgaagcatccgtcctgaggccgcgaagcggccgaatgttatcaacaaaatcaaaaaacgggcgcgaagcgcccgtcctgaggccgcgaagagcccgtctggccccacaaaattaaaaaacgggcgcgaagcggccgaatgttatcaacaaaattaaaaaacgggcgcgaagcgcccatcctgaggccgcgaagcggccgaatgttatcaacaaaattaaaaaacgggcgcgaagcgcccgtcctgaggccgagaagcggccaaatgccccccaaaaaattaaaaaacgggcgcgaacgcccgtcctgaggccgcgaagcggccgaatgtcccccaaaaaattaaaaaacgggcgcgaagcgcccgtcctgagtccgcgaagcggccgaatgttccccacaaagtttaaaaatgggcgcaaagcgcccgtcctgaggccgcgaagcggccgaatgattaccacaaaattaaaaaacgggcgcgaagcgcccgtcctaaggccacgaagctgccgaaaattcccaacaaattaaaaaacgggcgtgaagggcccgtttggccccaacaaaatttaaatcgggtgcgaagcgcccgtccaagcaaacaaaattaagaaacggacgcaaaagcgcccgtctgaggccgcgtagctgcaaatgtcgcctttaaaattttgaaaaaacataagcctattaaaattttgaattttgaagccgagcatgcactagcaacgaagtcctttgcgcgaagcgctcatgtcagcgcccgcccctatataccaaaagtatactgtctacaccgagcaatcactgcgccacccgctagtttatactactatagagaaacgttgcagttcgtcttaaaaaacaaaatctcccggccgaaggccgggagcgccctgaaagtagtggatgggtcttacaactttttgaggcgcatctgggaaaaataagggttttccgctccggtggccaactgagtcccggcggctgatttctcacttttgcttgcgtttgatggcccataactttttttctaaaactctgatcaaaaaatgcttgctggtagga

SEQ ID NO: 26148 - DNA, 1349 bp, Heterodera glycines
tcattttcaccttgatgtcgccctgtcggactttgtccgcccgttcagtcaaattgttggccaactgcacaatttgttgtgcactctcattcagattctaaaaaattgttgtccaaattttttaaattttccatgttttgtaccttaaccccctcctccgccagattgacttctgtgctgacgcgggtcactcgttgattcttttccgccaacatttcccgcgttgtgtctatttgcttttgcaggtggtccatctgtcgacgaagttgttccatgtcttcctgtttaaaggaggaaataaatgttacaatctcgcgacgaaattactccaatatagaaaaaagatatattttttgcttacttttgttatgtttatgccttccatgcgtcgtttcacttcaccaattttattttccatctcaacgaaactgtcatcatattccgaggaaattcctgaaagtaacataaattaaaaatttttaccgggtttttcacaaaatttcacaccggtgtcctcaatgttattggcacggccgatcaatgtttccaactcttggccaagtgtttgcaaaattgcgtcccaattgtcaaagcattcaccgcacgcttggcaacgaggccacacaccagtgtaactgttcaatgtgagtaaattttcaaaatcattttttaagttaatctgtggcgttatgttcaccctcgtgcgcattggttacactttgggcctccactgcccggtttgcacatgcagttccccgtctgccgatcgcactgcaacgtttgcgacccataggtgtcgcactcgcatggcatgcattccccagccagtggattacctaaaaaataataattggccaaaatggtttttttttcattttttgcaccccaataaaagtcttggcaatccgcgcaagttcgtccccctcttccttgcttgcaatggcattgtccatcaatgtcgttacacttaaaaaattattatttaataatttagagaaaaataaacggagcaaggatgatcttttagacgattttcattcttggtactgtttgaaagcgcttgttaaactttattaatttaaaaattaaaaaacaattttcaacacgtataaaaaaagtcagggccaaaatactcattaaacgactgacttttctaactattttgcaaaaaaaaaaaattcttatttagttaaacagcagatggtctagaaaatcgtccagcaaaacgttttgttaacaatgaaataatttttaaaaataataataataaaccaaccttcaaatatggttcacccgtgcttgggtcatgttcacgccgttagggtcacatgcgcacgccgaacagcctg

SEQ ID NO: 26149 - DNA, 1849 bp, Heterodera glycines
  unsure (1)..(1849): unsure at all n locations
gaattggatgatgagggttataaaaataatntaataaactttttgctaagatacggttacggtttcattcgaatttgtgttcaaataccgagatttttttggcactttgtatttaaaaatctgaagcggattaattcaattttttttctttatattcttagtttgcataataaggaacattttcatttttttgttaattttcctgtccaacgggaaatgcatttgtacctcagttaaaaattttattttttatttcatttttaaacattcagacactcgagtgtcggcaatataacttcacctcaatgagccaatgaaaatgcccaggaatttatttcttattcaaatttgggaaggaacatttttaaattcgctaaaaaatttatataaggaaattaaaaataataatttataaatataatggcactaaacattcgatcacataaaaagagttaagtcacaaacaaacctaaacaaagccatctatcataaatataatggaaaaaattagagttgaaaaaatgattgtttggtctgccgccatccaaaacctttatttaatgacgaaataagacaacaacaaaacgataaactaaaaagcataagatgttatcaaaaaaattttagaaaatgcaaacggcactaattaagaaaattatgacttttcccgatcaaatagtcattcgctcaaacagctcgtagcagccgatcataccattaatatcttaaaaagcaaaaaaaaaaattattaaaaaagagagacaatcattaaattacaggcgtccagaaggcccaaagccgaagcagaagaacgcgacgactgacagcaaacacgaaccaaatccgaacatttattaagcacccaaatagcctgtgggaaaatataagaaaaatttagttaaattcaaaaattttaagaagcaatgttaaaaataagaacaaatttaaaaaaatccattggtaacttacgtaattgtcctcttcatcaaaactgagatccgttagagcgggcagagctgtcaatgatggaaccgattcagcgaattttttcagcccttaattgggatcggacccaaatagaaaataaaaattattataacaattatttagggagaattttggcaatttggccccaaaaatcgaaaatttgataaatttaagcataaggagtaattttaatttgtctgaatttgattaaaaaggtctaatttatttgatttgttgccttgccattgaatgcgcgacacgtagctgttgttttttgttgttcatcttcgatcccattgatggcgttgcatagatgatcaatggactccttgcataattctacctgcgaaaattatttatctgattaatagtaaattaattatttaaatgaccatttttttcatctcaattagccaatcacccattttttccagcaaaaatttgtcaaatgaaaatgacacgcggtaattagcccattttcggtcaaattttgcgaaattactcagctccaaaattagctcggctggcagaatttttggcatttttcagctatttggaataattttaagtctgcctggaatttccttgaatccaccacaatttaggagtttatatttgtggtaccgccttatcatccatcagtcggctatctcaagtaaaagaagttgtcaaaaaatgaaaaaatcggtaaaaatcaaaaaaggaggggcggtcaatccgattattttatctatttataaaatcagagacacataattaaatgactaaccaaaaatgtgaatgttatctcaaacttacttgttgctctttgttgaccatattagctataatagtaaatttcagaatgagaataatagaaaaa

SEQ ID NO: 26150 - DNA, 1335 bp, Heterodera glycines
  unsure (1)..(1335): unsure at all n locations
tcggcccgctgtgcgactccccacgcgtcggcccgctgtgcgactccccacgcgtcggcccgctgtgcgactccccacgcgtcggcncgctgtgcgactccccacgcgtcggcccgctgtgcgactccncacgcgtcggcccgctgtgcgactcatcctccacncagtcccgctctgtcccgtctttctcctcgggtgttctgcgctntaaagcgcttaacgcggaaaagatttgtaattccaattggaaggcggacgtgggcacattcggtgaactgacgtaacttatcgcgtcgtcatcgggcccatatggcacgtgccgccgctcccttcgccaacggatgacttaaaaatttccatttttctaattaaatgaattacgtgagaaagtcccaattttcctttttctttttaaacaaaaacttctctaatttaaattcctttttctattttcctaaaaattctttaagtgtaccaaaatttctttttaaatgttcactctattcactgaatttttgccaatcccataccagtcccgggaaagtttcgttttggcgccaaagcaaaagcaaaaaataattaaaaaacaaacaccagcagatttatttaaaaaatattttgtaaaagaaaaaaatatgtattcttttccttaggattcttttttttctgaaaattttcttattttaaagcatttgttaggtaaaagcatgcaattatgtatttacagctttttatttggtataagaatgacataataatgtatagggctcggatttatagttgctaaaaactgccaaaataattaatttttagtttctaaaaaacccccaaaatagttactaaaaatgggtaaatagttgctaaaaagttccgaatttaggggtgtaaaatcgaaaattttctttaaaaaggtaacaaaattattcaaaacagtattgagataaataatttttaaaatcacacattcttgtcaataaataaataaataaattttggatatgaattttcgagaaaattttcatttctcaggggtgtatttttgaaatttccgggtcgattcttagtggtgtattttttgaaaaaaaattttaagttgattcttaggggtgtatttttcgtttttattgcatttttgttaacaaattttggcaaaacgccaaaatagttgaaaatagttttttttcaaaaaattatagttttttagttgctaaaaataaaaaactataaaatagttgctaataactcgaaaagtagcttaacaacagccgaaaaaaacatgttttttcgcgcttttcaggctacggggagctcagggaaaaaatagtgaaaaaacta

SEQ ID NO: 26151 - DNA, 1679 bp, Heterodera glycines
tttgtttaaactcggcatcatttatatacctgagaattaggactccgcccactttaagcagattaaatttacccgctcaaacccaaaatcatttttacaaaatgtcatcatcatcatctcccgaaaaaattttggctcaaccttcgtgcccaaaaaaggcaaaagtggacgagcgagctctgtggaaaattttcaaaggcaaatacatgctagcgatttatctctgcgatgatgactggcggaatctgttcgagaacaaagagaaagttcgccgaatggacaacgaccgtgtggccctaaacttcgaaatgtgcgaaaattgtgctcgtgtgaattgcaacggaacggacatattggctccgtcaaagaaacgaaaactttcaaccgatcaagcttaatgatatcatgatacctttcttttattattattattatgtgttttgccctcaaactaataaaaaataatttaattcaatttgcgcaatggtggcagggggtggggggagggaaggtagccatctgtcggcagctacatcgcatggttgttgttgttgttgttgttgtgttgttcggcaaatatccacacacactctgccctcatccttttccttccttatttttgcattttatctcccaccctcttcacggttaataaaaatgagtgcaaattccgcatcggttgaaactgaaattgcgtcactgaaacaaattattggcgcacagtccgtaaaattgatgcagatgcgtcatcattttgtgaactaccgcttcagacttgagcaacttgaggcttgggccggggaagtaaggtattcaatgttttttgtgatcacaatttttaactagggtaaagacaaaaagtttgttcgttcaccaacacgcaacaaacgattttctgtggacgacgagccagcaacatcggccgcaacttccggtaagggtagtgtaatattactgggaacagtgcgctttttcagatgggatggcaatggaaagcttgaaaaaagattttttggaggccaaaatgaaggtacttgtggaagagaaggtggccgaggcaaaagaattggcagaattttccatctctgatgcggagcgcaaaatgaaccaaagtttgaacaacgcaatgcgcgttggacgtgaaagagaccatcatcagttacgctgtgtagtggaggagcaacatatccgctgccgtctccttaccctgcaaaactaccccgtcgccacaatgacaaagctcaacatcgagttcgctacctcgcgacgtgtctcccaaacgggagacgcatcgcatgttttgtctgatagacgacccgatgtttgggagtgaatggtgcgcacatgtgaatgtgtgcgctgaatgctcgatcgtatggtcagtgggatgatcagtgcaaatgtttggcttgtcgatctacatgtaataagtttgtctatggtggccataatccatccccctaatcttttgcattttcctttcattttttagtaatgccatttttaattcatcaatgaaaacatgatctgaagcatttttattaaaaaataagaaatgggtaaatgttaagtatcggatggcaaattcaaccctcggacagcaaaaaaaaaatgagcacaatgttaaccctcgggtggttcgtgcatgcactaccgtccaaacgcctccaagcaatttt

SEQ ID NO: 26152 - DNA, 1879 bp, Heterodera glycines
  unsure (1)..(1879): unsure at all n locations
cagtagtacctatgaatttaaattttctatgaatttctatagttttttgaaatttttttaagtgcaaaagtggtggtgtctgcaaaaaattttcaccgggtttaaaaaatctaggaaaattagtaagcatttgtagtgttccgatacgtattcctgcataatttggtgagcccctgatcaattacaaattatttatggacgatcaaatttttagaaatttttatttatttttgcataattaattcataaatatttttttcagaaaatgctctgaaacgcaccaaattttatttacatgctagtttaggcactctgatgctttttctatcaaaaagggagatgaataaatttttaaaaatttttaattcctttttaaacaggccaaaaagtttaggcttaacttttttttcagaaactgatcagaagcgccccaaactttgcagggatactgaaaggaaaagaattaacctgttttatcacattagcttgtcatcagtttttataaaaaattttcaaaattctgagtctcctattattttatttttttttcaaaattttgaagggcggagggggggcgaaggcccaccacgaggccgcgaagcggccgagtgagtacctcggtgcatgaaaattattaaggaagagagttcattatttgtttattttttgcataattaattcataaatattttttccagaanatgctctgaaacgcaccaaattttatttacatgttagtttaggcactctgatgctttttctatcaaaaagggagatgaataaaatttttaaaaatttttaattcctttttaaacaggccaaaaagtttaggcttaactttttttttcagaaactgatcagaagcgcaccaaactttgcagggatactgaaaggaagagaaataacctattttaaatattatctagtcagttcatttaaataatttttatccaaaaaatttttttttgggttttcggggcagtccccctgaaccgatgcgcccagatttatggggagaccgaatccttccggaatagcttcactatagcctgtactttaattctgcgttggatttttgctccccataattgtttgagtaccccaaacggacacttgaaaaaatcgatttatttttgttttcggggcagtccccccgaaccgatgcgcccagatttatggggagaccgaatccttcgggaatagcttccctatagcctgtactttaattctgcgttggatttttgctccccataaatgtttgagtaccccaaacggacacttgaaaaaatcgatttttttgttttcggggcagtccccccgaaccgatgcgcccagatttatggggagaccgaatccttcgggagtagcttccctatagcctgtactttaattctgcgttggatttttgctccccataaatgtttgagtaccccaaacggacacttgaaaaaatcgatttttttgtttcataaatatttttttcagaaagtgctctaaagcgcaccaaattttatttacaacttaattttagcactctgatgctttagtatcaaaaaggaagatggagaaaaaattttttaaaaaatttttccttatattttggttatatcgttttgcttttggtggggtgcttggaacagtggaatcatgcgcacccgtccgatctggcaagttaagcaacgattgctgactagccaaaaggttcggtgccgtgatgaaacgaaccagcactgcttaccccgcggcacccggcacggtcccccgaaggaatggatttaattaaattctctccttcggggatttttttccattaggtcgtccgttagcgttcgattgcaatagtcaatttttaaaaatttttgttgaaatatttgtcgtg

SEQ ID NO: 26153 - DNA, 1968 bp, Heterodera glycines
ttatggcatagtttcctagcagattttgccaaaaataaatctcaacgaacttttggaattttactttggatgcccggcagaaggaacttatccgttcggcttcttatcaaattcatcggcgaacagccctaaggcaatttttattatggatttgttgattttgatttcttattttttcgagatcgacctggacttgaatccaggcctggatttttccaggatcctggtcccgtccatttttcggcaacctcgatttttcctggacctggcttttcctggatttttgtccatgaaatcaaggtccacgtcaaatgtgaaaaaaatccaggtccaggcaaaacaggaacaaaccttgattttcctggacaaaattttagaatttattttttcaagtgcccgatgttttttcaagttatcaaaatcagattaaataaatttaaaaacacattattattatcattattaattagatatttttagatacttctaagcaaataaataatttcttctatcattttctttttcgatttttaaaataattccaaaaattcccgctccaggcctgtagcctcatctcaatgacctttcatcgtccttggacctcaattgttcttccttctcctcgagcaccgtctgccaaagtttcacttcgcttttgatgagtgatgttgtgtcctcgaagtatttcttcaccaaaagaaaattgcttctgtacgctctcttttcgggcgcacaattggtgcactaaaagtgaaaatttaatttagaaaaggagaaacaatagaaggagcgaaaagaaaaccacaaaaagaatttttaagcaaatgtccgtaaattgggaagccaaatttgaatggttttccacaatatctataagctacataaaaggtcaattactttttcgcttaaagcgtttgtcgccttctttaactgatggactgcttcttgcatagcaattggctaaattaaaatgaaatcttagctaagtacgagaaagaaaaactaagtatttaaagtgagaaaaatttcaatttttgaaaaacagtgcaaattatacacagatgaatgacttatgcacttaagcgaccgattttatatatcaactttaatttgcctttggacgaaaatcgattagaaaaaggaaaaggcaatcgaaagtgaaaaaggcaaaatgatttaaggcaaattttttatttaataattggcttttgagtacggaggtgaaaagtcgtaaattttaagttttctaaaaaccattcaaattcggccccttttctaagcaattggtggttcgctgggggatatcctcccattaattaatcaatgtttgtgttagtgtggtgtctcccgccgcgcaactcaaatctgccaaaggaattgtttgggactgagaagactgcacgaaataaaacattttgccacaaataaatttttaacattttttaaatttttcaatttattgcgtcttttacgaccgatgagtcacgctaaaattagaaatgttcagcgggtttactattgttagttccttatcaaacctattttaattataaaaacaccggagaattttttcaacaaggcatatcttcacttttattttaattttgtttttatttgctgtatattttacaaaatgtccgtctcgtggggcactcaatactccaaactgaagacaaatcttcggctggctgcaaatcgactccgattgttgcagaagaaaaagactgagcaggcggtgaaggcgcgctgtgaaattgcggactttttaagcagtaattgaccattttagttaattgctttatttggaatggcttaaatttccctcgaaatttttatagaattcagcgctgattttcggattaattattcatccaaattttagcggacaaagaggacagagcccgaattcgcgtggagacaatcattcgcgaggattttgtgggtgaggcctacgaactgctcgaaatg

SEQ ID NO: 26154 - DNA, 1682 bp, Heterodera glycines
accaattttgcgaagtggtccagggccatgtaattttttttttgtttcaaccgtttttgcgacgcgctttttttaaaaaaaaactttcgacggaaattgtccggattagggcccacaaatttttttttgaccattgatgagattgattggttggttggacccacttgagccggtcactgattgtctccgcgctgcgctccatttgcgtcgcttgcgcaccgccggcccgcggaattggcatcattttgtgctgctcgtccggccccacttgccagtccaggtacacaaccttgtgtgagaaggtggagaactcgttggagaagcaaactttgtacgtgccgttggcctctgtctaaaaaggcggaagcaaataaatttgggtagaaattggtcagttttcgggtaaagcccaaaagttgaagaaatccgaatttccggcgccccctttccctaatttcggaaaatttggcccctatataccagtttggtataatctgaaaccttcaacaaaaaaaaaattcaggatcccaaaaaatacaggaaatcctccggcgtagacaagccaaaagttggagaaattcgaaatttccgtcccccgacctcctcaaaatttgacttatatacaccagggtttggcataaaccgaggcaaaaaaacctatacaggatcaaaaaaatcaggaaattttccggcgcaaaatattcaaatttcccaatccctaccccatattataccatttgggcaatgccaatatcatttttgatggttattctattttttcaaaaaaaattttttgtgttgcctgacaatgagtcggcagagtagtttttttgagtgttgccaaaaaaaattgataaacaattcaaaaaatgtgtattttttcaatccacatattttgaaaatctcaaaaatttactcttttgtcacacaaatcaggacaataattcagaaaaatggaggcaaacccacattttatggttttttaattttatgaaaaataaacctttggcattcgatttcaccggtgccatcactcactttgtacgtgtgggtgtccaactgtttcctggcctccttgtacaacactttgccattcggatcttctaacaccacatcaacatcatattggcctccagtgaccacctgcggaaaacaaaacattaacattcggatcaaacgatgcaaaaatatgacggaaaaaatgtgtctttatatttagatgggaaaattcaaaatttctaatatttattccttattttcgggatgttagaaaatatttttggggaaaacagcaatgaaaattcacagttaacacactttaaaaaatcgtaccggatttaaatccttaaattttgtaacctccgacaaaaaacttgagtatcccccagacatgaaaaatttttacaatcgtaccggcttttgggcactttaaatttgaaggatccataaagaaacttggtatgccatgattttaaaattgttaaagaaatttgaagaggttgtagtatcacctgaaattccaacgaacagtcaacatcctttttaatttcttcataaaaacattgatttgcattgtcgggcaattcaaatgtcaattcagtggccactgatgatggtgtgaatttggaaagcaaaagtaacagtggcaaaaagaggaccgaactcaaatggtatgccgtcat

SEQ ID NO: 26155 - DNA, 1348 bp, Heterodera glycines
  unsure (1)..(1348): unsure at all n locations
cagaagttcatcgccgatttcatcggcgccctcaaatttgatcccgagcnncggccgacgtttcccacgccgttgccnctcctcggcggtgngcacaatgtgagcggcgaaagcaccggcgattgccaatcgaaaaaccttaaaaatccggcaaaaattttaaaaattcgattcggcacggacacccaaaagcagacaaatgcctgccttaacacattatcagctgtaatcgccacactgagagaaagcggacaaaatgattttttgggaattaattttaattagggaccgaattttgttacacaaaaacttcaaaatcaatcacaagaaataatcatattcataaggaatttttgtaaaagaatgaaattttaaatttttcttctctaaaatattttggataaaataaaattttttaaaattttgttttaaataaattatttattcattctgataaaatttagtaaattttttaatattcaattaccttatctttttcatttctggtaaaaaattttgtattttaaaatgttaacaataagcacattttgtgtattttctgaaattttttcgggcgattcttaggggtgtaattttcatttttgttaagaatttttccgaaaatcctgaaaaaggcgccaaaaatggcgaaataggcacaaaaataggcaaataggcattataaaagtcatcgtagacaccccaaatcgtgcttatctatgcatattaagtgcgcaaaaattttaggaatttgcctaaaaatggaagccataataataagtttaaaaattttggatttgtttatcgttagaccgcaatttttcttaattgttttcgagttttgactgttgcctatttgttaagcctgtactaccaattttcactaaaaagcattagcaatttaatgcaatttctattccttttcagtttgtgtgccccaccgaaatcattgcgttcagtgaccgcgtcgccgagttcaagcagctcggctgtgaggtgatcgcctgttcatgtgactcgcatctcgcatttggtgttttttttttgttttcaatttttttgtactcgtataatttggtccatttttcttaggcttgggtgaacacaccgcgcaatgatggcggacttggcaagatggacattccggtgctcagtgacttcagcaagaaaattgcggctgactttggcgtgttggacaaggagaccggactgtcctatcggttcttttttctcggccaaattctaatcgttaattgaaaaaagtctaaactttccgcccatttcagcggtctttttccgattgaccccaatggcactgttcgacattgtttggtcaatgatttgccgg

SEQ ID NO: 26156 - DNA, 1398 bp, Heterodera glycines
  unsure (1)..(1398): unsure at all n locations
ataactgataatggggaagagttcgctgatgggcaaaacgacaaaanttcgagcagacaaacgacaatttggcgttacgagaaaaaaaattttntattttttttttgtctaattaggtaagttgtttntggcatttgttgatttgtctctattatatcgggttttaattattttttttttcgttaattttaattttttctcatttttaagccttaatntagtttcaaaagcgggttgatttctgttatgacaatttgataaaagacatacttttttatgaagaaacttttgcaaaaattttttgtttattgtatttataaaagatgaattttttatgaattaaaaattcaaatttttaaattttttgaaaagtgccgaccgacctcagtaatttcatttaaatttgacaaaatttaatttaaagctttatgggatatattcttatggcaaatttaactcgtttttggcatctaaattgattaattttcttggaattataatctggcaaccccatctcattacataattgcaacaccaataaacgagtttatttatttcaaattatatatgtatgttatgtatatggcatgtgattgttgtgtgatggaatatttggatgacttcgacgatggttatcatcataattattatcaatcattatcagtgatcggaaagggaaaattgccaatttgttctgccgcactgatcggaacatataaaattattagaaaaagaaaaggcggcactgatcaaatatatatctcctcatcctccgttttcaaattagatccgcttttgatgctgcttaaacatagctgacgtcgttgtcattggtgcccaaaaaggcggacttaaagcacgatggatgccgttgctgccgcctttcctcgttggccaaaaagtgctggtcctaatccaaaaaattgggttttaaatgggttttaaacattggcatttgttggccctaatcccaaaaattgtttgaatggctattgatttggtgttttgtcataggcccgtgaaaagaattttaaaaaatttaagggcggacgaaagtgtcggacggacaaccgttttatggcattttgccaaattttcaccattacaaacacacagcaatcaccaggctgccagagaccgaaaattttccacgggtcccgaaactctagacggaaaaaacgcgactcgacaagggcccgagagcccaaaaaacaagagagagttgaggtttgaccccaaaacacggcacaagaccccgggcagcttgatcccgagactgaaaggtgagaataatctctagtagcactaatgatcagtatcctctccactgtctgaccgagaattatannnatttcgatcagtcatcgctcgagtgatctcttctgatcagcgatcact

SEQ ID NO: 26157 - DNA, 1804 bp, Heterodera glycines
taaaaatcatataaaccttttttttggcaaaaaagagaaattggaaaatttgaattttctactttttgctcgaattcgggtccggggttctacataggtcgaaattgatgccggattcggattctcttaccctaaaacccctaatacaatcttttctcgaaaaaaatttcaaaaatttgattttttgaaaaagggggactaccatcggtactattaccgtatttttgtttaaagtgagtctagaatatcttaatttgctcaaaagtttgtttccctatatgtaagccatttcaggaagcaaaatgagaaattcgaaaatttgaattttctactttttgctcgaattcgggtccggggttcgacatacctaggtcggaattgatgtgagattcggattctcttaccctaaaacccctaatacaatcttttctcgaaaaaaatttcaaaaatttgattttttgaaaaagggggactaccatcggtactattaccgtatttttgtttaaagtgagtctagaatatcttaatttgctcaaaatgtcttgaaaatggttggttgtccaccaatcgttgtccgtaacgccaacactcctccgacggcaccgttttggtgccattggatcaacaacaaacgcagaggcatttaggtgactttatcatgaatagcttttctaattcatccacgattttaccgttgttttgaatggtttgttaaaatttgatgggacaaattttccaaattcaatgttaacatttgtgaaaatcgtcccatccgcctttcctttagctttccaccaccaccgccattttagtccaacttctccgtcttccgccatggcaccgtcttcctcctctgctgccgccatgacaccactcggcgtcattttggtgtccaaggacgagtcggccgagcgcgtgctgttcatgtacccatttgagcgccgtgtgtcgccgcactccgcccacattaacagcaggggtccgcaaacagtgggaggagcagttcaatttttcttcacccattctctccccgccaacaaaattgatggtggaaagaaattcttgtaaatattcaaaaatagaaaaacgctttttttgaagaaaccaaaaagtaaatcaaaaggtatagacgaggtaatccccatcccaatttcctatttgccatttgttataaaaaaattcagaaaagtgccatgagcacaaggactcagtggtgtcaatgattggtaaagacgtgccaaagttgggcggcggcggtacgccggacgacgtgccgtgccaaccagctgcaattgacagcggtgatcagcaacaacaacgtctctgcgacggcattgcgttggacggcatttcgactgggtcggccaaaaatgtaatttcgcaattaattttttaaacttctttcagttttcccgtcaaaatgttggcccctttgctcgtcgccaaaggctccaacggaaatgggacgccttttgatatcaaagtactcttttgaccaattgacacgagtatgaggccttataactattttttatataaatatttggtttttcctgccccaaggcaacatttttctttgaaattttattgttttccggtggacaatctccgttttgtcggctttccgtggcacattaccagctgtgtccattcgttggccgtcgttcattttgcgcggctccgccgaccgacacattgttgacgcattccaacggctcagcaaaaaaattgccattgccatcaatgtgacgaaaaaacaatggcaatgagtgaaatgtgctttcaattcacagaccgaacagca

SEQ ID NO: 26158 - DNA, 1897 bp, Heterodera glycines
  unsure (1)..(1897): unsure at all n locations
gaaaaaggcttcgcgcaagtcgacatcgaaaagggtgggaatgcctttaaaatttaattgtgccattttcgtaatcgacttaccaccccctctcccacatcgttcagcgaactcaccggaggacttgtggagcagggtcatcgcagcgtcgcagtcgttcaagaaagccgcgttctgtgagcaagtcgccgaggaagaagaaggctgcgcctggctcatccgcgcggaagccgtctcgtcgtcgtccacggaccgtgtcgcggcgccgtgccaccagcaagcgtcgacgcagtgccagcaagaagaagacggcgaaatcgtcgaagaaggatggagccactaccaccgccactggtgctgatgccgggacgacttcgacgacggcgacggacaacaccaacgcttcccagcaaagtgaacgtgagtttctggcgaaattcaagaattgggaggagtacgggtgctgatttcgaatctgacactttcaaaattcttaggttctgaagggagtgcaacggatgagtcatcgcgtggttctgaggcggaggcgaccaacaccggtgggacagcggcggatggaggtcgtgccacggagtagaagcaatggaagaacaccaacaatggatgatgacgaatcggatgagaagcgattttccagcagaaattaactgtattttttgtctccatcataattatatgttgagagtggccctctttctccaattgtttgtgttgtacaatattcatttcctataagcccgtgagatgcttgccacacctccgttgtatgaattccccctaatgtcagtcattctgatgttgtattgtcgatttaatcgctatgtgttgtctctcaattatgtttgctctaccataataaacgataaaggctctttcgtgacaaacagtggaaaatgaattggcactttgttataacttataagtaaaaggattaaggatatgggagggatatattttgagattaaggagttggtactctttcggtttgggtccgcctttcactcttgacgatttattcaaagtattggctcttcaagacaaagacttttttccacatacatttctgattttttgtggcgtaagcaatttggaggaccggatattttttataatttgtggacccaaatcgcggaattgtacccaataagcacataaagctcgtttatttgatatttaaagcaattgtgacaataaaaaaggaaaaaaaattgaaaaatttgaaaaaaaaaaaatggggatacaaagtaaattagtaccaaacaatacagtagtaaatcccagaaattgtctggcatagacacggctagagcgattattgtctcccacccatttttaattgatcgcttttaaaaggccaaaattgtcaatgttggcatacccgttttgcgcatttgtactcaaatccacggcattggcaaatgaattcgttgagctcatcagcagacatcagttgggtgactttgagctgctcaaacacgggcaacaactgctccaactcgcgctccacaaactcggccatccaaccaaaattaaatgtttcactgtgattttattaaaaatagttctccattaaacagaagccatttatcagtttttcgatgcttgaagggggaggagaaacaaagctaaaaaagaaaaaaatccgtaaaagtaaatactagagatcgacctgnactggatttttcctggacttttcccggcggcgcctatcggcaccgccggatctctacgctcgcacattcaccaagtttttttttttggaaaaatgtgccacaagaaaatatgttacaaatctgagttccaattttgcttgagtaaatcatgataatttaatatattaaaaaaacaaaaatttatcgtaaaaaatttttttttt

SEQ ID NO: 26159 - DNA, 1844 bp, Heterodera glycines
tttatctgaaaaactaacaggtattatcatttattatttaaatattaatcgtaataaaaattacaattatttagggacactttctccgtggcggtattatctctccgttctccgctggaaaattcgtctttttaattctcaccaccaattttattacgtcgggaataaggtattaaaagggtcaaattaagcatttgtaatattattttgttatggggaaatggacaattttgaacacccggaagacccggcgggacaattcgccttttggagtaccaatgaaaagaagcgaaacgcaacaatggcaccgttcatattttggcacacattccaatcggcggtaatgcggggagggggggggggggttcaaagaggaagttgaattaaaaaaagatacggaatttgtgggaattaaattcaaacagaaaataaaggggctcattgatttaaagtgtcaaatgtaatttaatcatttatttaaatgaattttaatttatttagcctacgaaatgtataaaacgaaccgcgaagattggaaaccggaaatgtctgggcgatacaatcagcggctgtatgaactttttgtgaaatacgccccatggattggttggatgctttttgggcatttgcacacggacacttttcgcattataaaagtggccaattaatgctcaattaattttaattgtttccaaacttttgcccagtcccccgatggaagtgccgttcagcgaatgtttctgaatccggcggtcactccgctgttcaatctcaacaaccccgccttccgaatttacgaatataacacgaaaagcatggaaattgaggacataaaatatgtttaaacttaatgaaataatggaagcaatgcttttcgttttagaactttttttgttaacttggaagcactgaacgcaaacggagccgaaattagcgaagcgaaatttgaatattcatttcgccaaacttatggcatccaatcgccgttaaatgcaaaatcattggacaatcttgtggagcggatgaagcaaaacgaaacactgtttgaccagtacttcaactactcctccgtccaatggatgacacgaaaactgaatgaaactgaaaggtgccaaaaaaagacggatagagggagggggcggggaaatgccatggcaaaccaattatcactaattgataaaaaatgcaatggattcaggaagtcgcatctttgtgtcgttgaattcgttgactttgatcagttggagcgatgtatcaatgcaaaggtaagcgattggaatttataaaattaattaaattaaatttttaacttcatttttcacagatgtctttgccttctttctacgtccttctgcttgtgggttctctttttgtcatttccgttgcgtttttggctgcttttttctttttgccttacattcgaaagaaaatgggcaaaatttgaatttatttgtaatttaaaaaggcattcttttcgggaaccggccactttggcgcaggccattttggcgcaagactctatatcattttgatttcacagcaaaattaaataatcttggtatgattttaagtggcttgatagtgcctattaacctgcaaagtttcaaaaaatttagctgagaaacaaaaaagttatggccaaaaaacctcaaaaatgcattttcctggccattttggcgcagcgcgccatatcttttttaaaacctaatataattttttgaaattttgcaggctaataaagaacatttagacctattgattaatatcaacattattttatttggtcgaattaaaaaaaagttatgaatctttaaacttgcctgcgccaaaatgaccccgaccct

SEQ ID NO: 26160 - DNA, 1269 bp, Heterodera glycines
  unsure (1)..(1269): unsure at all n locations
aaatgccacagctttccctgccctaaatttngtcaagccagttttataaagtgcagctgttcgcgttcattatacgcacaagntctggtcctgcctaaaaagtggaactcaaagacggaatatactgccgtaataatacaaacccaattattctgctacaattctaaaatttatttatttattgtatttgtaattaattaaggagtcaaaatagaaaatagcgcgatgtttgaaggataactttctagaaatgcgcgatgttgaaggataaaaatgccacagcttttcctggccctaaaatttgtcgagccagttttattgaagtgcagctgttcgcgttcattatacgcacaaagtctggccctgcctaaaaagtggaactcaaagacggaatatactgccgtaataatacaaaaccaattattctgctacaattctaaatttatttatttattgtatttgtaattaattaaggagtcaaaatagaaaatagcgcgatgtttgaaggataactttcttaaaaatgccacagcttttcctggccctaaaatttgtcgagccagttttattgaagtgcagctgttcgcgttcattatacgcacaaagtctggccctgcctaaaaagtggaactcaaagacggaatatactgccgtaataatacaaacccaattattctgctacaattctaaaatttatttatttattgtatttgtaattaattaaggagtcaaaatagaaaatagcgcgatgtttgaaggataactttcttaaaaatgccacagcttttcctggccctaaaatttgtcgagccagttttattgaagtgcagctgttcgcgttcattatacgcacaaagtctggccctgcctaaaaagtggaactcaaagacggaatatactgccgtaataatacaaacccaattattctgctacaattctaaaatttatttatttattgtatttgtaattaattaaggagtcaaaatagaaaatagcgcgatgtttgaatgataactttcttaaaaatgccacagcttttcctggccctaaaatttgtcaagccagttttattaaagtgcagctgttcgcgttcattatacgcacaaagtctggccctgcctaaaaagtggaactcaaagacggaatatactgccgtaataatacaaancccaatattctgctacanntctaaatttatttatttattgtatttgtaattaattaaggagccaaaaatagaaatagcgcgatgtttgaaggataactttc

SEQ ID NO: 26161 - DNA, 1312 bp, Heterodera glycines
acttttagtgaaaaaactttttttttgctctattgttttgaagaaaggagctcaaaaaacgcatttctgcattaaaattttttcatttggacgtcacttttcgtcactagaaatcactattttggcgttttgtcactattttttcactatttcaacattttttggaaaattccttaacaaaaatgcaataaaaccaaaaaatacacccctaagaatcgacctaaaaaaatttcaaaaaatacacccctaaaaatcgagctaaaaattttcaaaatatactcctatgaaatgaaaaaaaattttctcaaaaatttactttcttggcaaaaatttttaattttaaaaatttttttaggtaactaatttgggttttttggtcttaaaaatcccagtcctactcatttgcaactgcaatcagtgaataaaaattattttggcttattttttggctgaaaattatgtcactattcgtcactatttcggactttttgtcactatttcttcactattttggcatttttactcactattttagttaactattttgggatttttcgtcactaaaagttgcggccctagtcattagcataggtaacttacattggcactctctttccactcattggaacttaattgcatcatgttttttatctgcccaaattttttccggcacttattgtagattttgagtcgacaaaatattcgattagtgattacttttgataatttaagtcgggactcttgatttgcaaaatttttttttttgaaattagttaattaaacacatttttaagaatgctgatcattaatatgctaattgctttggtcatttttgtttttttttaaattctttttccaaatctaaagttgtttccccattaaattagcaacgaaaaacttatttttccaccctaatattttttttgtcaacctctaatctacagaaatgctttttttcctgtataaaagcacttggaaatcgtctaagtctatcactttcgactctttttttttgatgaatctactcactctccataatttcccacacattttccccaaataaaaagtcatgcattttcgcgccgccgttttcgcgcgtagcccgagtttttggattcgaacttttttctttgtcggtcaaatctaacaatcttggtatctttcgaaagcccttcacaagctctattagcattacaaattgcaaaatgattttctggcaaagttaatagaaaaatttctaaaatttagatttttttgcaattttaagttatatctttttttagcaattgtctaatcgacaagcaattgttag

SEQ ID NO: 26162 - DNA, 1704 bp, Heterodera glycines
  unsure (1)..(1704): unsure at all n locations
attaaaaataatgctatatttaaaattaaaatttttttaataattttaatatgcaactttttcgtcattcaatttatttacaattaaatatttttgatttaattaattatgaattttaattgtaattttaatattattctgactaaataatcgccgctgttttattacttaaatacatttcttgtttattgtgatttgctttttaccaaatcaataaaaatatagtaattaatatagaagaatatttttttctcgttaaataagaatataaacatgaaaaaattttaatgcttcaaattatttgtatacccatatgttaaatagttgatgaattgggaaggaaaaaaattccttgtaacaattatgcttttgggcaataagttttgattttttttctattactgtaaagtgcattgctttaattaaaaaaatatttgtatttttcggcgtttaagaaaataaatttaaaaaactattttaagatatttgacattattttttaaatttatatctttttgtttaatttttgccttgctctctctatccagtgataccaaatttataccgactttttgactaacagttcgcgaggttcccttattagctatgtttctaaatttatgttccaaaaataatttttacgttattttttaagtcattgaaaaaaataaataattccattcttgatttcttggagtgtttttttaagtatgttgattttaggcaaatatttttacaaatgagtttatttaatattcttttttcaattagagtatactataaaattagttaaatcagtaatccctcttctttcatattaatattttaaacaattattaatttatttatatattagcattagttaattaaaattaatgttaaaaatagcaaaatatattttactttatattataaacttgttccacaaatgatccaattccctctcaagcaaagttctcatgaattcattaattgttttttttaaacttttatctgaaagctaatataattacaaatgaaaataatcaaattatcaaaataaaatgttaacaaaaagtatttttaaaaattaaataaaaataatgataaatttagctgatcagaataagtaaatttatttgaattaaactctatttttttttctttatccggtctaaattagtttgaacaaatatctgaaataaaaagatgaataatagaaataaataattcaaaaataaatatcataaaaataaaaaactttttttgacataaacaaattaatacagaaaatttaaataaaatattaaaattatcaaactaatattgaaaaataattaaaaaaattaggaccttggagaattaattgtaaatgtatttgaatgaaaataaatttgacctttgaaaaagataaaagaaaattaaaaaattaaattcttatgtttgattttattttcattttttaaagaatttaattgcccatcaaaggtccgacgacgcgaaaatcataaagcccaacgagttaattggataaaaatatttttttgaaaattgtaaagaatatttactcatataattatttaattttcataaaaaattaataatatcgatgataaaaattgtattacaatttttatagttgccaaatgaataaaaatttttaaataaatcaatcgagactaacaatcatcttaaggatgacattatatttagcaanttattcat

SEQ ID NO: 26163 - DNA, 1977 bp, Heterodera glycines
tgaattttttagcgtagcaacagtagacgttttggtttttttttcatattttgtagatttttaatcatatttttttgttcaattttaataaatttatgtaaatgcaaaaaattaattaaaacaaaaagtatatattgaaatataaaaaataaacattcggttaaatggcaataaaaatttttcttttaagaaattaattaaatcggattcattgcgaggaatagcattacaatctaaacaaagcaaaacatgttggaagaagccggatgccattgaattggttcgccaattttcattccataatattgtcgaaagaaattttataattgccaaaatgttggagagttggcaaaacaacggaatgccatccatggaacagtctttctttatcaaggcatatttcaagcaaatttccataaaaatttctgaaatattattaattgttggcggtagattggaacatcccgaaatgaatattttcgcaaattacggatttaaaatgcaaaaatggcagaatgaaggagtgtttgaagaaaaaattggcacaaattgacgaaatgccaaaattggtccgagttttttgtacatttttcactggacatattgatgccgataagttgattgatgctctgctacactcgggctggtccacagttttcaacgctcaaattggcgaaaagaaacacggaaaaagcattttggagaaatttaacctggaaaattaaaagaaaaattggattgcaaagaaagtgttgacaagtatcactcgttagttgtccttgtttttgcttcattttcagagaaatttcattaactttttaagcaatttttttggtgcttttagaccatacaatcacaaaactttgtcatcccatgtgatcaattagtgatgctcgagagcgaacattcccttttctcgaaggactcgagactaacacaaaagcacagccgactgaccaatcataaaatggaaaacccaaaaaaatgacaaacaaaacaatagatttaatttatatgaattttttttgaaggttactaaaatattgtcccagctcctcatttcttaacagggtatttttgactgaaaactcaatttctttaatggcgtaaaaaagtctcgaaagccaagacttaaaaacccgtgacttgagccgagaacaaaacatccgaatcgaattgagtccgacactctcgagaatcactactgatcatcagacttcactctttctctttctctcttttttcaaattattaatcccactatttatcatatagtgtttttttcgcctttaattgttttcaatttttcggcgaataaagtttgttgttgatcaaatggccaaggattttagttattggtatttatgacccccggaatttggcgttttttagcagatataaatcccatccctgttcataactagagctgagattttttccatttgtatattttgtgccgatttactcctaaaattcttccaatttttgtctcaattttatattgggttttccagtgatattttccttttgtctacagcttttctttaattatttcaaattttctaatcatttctcttttttgttgatcatttggttaagctaaattttctccacccatttgattaacataatgaataaattccgaattttcctctttttgttcaattattgtctctttttcttcactttcatttttgtcccatcgatttacgaatatttcatcaaaatttggttggattttggcggattcaattttataagcaattaaatatgttataaatattaaatgccagaaaagcatttttaaattcgtatatttatgaaaaaaatattttttataaattattattataggaagaaattattattcacaaatatattatattttttacgtattattgcaacactatttttttattgttttgttaatctacgtataatgaaataaaatcaaagaaacagaactttgaaaattga

SEQ ID NO: 26164 - DNA, 1287 bp, Heterodera glycines
  unsure (1)..(1287): unsure at all n locations
ttttatttccatgaacattgaacaataaatcatcccactattagctcaggtactaaaaatcagctcattatattcccaataaggttcagaaacgcttctccgaccctgaaaacccataaaatgactatctcgtgaacaaaaatttaaattttttttctaaaaaaaggggggggggtaccatcggcactatgagaataggacaaaagtgatttcggcggcgtgattttggggtgcactctggcactattaccccaaatatcattcatcagagaatggtgtggcagattattatgacaaaattggcttaggattggtttatttgcgaataagtaatacatacaatttatagcttgtcagggaggagaaatgaagtgaaaattgatgtgctctcctctttcactgatcgcctctttctttttgtgtctctgaattctgttccgttcgtaaattgtgcaattgttgtgcgttcgccgtttgttgctgagacactccgccaaaccttttctgctgagtctgaatcggagaagagtgtcaaatacatgggctttccataccaaacattgaaaacgttggaatgtgtaatgcacaaattcgcctttgtcggttacggagggtgtcgaattgtcagaggcaacttccttaacgccggctaaaagggaaatacgaaaaaatgtctaaaagcattcaatgtgtgcacatacgcaaggccaaatcggaatccccaaagtggtcgaagttggaagtgtccgcaattcccttcacttcgatgcgaatgggggccggcaaaagcctttaaaaagaagtataaagaaccaaaaagtgagggaccttatgttctgccagtcgaccctcttaaagaaagggcactgtttgatgctttcaatgcccgaatggttgccgagtctcttgtcaacttcgcaacagaacccttttattgtctgcagaaagaaagcattaacaagtgcttatcgacagtcagaaaatttacattttttgcttcggttgaaataggtatttcgggcggaaaagcgagggtttgctgccaattcatcacttttctgtatgtctcctggggagtctctgagcagaacgggggatagcctgcaaaacgcatgaaaaggttagacaataccaaattattctttctgttcgggttgactgccaggccagtaaattgngagaggngtcaaaaattgctctgccctgcatttcgcccattccaatctcagagatctaacaaatttaacatttgangttgttggaatcctttgataacaatgcattacc

SEQ ID NO: 26165 - DNA, 1028 bp, Heterodera glycines
  unsure (1)..(1028): unsure at all n locations
aaatataaatttaaaatttttttattgcttttaaatatgccaaaaatgtaggctacttttttagtgaaattcgatcactcatatttttgctaatgagcagaagcgtaccaaactatgcagggatactccccggtaaaggactaacttacactgaaatgagcgccgagctagctggctcaaaaaaaattttcgaaaatctgagtctttcgtttttatttattttttgcaaaattaattcataaatattttttcagaaagggttctgaaacgcaccaaattttatttacatgttagtttaggcactctgatgctttttctatcaaaaagggagatgaataaaatttttaaaaatttttaattcctttttaaacaggccaaaaagtttaggcttaactttttagtgaaaattcgatcactcatattttttgctaattgagcagaagcgtaccaaactttgcagggatactccccggtaaaggactaacttacactgaaatgagcgccgagctagctggctcaaaaaaattttcgaaaatctgagtctttcgtttttatttattttttgcaaaattaattcttaaatattttttcagaaagggttctgaaacgcaccaaattttatttacatgttagtttaggcactctgatgctttttctatcaaaaagggagatgaataaaatttttaaaaatttttaattcctttttaaacaggccaaaaagtttaggcttaacttttttttcagaaactgatcagaagcgcaccaaactttgcagggatactgaaaggaagagaaaaacctattttaaatattatctagtcagttcatttaaataatttttatccaaaaaatttttttttgggttttcggggcagtccccctgaaccgatgcgcccagatttatggggagaccgaatccttccggaatagcttcactatagcctgtactttaattctgcgttggatttttgctccccantaattgtttgagtaccccanaacggacacttgaaaaaatcgatttattt

SEQ ID NO: 26166 - DNA, 1366 bp, Heterodera glycines
  unsure (1)..(1366): unsure at all n locations
gagatccatgaacgcgttttgcgcaagcgggctttcncaatttgccagagggatgtgttgccaagaatccaaatgccaaggctggtgccgccaaaattctggtcgatgcatggcacgttttcgggaaaagattaattttaaaaaatttgttaattaaaaaccccagttaatttgggttgaaaaaatttagggttttatttttttgaaattgagaaaatttttaattttttgactttagaatttaaaattccattgttttatttaaaaactttctgatgaaaattccttttaacaatatttttaaaatataaaaaatttatttaatattacaaacaatctttttatattttaattcatccaattaattaatttctaggagaagattcaaaaatccggcagctattatcgtttccattgtgcataaagaatacagctattggcattttctcaagcgttacgatgagtacgaaattgacgaactcacaaaatataaagccaaagttgtgtatttgactgtgttcgaatgtggtaattagtaagtggaaacgaaaattaaaacttttttttattttaaaattttctattcaaaaataataattttgtgttttgcaatttaaattatttttttttaataatttaagcctaacattggatgatgatttaacattgcgtctgaaaggtgatccagttgctgttgtgtacgcaaatgttgtgatgactggtcacaaaatgctgcccgaaacattggctttattcaaaatgattgaacgatcgacagcttttgtaaaacaattaaaaatcattaataattaatttattacataattataaaattatgttaaactatactaattaattatctaattataagattatgttaaatttattccttttttctccagtattcttcaaccgtatgtgctgatttgagtcaaacaaagattgttcagcaggtaaaaacgatctgtttcaattcattcattttaattaattgacaatttaattggttcttaatttgcatcatttaaaggtgcttacgcgaccgggaatggttgagaaatttttcccgagtcccggcgaagcgccaatggtcacagcaattcgaaaaactttcgccaaaatatgggcattggataatgatgacgatgacaccaaggccattattgcggtaataaatttaaaaaaaattttttttttaatagtaatataaaattttttagcaaaatgaaacttaaatgaataaaataaaatttaaatttatttctttattataatgagctcggcttacattgaaaggatttgggttncagaatgttttcggctaaattttaaacagaaaatttacgaaaaatattttttttgacca

SEQ ID NO: 26167 - DNA, 952 bp, Heterodera glycines
aatagggctgggatttttatgtgctaaaaatcctgaattatgtaataaaatatgtgctaaaaaatgctgaaatatgtgctataagccaaaaaaaatgccaaaatatgtgcgaaaatatgtgctaaaaattggaaaaaccaatggtatttttgcataaaaattccaaaaaactcattcttttcattttcgcccgcacaattgcaaataaaaaacatttggaggtgtttgggggtaaaattagtccttttttgataaattgttttaaagattatttttccatcagttgagtaagtgccagcaagaaacttcgatatccagtaacgaattaatggagaatccgattttcggtacacgaaataaataaagaaaatttttgaaagagcctataaaaatggcaagaaagttgatttttaggggtgcatttttgaattttttgtgtttttcttagatatttttttcaaaaatgccaaaatatgtgcaaaatatgtgtcaaaccccgaaatatgtgcgatatgtttttatgtgcgaaaacgccaaaatatgtgtttttatgtttttataagtcgctctaattcgaaaattgttcggagaaaatgttatttttgggcttctctcgccataactaagccgcaaaaaaaatatgttaaaacataaaaatcccagccctaattataaatgatcaaaaatgatttaattcaccaaattcgctaatatttgtatgatttaaaatttgcatgtacagtttatttattgtattaattgctcacacaaaacggtgagctttgctcggcgagaaagttttgtgattggttcatcctccgaagaggaaagctgacactgaaatgtcaaaaacaaattaattactattaaattagaatttgattttgcatttaatatttcacattttattaattcaatcgaatggtggtaaatcctgaactaacaaatacaa

SEQ ID NO: 26168 - DNA, 1521 bp, Heterodera glycines
attggagtccaataatccgtataaaaaaaattgctattttgctttttagttaattataattttgaaatatttaaagtaacaaaatttgtcttttcaaataatttttgaatatttttataaatttttaaatttttttaaaattataatgtttccgtggtgtttaaaaaatattgcttagaaaataattatttttttattttaatatttttcaatctcttctatcttctcttcattcatttttaaatttagaattttattttaattttgatgaaaaattattttaattaatttttaattaaactagtggataaattaatcatttaaaatatgtttttatttagatgggcaaagatttacagtaatattctctcgtaaatgaaaaattttattttgaatttttccatttttttaattcaaaaataacttccaatttgataaaaatatttaatgattaatatattttttgctttcatactgtacatttgcttttaattattttttttttcatttcaggcggatttcacatggtaaactcgcaattgatccgataaagacacaaaatcattgatcgcttaattatatagattttgtatacattaataatgctttttggttcgatcaatctgttatgcaatatttaaaaacaaatagtgtaatatgcgtattattgtaactttaaaaatattatttcgatttcatgctttttcaataaaaaaatttaattttcattactaattatgtgttgcaatttgtgatcttttgtttataaaaatcaataaaaaattaaatttaaatacaacaattaagaatatgaataatgaatttctaaatttctttcttaattttgtttgcatgcggaatttccttgtcgcagttcaaggatgattcaagcttccttctttctatcatttttctataataatatttcttattaatttttattcattattcacaatttttataaattagtttatttttattttttactctttcaattttcatacttttctttaaaactattttctacgagaaatgcacgaaaaacacaatttttgttcgaaaaactttcgttttaacgcccctatccgactctaggaaattattgaacttttaattctttgggaagtgccgaattgctttttttatacctataattaataatgcctagattatattatgcatcgtcgttatttatcgatgaaattataaatatttaagaatataggtttttaaattttaaatttttttaattttaagaataaattctgttttatttctattagatttttctaaattgaaaaaattattaatttgcattattaaattgatattcataaaactccaattaaatttgcaaacacaaaaattgtcacaataataacgtgttgtgaaaatctgatatttgctgttttcattatttaaattaaaaaacaaaatttttttttactaaaatcgtataaaaaaacaaaattgcaacgaattatttctttttttattttttacattcattttatgttctaa

SEQ ID NO: 26169 - DNA, 1548 bp, Heterodera glycines
  unsure (1)..(1548): unsure at all n locations
attaggtaaatccaagtccaggttcgtaatcagtggggatgggatttttagtgataaaaaaatcccaaaataattaactaaatagtgaccaaaaaatgccaaaatagtggcaaaaatattgtcgaaaaagttccaaacctagaggtgtaattttttaaatagctgtttttaatttgaaaataatttaaaattaaggaaaaagattttattcactgattgcagttacaaaatattttcttagcaaatattgaacaagaaaaaaaaatttgggaaaagaatttttgtgaaatttttccaattcttgggggtgtatttttcaaaatttttatgtcgattcttaggggtgtatttatcgtttttattgcaattttgggaagttttccaaaaatgccaaaatagtggcaaaaataatgacgaaacgccaaaatagtggcaaaaaattattttagttgccaacttccgaaatagttaattttcattagtaattttatttctatttaccaaaataattgtcaattggcaaaataaggattaaataaaattttacattaattaaaattccaattctattgtgttttaataaaaattataaatatatcttaaataaataaaataatacactgcggagatcggacggatttgaaaggacagttctgcggcggttcatattttttttggcattttggagagataattcagattcagtccttggcaatttttcgtgaagaatagggttttttcactaaatcgcgtttatcagagattgtagagaatagaaagagctacaaaatgttagcataaaaacattgtgcataattaaataataaaatcagtcgaactagcattttcaaatgaaaaaaaaatttggagaagaattgttcaaagaacagaaatagacgaaagtgattcggatcgttactgtttaaattagggttgggtccccgaccccgctccgaccacgaaccccgacatttttggccattttcggggtaaaccacgaccccgaacaccgaggcttccaacccctacaaccccgatccccgacccttaccccgactcggggtcggggttaaatatacacccctaagaatggcattttcgtgagagaaaaggcaaagaaattatacaaaatttgaaatttttttaaccattttgccaaatttttattaaataaagtaagtttgctgatgcttatgtgggtattgcatcacacttaaattactttctgtcatagttccgtaccggttgagttttctttttcaatttattttttttgtgattaatatggtttttcaaacaaaaacatccattaaaattggtcatcattggcataatttattgacaaattaaatccaatcttcctttcgttgaaattanaaaatttaattttccttgactaaatcatggaaagttaatatttttcaaaatattttttacaaaatataaaaaagtaaattaaattttacggaaattcataaatttttggtgaaaactattagaaaataaagattaatttgacaaaaaaaaacaagaaaaaaacccaaaaat

SEQ ID NO: 26170 - DNA, 1978 bp, Heterodera glycines
  unsure (1)..(1978): unsure at all n locations
actcattctgatttcggttagtcggttcgcaacaaatcttggttgatcgctctctgacttaacncaacacagtacaggtttcgaatcacaccataagaatttgttttttatttttattcccaattcgttctccacgaatttcatagcccttgttccaatcaaaacccctaaaagttccattcttggtatagaaactttcatttttcttggttttaagcggctccttgaatataataaattaatttcacatttttcacaatcatttctgaaataaacacatgccgcatatgcatccttcgatgcgtctacaaaaacatgtaattgattattttcacttttacccatttcgattcttcttttaagtgtgaaattagcctttttccagttttgtgtgatctgaatccatttttcacattcattttcgttcaaattgtcatcccattttctttccgagtcccataaagtctggaaaaataattttgccggtaaaagacatggtgatgtccatccacaaggatcaaaaatggagtttaaatcctttaaaactcttctccttgtcatttttgaattcgctggttctgcaaatttaattaaaaattcatctttttgtacatcccattgtacacccataatctttggtttttcttttccgagtctatcattttctagtatctgattattaacccaataagaattcgaaacgaattctctcaaattcatccgagcatccgcaaatatttgcttcattgacacatatttttccatagcttctttttcgtctttacagcctacaaaaacattgtcgacaaataaatttttttgaatttcattagtaagttgtgaatcaatttgacttaaatgataccgaaccgtcgcacccagtaaaaatggtgaggaaattactccaaatggtactcttttaaaacgtagaactagaagattttcttttgtaattggttttcttatatctcttacccataaaaatttaacaaattctctgtcttcctcttttaactccaatgtccaaaaggctcgttgaatatcagcccataaagcaatttttggtattcgtgatcgcattaaaagccctggaagctgtggcatttcgattgggccgcgaaaaagcatgtcatttaggcatttaccactccttggttttgctgagccatcataaccaatccttggcttttttcccggtgcgaagacacaatgatgagggagaaaatgttcgccaaacccttttattgaggattcttcaacaatttgctcttttaaattttctntaaatgactcatccaatgctntaagctgacttggggttattctcatcttttctaacatactcattaaacgccggtatgctatagcaaaatttgttggtaattcttctctagggcctttccatggccaacttaccacgtatctcccattttttcgttgaaccgtttctttaaacattttcaaggcaatctcatcatccttctcttccgggttatcccatactcctatagtttctaaattccaaaattgttttggttcctcagtctttacactgactgcggctgttatattttcaaataatgattccaatttacccgaattatttttcatttgaccgcaaataatagggccgactgttgtgtccactttaaacaaattttctttaatctgttcgacacttttaaagaatttccaaaattctgccattccaattagtatgtcaggtttttcatcaataaattcagttttgcccgaatttatgtcaattctctttagtttacccgtaatctgatcaattctgttgacaattaagctctctctttttccattacttaattccagctgtaccaaatattttggagatttaattcgaattgatgatgtttctcggattgacaataagtctaaaaacccatcttcaattctgggtggactcaaaatattgaattaattcgtcactgataaacggaatttgact

SEQ ID NO: 26171 - DNA, 1570 bp, Heterodera glycines
  unsure (1)..(1570): unsure at all n locations
ccccccccccccccgccccccccccccccccccccctctcctttcctctctttctttttttttaaaaaataataaaaaaaaaaaataaaaaaaaaaaaaaaaaaaaataatatttttttttttttttgttggggggggggggggggggggggggggggggggggggcgggggcgccccccccccccaacaaaaaaaatttatatattttttttttttttttttttttttttttctccccccccccccccccccccaacaaaaaaaaaaaaaaaaaaaaaaaaaaaaaaaaaaaaacccacccccccccccccccccccccccccccccaccccacaaaataaaaaaaaaacacccccccccccccccccccccccccccccccccccccccccccccccccccccccccccccccctcttcctttgttttcatttaaacaagcccaaaattttttaaaaaaaaaaccgcgggatgaccaaaaaaaaaccaatttttttatttatcatcccctccccccggnttctgtgtcggtcagtcggtgatgggnccaacgctgccgccgccgccgctttttttgccaattcacgaaggatgacaatgccttccagggtgggcgtcaagggttcatctgcacnacacaaaataacatttattatgatacggtcacagtagtaaacaatcaaatataccncagggaggaagaccgcacccgaaatttttaagggaaaatagtatttttgttgaaaattttcgggtttccttgttgatttgcccctccaagaccaacctcacaaaagtaccaaattttttggtaataatctattaaaatcgaggaaaatctattaaatttcccaggcagtgccgtgaccctaatttattttaaaaattgatcaaaatagcgaaatttggtcattttatgcgaaattcgttgggaaaaaactgatacttgtccagttaatgggcattgtttttgaaattttaaattatttttctgggtcgggccacgacctgcttgctcccctatgagaacatcacttacattcttcaacagccagattctctcctccggctgctgcgaacgtcagtcggttgatgggccaagcttgtggcgcagacaccgccgctttgcattactggtaagaagatcggttgcaatgaacggcgcatcagaacgaaattcattagaagccgagcagtcctcccgttgccgttgtagaacgggtgtattacacttgagtttttaatacatcatttttttttatcaagtttttgttttttgaggagggaattttcacttttggggagagaattttcacataaaaggatcattgacatacctccaagctgcagttgcaagtgatcggctgacgcaacagccgggcaggcggcttgcgcgacatcgagatgacggtcgagtcggtgaccgccggggaatttgcggcgcaggcacaccataaataatctctaagctaaataaaaaagggagccgattgtatcaaatttattttaatatattttcagctngattatgtgacaattgaaaaataaaggccccgggctctattttag

SEQ ID NO: 26172 - DNA, 1279 bp, Heterodera glycines
acttaaaatgaatgaaacaatgagaaatgggggaagaggccgacaattaagagagtgattaagggaaagaggggagggggagattaggggggggggtgattaagggaaaggactgattaaggggagggatgattaaagggaacgagtgattacgggaaaggattaattaaggaaagggcttattaaggggtgggatgaactttattaatatacttgagaagtggcaagagaatgagcaaacaaaattgggaaggaaggcgatttgggatagaacagatttgggcgaatgctcaaaacaaaatattttattttctttgatgaaatgaaagccaaaatttaaattcacagattttgaaaattttgtgcttaattaaaatgaattaatttgccaaattaacggggaaaacccgaaacaaaagaaaatgaaaagaaaaacaacatccaaaagcaaacaaacaaaacaaaaaaacaggatcagcagcagatgatcagcagtgatcatcactaccggttggaaaataaaagaaaacaaattgagatttttcagttgcgagcaaatggacgggggaatttgggacaaaacgaattaatttggcaaatcgaaaataatacggtaagagaataaatggaatattattaaacattaatttcaaaggcaacgttcgcttcttcagcttatgctttgtttccggtaaaaagactaaaggaaaagctgacgaaaagccgaaaaacagcttcggattcgactctttaaaggtgttctgctgcgcttggtcattcagtgagacggcagcaaaagatggcacttttttaattaagcagagagtgccatttcagattttcaaaaagcctcatttgccgggcaaaaacatcaatttgaaggtcataatgacttttttaaatgtattcaaaaggtaaaaaaactaaataataataatttccattgtccattaactttgatcatttgtcaaaaagaaatcaacattttgtaaaattcgagcttgaaaaaccaaattgactctaattttagctaacgacagattttgttgaaattgattaattttggcttttatttaaatttgaaaatctaaaggaaattgtgccctttaatgggatctccttatttatacggggattttcaaaaaagttgaaccctgacaaatttatatcgaaagtagagttgcacgagaccgggaattttgacaaaaaccgggaccaagacttaccgggaccagaaaagtcggaaccgggaccgggaccaagtttttcgaccgggacc

SEQ ID NO: 26173 - DNA, 1640 bp, Heterodera glycines
aaaataatttaacatttaattttaatataagaaacacaaagatttttgttaaaatacaaatatcagaaagttcttttaaaataaactcgcaataatttttttttacaaataatgacatgaaatgggtaaaaaattataccgaaattaagaaaaaaatcaaatttataaaataagaatcggtaaaattacttatgtttaacattaattaaattttcctgagtatttctaacatcaaaagtttaacaaaggaccaatgaatgaccaacaaaaataattttcccaaaaatattaaggaagaagttgtgtaaataaataaattatctatttccatatgggcatatttttttattaagattttaatttctataataacaaagttttgaattcatgatccacaagaacaagaaatggtctagatcgtgatgctcttttttgttctatatgttctatattatttaaattatatacggtgtatttgatgttttaaatcacaataaaattgtatcattttaatatcttttttattaatatttttttatttaaatagatacgtgaatatatccattattttgttttttatttttctttttcattaaacaaaatcgatgatcagcgaaaaaatctttttgatatattaataaaattataacgaaaattaatttggtccttcgactgttgatttttttccataccattttctgttctatttaaaagattatgataaatttaattaagtcataagtacggttaggaaatttaggcatttgtttaatattaaattgactcaattgtgtatttattttttatgtctatccgcacataagattttttgtttattaattaaaattataattcagctatttttctttaatcattttaaattataatagatactgagtacaattaaattatcatcaaattttgcatttaatttttggtattagtcgatattttggaagccgaaactttctcataattgagaatttatattttcgcataataagtgatttcttccttcaattgattagatttataacaaagtgcttttctttttaatctttgaaaagcattaagtatgaaaaagaattgtaaatagttttgaattttgcagagtgatagaaactcctacagctaacaaaagatattaagaattaaaaatttggttactttcgttaaaaaatgttcagataaatggtttttaaataacttctcccccgttataataaatttgtttggtcgatttacaaaaatgcaataatagcacttgtaatgtgtgacaattttcatgcatatttctcttcctttttgactcattttgttttgtctcttctaaacaataaatatttattctctgcccatgtaaattatttccagctcagtcaaattctttttaaatttaattattatttattgtctgacgcctttactagcacgtaatacacatctgccagggacgtcaaagaattcttattaataccagaaggcttaaaaataatacatgaaataaatgaatatattattaattttttaaaaatatccaaaatggaaagttgactttctgcggattgagcatcggtagctaattacatcccagactaaaaaacggaatgagggggaatagatgaatttttaattaaaac

SEQ ID NO: 26174 - DNA, 1296 bp, Heterodera glycines
cagcgatttgcaattatgtgaacatttttgttgggggcgcagggggagaagcatttgcgcagcaaaaacgcattcggacgaagaatgaaaaaataacaacaaattaattaagcgaaaaaattaggtgaaatttgtggaatttttttttaaagggttgggcactacggtaggaaaacagcagcatacggttaagcattacggtaaaaaatggaaatttgagtgaactggtgggataatggaaaattcgaacattaagaaagtaaaaataattgatactacagtaggaaaacgggaagcgttacggtaaaaggggagtgaaaattgcgcaatacggtaaaatgggaatttttgtgcaacggttaaaaaaggaagaattaataaaatttggcactgcggtaggaagctgcaatagttactgttaaacaaaaaataattgtgccactacggtaggaaaacgggaagcttacgataaaagaggacgaaacctttaaaaatgggaaaactttcgtgcaacggttaaaaggcaaattttaaataaaatttggcattactgtattaaagctgaaattgttacggttaaaaaaggtggaatttgaattcgctatggtaaaaagactgggcgattacggtagccgacattttaaatgcattgacatttctgctgaggttaaggccaaaaaggaaagaaaaagaaggatgggtgtgggtaattattataataagcgattagatcgcttacatatttatgagatggagatgaaaatttttagaaaaataatgtaatgaaataatggattattatgaagaaaaaaattactgttatgggaataagtacagtggggatacggtacggcatggtgagacactttgttggagagataatcaagaaaagattcccgaaaatggggtactgtaggtgagcagaataaaaaattcagcgcgaagtttttctcctaaaattgctgcgaaatttttatcaaaaaataggcggattgggtcagcaaattaaatgcccccggcggtgggaaaattgcagcgcccaaaaatgccttgggccaaaattgaattgttttgctcgccaaaaaaaaaattacagcgaattttccgggccagcaatttcggccactggtcattaatattgcgcccgattttgttcaccccgccggggccaattggcgcgtggtgtctgccgttacctctgcatctttgtgtgtcccgcagttgcacactatttccccgccgatgtcccgtttctcgctgtctgcgctcagcgatttgtgtgcagcgcatccataa

SEQ ID NO: 26175 - DNA, 1107 bp, Heterodera glycines
atgccaggagggcaacaggtgacaacgaacggaaggcaaaggcaaagggcaagcgaaaatcacgcaatggaagccacggcacaatgggaaaatggccaaaccaactggcacaacaaatacaaaagttggctaattaattggcccactttgcgattatcccacgcgtaatgtcaacggacattaactttcaaatccctcgccataaatttgcgcctcattagcgtaaagtttgcttaatgcttttgtttgattatgtcttgtcttttatgtcatcgtttagggcttcaattcattatgaaaagccaagccgcacttaaacaaatggcattattaatgaatgaccttttcccttctcctctctgctttattcacttcattaaaagcgcatatccttctcattcgtcaaatctctcgctaaacccttttttatgttaacaataacaaattaacacccataaattccttccgcattttttcaattgctaggccattaattaattaatcacatttatcagtcaattgttttttgtgctgggattatcctcttttatggttcacttttccattaatattcttttttaatatgctaatacttaataaacagtttaacgatggcccacacattccctccccccccccaatttgtcaactttttgccattgtcttttctacgccttcgcatttggcattaatatttgccttttccgcttcctcctattaattctataaatgaatgtgttccgctttctaacacttcaattttttttttggtttgtttttgcattatttaaaatgcaattgcaaatgcaatcaaatgaattcctttttttggcttatcatttatcttatctttatcattcattttctatggcatttctttccgcagttttatactgctgccttttatttcattttgattattgttagctcgtcactgttgccattacaaccgacgcgatgagatgagtgagtgcgtttatttttcgggccaattattaaataccatccctcccctccttttctcccctcccctccccctgagtttggtctcccccgcgctccctttgtcgtgtccgccgtccgccaccccattccgcttcatgcctc

SEQ ID NO: 26176 - DNA, 2188 bp, Heterodera glycines
  unsure (1)..(2188): unsure at all n locations
aaatttaattatttttaccaattagcattactttttctcatgcaaaaattataaaaatgaaatattttttccaaataaattttttttttatcttttctcacaaggggtgaggattttttttagttttcatgtacttttttaatggttttgtttcacttataaatgcacaaaaaaacattatttttatcgcggaaacattcattttatgtcactattcgtaaccattttgaattttagaaattagaaacaaaaaattcaataaatcgaaaaatacctgacttgtatttctacaaaattaaaaaaatgattcctagagtcagaaatgttcaatttttaataaatttctattgcaaaattctataattgtcttttgaaaaactaatcctcactctttgtcactaatcaaccacttttctttttctcttcctcttgtccttcttcctttttctcttcctcttctccttcttcctttttctcttcctcttcttcttcttcctttttctcttccttgttctccttcttcctttttctcttcctcttctccttctccctttttctcttcctcttctacttcttcctttttctcttcatctgctccttcttcctttttctcttcctcttttccttcttccatttcatcatgtgcaccccttaattattttttaaacaaataaatcaaaaacatttggtctttttgttaatttttaatctgttcttaaacctgcaaaatttaaaaaaaaaatgaccaaaataactcaaaaactcaagtcaatcaaatttcacaactttttagttttaactttcttttgcccagccaaatttctgagtgaaattttgaaggatttctaaaaaaattaagagctaaagaaagacacccaaggaaatttggtttgattaggattttatcgaaaaaattgnaaaggaattgtgatcccttttccgagtaaaaaatttgtcaaaaatttttctcataattttcttaaaaaatgtaactcacgcaccagtcagacaactcgctttcatctggccttaaattgaaatgtttttttaaaaatattttaatattttctttatagatatgtgacttaccaattatagtcagtgatgaaatcgcttaatattgggattcattattataaaacatatacactaatataatatttattctatttattctttatttataatatatataatatttatatttactgacaaccaagggtctgcgtcaaatccactataaagttggaatataaatttacacacatttttaattttttatatacccacccattcgcaaattgctcgggttcgctttaaatataattgatcaataattacttaaattattaaaataaattacatattttttgcttttttcacaaggtggtgttcagcagaagagggtggacactgtcgtttttttgaaattagacttgactaaattggcagaagatcattttcacaaaataaaatgacaaaaaattgaccatttttccaagaattattatacgcgcaaagaaggagaaatatgaatgttttgaagagatgctaaaaggcgaaaaattaaaggatgataaaggacaagaagtattactttcggaatttttttcaattttaaaattataagaaaaggaataaaaataatgccattaaaatttagtttaaaaaattatccataatttaaatatttttgggtttcatatgcaaattcggatatttagtcatttttgttggcaatgtttcgagtttagcgtgacaaaagaagtaaaagaatataaacataggatttaagagtgatgtaattaatggctgatgtaaactacgaagtgttaatctcgggagaggggggggggcacgggaagcgaattgatccccaaaaaaatgactttttctagcttttttgcttgtaattaaacacattaaatatcaaaggaaaattgggaaaagaaataataaaaattaaaaaaaaaaacttatttatttaaaaagttatattaaattttgttcgactattaatcgtatcccaaagctttttgtgcgattttaatggataaatgcgttgattcactgcttattgtgatttactttctcttgcttttaccctttgctatttattgtcattttccaaacaattgcttagttttggccaaattcatttgccgaacaatggaaaaaaagagataca

SEQ ID NO: 26177 - DNA, 1608 bp, Heterodera glycines
tgcttaccttgccagccggacgggatggcgtgctttcaacgtggtatggtcgtaaacgaaaggaaagcaatgaaagtaatttaaataggcatattaaaagagcctatttttttgccttttcacaagagaatttattaaaaaaggcaaaattcgccttaaattaataaggtgaaagtttgaaaatgtttattaaaaaatttaaggatgaaatataattaaaataaatcaaaaagaaaaaaaatcaatttatttttctaaataaataaaaaacattgtcagaggcagtgcctgccgaaaaaaagacaaaaattttttcgaaaaaaagctaaaaaaattgaaaatttaaataaatttacaagtgaaaaaaggaaaaaagcttacaacaccttcgattcccaggacgtctccgttccaagtactaagaaggcccaacgttgcttaacttgccagacggacgggatggcgtgctttcaacgtggtatggtcgtaagcgaaaggaaagcaatgaaagtaatttaaataggcatatttaaaagagcctatttttttgccttttcacaagagaatttattaaaaaaggcaaaattcgccttaaattaataaggtgaaagtttgaaaatgtttattaaaaaatttaaggatgaaatataattaaaataaattaaaaagaaaaaaaataaatttatttttctaaataaataaaaaacattgtcagaggcagtgcctgccgaaaaaaagacaaaaaatttttcgaaaaaaagctaaaaaaattgaaaatttaaataaatttaaaagtaaaaaaaggaaaaaagcttacaacaccttcgattcccaggacgtctccgttccaagtactaagaaggcccaacgttgcttaacttgccagacggacgggatggcgtgctttcaacgtggtatggtcgtaagcgaaaggaaagcaatgaaagtaatttaaataggcatatttaaaagagcctatttttttgccttttcacaagagaatttattaaaaaaggcaaaattcgccttaaattaataaggtgaaagtttgaaaatgtttattaaaaaatttcaggatgaaatataattaatataaatcaacaagaaaaaaatcatttatctttgtaaataaataaaacacactgtcagaggcagtgcctcctgaaaaaagtcaaaaaaatttttgaaaaaaggtaaaaaaagggataatttaaatatattttcaaaagaaacaggaaaacagaataccacactaaataaattcacaataaaatcaattacagataatccaatgttctttcgcaaatcccatccacattttgtatgcaacccccccccccccaattggtcccgatcaaaaaatgagtttttaatgttaaaactccccccccccctttctgaggaggttgaacaataatccccccggggtgataattagagataatacggtagtacggatgttactccccccccctttttgaaattctaaatatgcaataaaatgcatgaaataaaacgaagaatacgattccgaaggcaagacaaatatttcatgcatttgaactgcttttattgcgtatttagaaattgccgaaaatttaattttga

SEQ ID NO: 26178 - DNA, 1465 bp, Heterodera glycines
tttgtcttcccgaagggcattcaaaattcactattttatcatcctaatgggcattttcacagtcatccaaaagggcatcccggggcattcttcttttttttttttcatcccgaagggcatcctagggcatcccgaaagtcatttttatctatttatcatcctaaggggcatcccaaattttcaaaatttcatcctaatgggcattttcatccaaaagggcatcccaaagggtattcactgactttatcggggcattcttttttcactctcttcttttctcctttttaccgcctccggaggactttctttttattgccgaagcactcactgatggccatcatttccatgcttttccctcactaacattttcctatgggttgtcccttagccgcccaggccaaatgcctaaccatccggtgctaccaataacacacatgcccagtggaacgagctgaattaggctttgggatcccaaccctcagaattccaatcatttttatgagggggtcctggggtgatcagtcccacttccctccccaactccaactccattttaagaatggctttattcccggaaaagcatggaaaataaatataaataaataaaataattacataaaatggaatcaaatatttaaatacaatcaaataaaaacataaaatacaaaaattaactaaattaaataaaattacataaagttacataatcatgattaagtgaatatcaatggagagatcgcagcttaaatagacataaatggaaaggggaggagtgtcggatcgatcgctaacgggaaaataaataaattaaaatgaaaatgaaaagagagattaaaatgaatgtgaaatgtgcttaaatgcttcggcaatttatgttaattagcttatgtcttacacctcatacccctttttagaccgtccctggtctcagatttgaaaccagttaaaacaaagtttttgcataaattaattttgcgcaatttacttcaaaaattttcttagctttttgcataaaattatttcaaaatgtaaaatcaaaattaataaaaatgaattatgaacttttcacctatcactcccttccctaaaaggatcgtccctgatccatttaaaaaaattttttgccaaagcataaagtcgccatttccgccctttttatcattcctatttatttccattgccctttgccccttggttgaccacgtcctgctgattgtccatccgcgtaccaacaattctttgccaaatgcccaacacgtttgcatacaaagcaagcaccacgaggacccgctgattcacgacttcgcacaaaaacggcaccgctgtactgctcgaagcgctgttgtggcctccaagtctcatttcttcgtgcacttggaccttggtcgggctcatccgctcttctttttcgcgactcaaatgtggacgtgctgcttgaagtgctctgtctgttgcatcgttcgcc

SEQ ID NO: 26179 - DNA, 2304 bp, Heterodera glycines
acaaaaaatgcaaatggccatgagagcaaagccaaaagacgggtgcagcagaggacggcttttcagttcggcccaacgactaaatcagaagacaaagcaaaaaattaaaatgtgatcgacgagtggcaccattcgtcgaattcattcgcaatttttgcattatgatcagatgatcacttaaaagccaaaaaatggccaggggacgaatttaccaatttacttatccccgccccccattcgaatttccctttttttatttcaacggccatttatgttcataaaaacttggtattttcctattatgctataccccccttattttttcacaagtatttttgttttttgagtaattttatacgctgaacacgaattggcattatttcatcaatccaccgtcatttatgtggtgaggtgcatgaacttttatgtatgtgaaaagtaaaaatgatttttgatcacagaattaataagcctaatctctggtcttaattaccaccaagaaatgtgcattgtgcacattttgtaagagattaacagagactgtatttaaaagtgccattcattgcattttcaaaaggtgatcctccaatttcccatggcatacaatttaaattattatcgctaaaattctcaatgaaattgaagcagttaaattactagaacaacactacattgtgcatgcctcgcgaaatttctgattgtgggaattaaatgcgactagctactattaaagtttgatgaaaagatgcccattaatgccggattctccgtgttcagcgcataaaattctgtggggggggggggcggtaataatgggaaagcacccaacaccaaccctctaaaaattggtcttcttcgcgtgcctgtaaaaattgccgagtttggccccaatgttttcatataatgtcaaaaatcttttatttcctcctttggaaaacatcgctaattcggcatatcttttccgttttttttttgctagtgccaatggcttctcccccatccgcttgtccttcaattagtgtgcattaatgatgcataatcgtcccattagcgcttcttgccccccccccccccttccgtttgttcccctttctaatcacgcgatgagaataattctcgcttcattaatccgtgtttttctctttttttgaaaaaattgggggcttcaaaaaattgaaaataattttgttattgtttttatgtccttttttgccaaatttatttacattctctttgcgaattttgatttattctcaacaaataaatttatttaaaaaataatccaaaatttccttaccaatttcgccttccccttttattatgcaaatatttttcttctttcgggccttaatttgcgttcttttcttcaattcaacacatggaaaaaatgttttttttctccaaaaattcaaaaaattatgatcttattgtgaaaaaggatgaaaaatgatattttattgtctttttgaaaaaatgtgggtaaaaattaatttgaaaaataaatgaaatgcaaattttaattttataaattattcaaaacgaatttttctattttccctcgtggaaacgaaaaactaaagcaatgcaaaaaatattaaatgcgcaattagtttaattgaaactataaataaaccttttgattgaatccgcctttttcttagccaattttcaaaatcaaattttacgccaaatgtccagccgatttggcggtctgccggccgtttctcccttttgtggcacttctgttgacgacgaatccaccgaccccgaccctttggtggtggaagaagcttcggcacaacttccgccactccgccgacagtgcgacgacaacgtacgacgaaggccaagcattggcatgacaaatgaacacggaaagataaaaatggcagcggagggcgaagagcaaagagagggcgaatatcatcagacgacgccggagggggcgtgccacagtgagagagagggggcaattaggggaagaaattagcagagtgggggcaatgggcggcatttaaaaaaagagggcggggggtatttaagagagggcaaatggtcatttgttggtgaaatgtgaatgaatgaatgaatggcatttaatcacttgtatagacagatgtgagaattctgttttttttctcaatttcggcagaaaaattaaaaaatggaaaacagaatttgtgcttaaaatattatatatatcatacggtaattctcgcccttaagtccattttctcacgagagcgtttgttgacttcatctcgggaatggcacatattaattgaaatgttcgaatatgcaaaa

SEQ ID NO: 26180 - DNA, 1227 bp, Heterodera glycines
ataaaatgacaaaaagagagtatttcacttgccaaacattctagagttgttagatctgatgggggcaaagaaattttacacgtgcatggatttacagcaaggatttatgcaaattccggttgccgaggaagacattgaaaagacggcattcatttcacacttgggcatttttgaatttataacgatgccttttggtctaacagcggccccggacacgtttcagagagtcatgaactcgttgagacgacggttaacggcggcgatgttaatttatttggacgatataataattggcagcgaaaccgaagaaaatcatttaacggatattaagaattttcttttattactaaaaaaggttggacttaaattaaaattggaaaaatgccattggggaatgtccgagatacggtaccttggctttttgctaagtgaaaaaggtgttagaattgacccaaagcaggtcgaagcggtacaaaattttaaggcaccaaaaagcctaacagaattaaagtcattgttaggagcactaacatattttcggcgctttatacacaattttgcgcatattgctcgaccattacagacattgactcaagataaatttgaagggaaaattgaagaaaattggggcccagagcaagaacatgcatttcaaactctaaaacaaatgctcacgacagtaccagggttagagtcaccaagattcgcgagagcattcacaattgagtgtgatgcttcgaaaaaggctattggagcagttctccttcaggagaatggtccggttgcttacatttcaagagcattaaatcggcacgaaacaaattacccttcaattgaaagggaggctttggcattagtttatacagttaaggaattctcgccatatatcgttaggtctggggttaaaaaagtaataacggattgtagtgccttaacaggcatgatgaaagcgaaggagttaaaggggagacttgagaaatatcaagtaactctccaaagtttcgaattagaaattatttatcggcctggaaaaaagaataaagtggcagattttttgtctcgatataatataccgggaaaggaaaaggatcctgaaccaaaacaggaagaaaattcagatgagtttgaccttcagccaaaaattttaagtgcaaaaaatattaatgaaaatttaattgccgaaaatgatgaaatttttgaatgaaaatccgaaaataaccttaaaaa

SEQ ID NO: 26181 - DNA, 1554 bp, Heterodera glycines
gtcaaataatttgaatttgaccaaattaatccgacgcatcattaggagaggcaagggaaaaaaggaagaggggggatttctgagcagaggcaagggaaaatggagggaacagagatgaccataggcaaggaaaaatcgttttttttgtgaataatgaattaatgaagttaatcaattattactttttatgtttttatgtatttaaattttaaaatatatgtattttttgaaacctgaatccatatctcactacattaaacaaataataaataattatgttcctctattatttttttcaaaatttattttaacaacaacacaaaaatgaattttaatcaaaattcaatttatcattttccggcgctcctgcagttttcgcgcatctccccttttccgcttttttgcgctcttttcgctcttgccaccactgtcggctgcgccctaacactttttttcgctgcgttgccgacattgtggagaagccagtaatggccgagtcaattgacccggaccatatactgctccccatcacactctcgtttgcttcttcctcctccccctcctcctcctcttcttcttcttcctccccctcctcctgttcttcttcctcctcctcccatcttgcccagcggcctaaaattaacaaaaattgcaatttgataatttaaatttattaaaaataaatcgtttcaattattttaaaattatttttttataatcacctcctcccccgccgcaattaggtcatcattttctgccaaattttcaccccgcaactcggctataattccatccatagccaacggcgcatcgttttcgcccagcaaccgctccctctcgtaatacgccaacaattcattttggctctaccaattaaatattattttaattattatattttttacttactatttcactaatttctgcatatgtgcagcctgtcggattaaatccgaaaaaatataaaactattaaaaaaacaaaaccaaattaaaataataagaattttacctgaaaatacaaaataattaataaaaataaatccaaaataaaataaacatttcataaaattttttattaaaattaaataaataaatgaatataaaataaaagtaaactaaaataaataaataaaacaaaatgaattcataaaaaacgaagcgaatgcttctcgcaataaaaactaaaaaataatctaataaaacgccccaaataataaataaatttattccacaataaaacgattgaacgtaaaagcaattaaaattgtttatgaaaagttttcctttcttaaataaaaggggagaaaaaaaaaataaaacgataaaaaataatttagaaatgaaaaaaccataaaatgataatgtgtaaaatttgaatgctattaaataaccaagaatttttggtataaaagggggaagggttttcagtttagacatgcttcaaccaattcactctgctagcccatcggttctcttcactcaacaagccggacaacaactcgctctgaatacatcacaactcgggcattcgaagcatcgcggatatgatcaa

SEQ ID NO: 26182 - DNA, 1590 bp, Heterodera glycines
  unsure (1)..(1590): unsure at all n locations
tttgcatgtttttggttatatttaaatttttgtattactgtattcacattaatttctataaattttcaaaagtntcattcttttttttgtttcctttatcttattcaatattcgattatttattattttttgatctagaganatatgaatgtntaatattatatgttttttaataaaaacactatttgtatattattttatttnaaatatataaatttattttggttacttttctatattttaaatttcattttgtatacgttataattaaattaattgcaatatttttcatgttgtggttcagattttaccttgtttttttcgttcgacactattctgtttttgaccttatattatcgttatttttgtttgttattgtttatatagtattgagaatttaaaccatttcatttttgtatttatttctcatgatgagctcggttgtaaatttcatcgttattcattcgcagcaatttaaataaatttactcttgttataataatttttttttaatttggaaagtttgtcaattctttgcatttttctattattgaaatcagttaattttctttatttgtaaaaatatttcagtaaaaaaataaatttttcaattttattttcaattttattattgattttgatgtttcttatttttaattaaattatttatagaaacatcagtaattgcatattcttataattacttattatgcatcttaaattttttaaagtttaaaaattaataattaaataaatctttaattgcataaaacaaaaaatctcattttattattttatttcttaatcgcattctatatttgattagttatcatttaatttcgaattaaataaacaataaaaataaaatcagaataaatagaactatgaataattattctttttaataatttttcttatatttcttttaattaatatttttaatttgattctataaaactaattttttaaaataaaaataaatagaattagttatttacaatttagcgatttttaatcactactaattaattattagcatagaatcgaattaatttgggaatatatttaatattttaatttaataaataaatttacttaaattcaaatcgagtattttttaattaaatgttgctttttgatgttattagataatattcaattcctataaaatatttgatttaattcattcacaattattattattcaataaaatattattatttaattttatttcatgctaaaattctgttgtgatccattcgcattcgttgccatctcttattaataaatgcattttatgtgttggtgtattattattttttgctaaattgtcctttaaattatttattttattaaaatgtgagacaaattgaatattaattacctatttttatttttaaataattatttatttattatttaattttggtattgtttcagctatttctttgcatttcgtttttacaaatcgctgaaaatgaaggtaaatttaattttacagcaattaaaattaacttttaaattacattttgtatattaggatttaattaatgaggttttaagaatttttttaaataattgatgaaaaat

SEQ ID NO: 26183 - DNA, 1623 bp, Heterodera glycines
aaaaaccccttttatgtctttccccgtcttgatcacggatcctgtaggaaggtggatcggtcagattcactttagaaattcgaaacagctcgtccgtaaaattcggaaaataacctttcgaaaaatcacccttttctttgctattcgcactatgtcgcccaccttaaattttggcgttttgggactcgactcgccttgtttatataggcgattccgtagaccagcggcatttttaaagttgacgtccattggccttactccggttgttcggttcgcggagctgttcaggttacgcacaatgctgtccagcacatcaacccaccgctttgtgttcttttcgctaaaatacttgtaaagtcgctccttcagcgtacggtttgcgcgttccacagctccagcatgcaaatgtgggctgtacatcacgtgcttgatgatctccttttgtttccagtagtcaatcattttctttgcctgaaactcaagcccagcgtcgctgtacagcttattgggcagcacacctgccttattgaaaatcttctcaaatgccgcaatcatgtgctcactttttttggactctacctctgcagtgaaaatcttccgacttaaaacatctatgcacactaggatgtagcgaaatccatcattatgctcttttagcgcgtccatgatacacaaatcgcattgccagtccgtgtgtagtccactgggcacagtttttagtctgcggaagcggtttttgcgcggtttaaacaacgtgtaggtgcgctgtttatgcaaaaaatggtcaacatcacgaagagtaatgctcggatttcgcttcttcgcttccttcaatactttttgaatacctgcgtaacttgccggcgacctaagatcgtaatacacttgttccagtaatttttgtactacagctttgcccatagaagcggtttaaagaatttacgttgcgtgttatttggttgctccattcggctgagtcctaccgtttttatagcgcttgctttaacaagaacgaattttttgcgcttgctccgcttactaccaccctctccccgttgggaatgaaaaaatttcatcatttgcgggtcgctgccaattttttgaacaaaaaatcgatgacctttcggcacatctgctctctgtcctgtcaagtacatcagtgagtcaatgtagttggacctaatcaccggctttttgaagtttgttagaatttcgccggacgacttatcgactccgtacttttcggggtttcgttcaatcatttcgtgcagcttatcataatgctctgggcctgttttaagctccaaaaatttttgttgtctctttttggttagccgcaaatcggtctcaggcgcagacgtatccgtttcttcaccaaagctggcaccattgggagttttaattctggaagctttcacagattttcgtcctatttttttatttatttttttgccatcctgcccgttcacttcttcaatccggttgagtgttggtttctgtatgcccatatacggggcaatgttttgtggtgctatgcctgtagcgttttccacaatcaccttttgtggtttgttctcaatcaagtccttgagctgatgcctctgtttgtacaaccacgagtgg

SEQ ID NO: 26184 - DNA, 1831 bp, Heterodera glycines
  unsure (1)..(1831): unsure at all n locations
gtttattgcgttttttaaaatattttttttatagaaatataaaaataaattaccactcactttttctttgtatctttttccttggcgccagaaagcggcagaatttcttcacatgggctctccttgttcttcttcttttctaacattgacaataaatcttttttcttctcttcggacattgataatcgatcttttttctgcttatcggagtcttttttattcatttccgctggccattttaacttttggttaatttgtttcaaattttgtctaagctcttccaaaaggccattaacaatatgcaagaataatgtttgttcggaagctactacctttttctgcgaaatgaatgttatttaattatttataattaattctacaaaaattctgcataaagatatgaagcaaatctcacccaaatttcctcaatattcaaatgaaatataagcctaccattttataaatttatttatgttagtgccttttatattggcattttagtctgaaaatctgctttgcttctattaataatgtcactattcgtcttaaactcacattttggcttttttgacactaaaaataagccaaaattttggcgttttgcaactatttttacaaatattttaaaaatataaaaaaggaaaagaaaaatgtacacctggatagaacttttaaaaaaactattattaaaaacaattatttatttaatgacgaatttttattttcgaaatagaattaactgagagagtcatttcaaaggatcctttttcagttcgggagaatttttttgtgtttcattcaaaaaaggtcttatttaatttttcaattaatttttagaataataatctgctgttgaggcctttaataagctaagcataaaaataaaataaaaaattattaatctgttggagattcgtttttatgttttctatgtctacgtaaatgcgatgtcctctcaaaggagccacagacaaaggacccgcggacaaagggcccacaaagacatagggcccacagaaaaggacccacaatataataattcgaaatttaaaaaaaatttcaaaataggctgtgagtgaaatgcctgtgactaagtttattcaaaataggctgctatattgacaaaaacatctaatctgaataaattgtcctcctaaccttttaaaagggtcaaacccagacatatttggtatcattcgagagctcttaatgagcttggtctaaaaatcagagtaataaaccgaaacgatgcaatctgagtgtgggacaactgagtcccagtgaacaatggacacttcagtaccaaagaaataatagatgaataaaataataattaattgcaaaattacgaaaaacggagcatgcgaagacggagcaagtagtggggcgagaaggagggcggaggaagcagtctgacgacgccacccaaggccggcctgtggctctttataggattatgcaattaaataatgtcgcggagaaaaaggtgctgcagaaatatagctttaagaattaaaataacattgttaaactgtgaaaatcaaaaaatgatgaattttgacgaagattttacaatttgtgggaaacatttcttgtaagccgtttctgatgccattttctaatgatttaaagctccttttttgtcagattacgcaataaggactgcttctttccgttgtcttcattggtggagtaattccaggatctgctaaggctccaccacacccaattttaaatctgctataattatgcaatgattatgttcagatatgtttcatcgcattacttatcacaaaacgaccntcctaatgtttatattgacttctgacct

SEQ ID NO: 26185 - DNA, 1059 bp, Heterodera glycines
atgtcaatggacgacagtaataaatcaattttattgttttgtttattgctggaaaatttgtccattttcagctacattttattatatatttaaaacattttcatgacaatttttattttattttcttttttatagctaatttattattttttctaatttaagctttatttaataaatattgctttgataagatatattatacattggctttggaccatatgatgaatgcttacaaaattttgtttttctgactataatccgaatatagcttttgcataaatatcggggcctagagagcaaatgtctaataataagctaatttaattttagtttttaaattttttcctaatttattttatccaccattaaagcagcaaatgtgtgcgtaaacaaacaccaatggatttgttttcccgtttttacgaatgaatcactcattcataaaaagcatttgtgctttgctttttttctttgtttgttatcgtcatcccattaaattccacgtaaaatttaagcatttttaattatttcaaagaaaattaagagtttaaatggtaaacatatctattcctcttcattatttgaacaatatttttatataatttcataataaatttagaatgaatttcaatcaattatttatatttactattttattaccattgctttttctcataaattctgctaattttattcacgcaagatcagcaaaaatacaatcaaaagcaggtgaaatatttatttataaacaatataataatttaattgaagatttttttctaatttaaatttagtaaaaaaaaaatttttttccttacattattagatttaataattttgaaaattaacacaattcaggcaaaattccgaagattttatgcgattcggttgatgagtgtccgtacggaatgcgctgtaaagccggcatgtgcatgaactagaaaaagaggcgtgtaaaaatcttttgaaataatagatttatgtgtgattatagtttttaaaatataataataaatagaatattcgtttatttctgtataattcttataaaattcgaaa

SEQ ID NO: 26186 - DNA, 1342 bp, Heterodera glycines
actgttgtaccacttctaatcactgttgaacctcttctaatcactcttctaatcactgttgtaccacttctaatcactgttgaacctcttctaatcactcttctaatcactgttgtaccacttctaatcactttagtacctcttctaatcactggaagcggcctaaaaacccctaacaattttttaaaaattccaaatctccaaaaccagagctaatctaggtagcgaagctcccaaagcgcgaagcgctttaagcacccaagaaacatgtaagcacacacccgctagtactatatatgttatattgacaaggagtttcgtttgcaaaaacaaaatctcccggccgaaggccgggagcgccctgaaagtagtggaagggtcttacaactttttgaggagaatccgggaaaactatagaaaaaaatttagcgcggacgactgagtcccagggacggatttctcattttttcgtgcatttgggggcccgtaactttttttctaaaacccaaatcaaaaaatgtctgctgtgagggggctaagttgaagtgttttctaaaaaacaaaaaaaattccaagcctctatctgcaataggaaaggctgtaggttcgtggactttttcagtaccaactttgtccagttcagtcccggttgaataactcattagggtttgatctgggcggggagttaccagcagacttattgtagagttcaatgagctggatttttccagtttttaaaatttcgaaaattttcaaaatttttcgagctaggcctaaaaaacggttttcgggtttttgaattttaggaatttttaacgaattttcccagagaaacgaagaccacttccaaaacatagtttttcgagctctatcgattggtaatttttttggaaaattttcgattttttcccggaaatagaaaaaaattttggcctgagcgggacatttgagtcccgggcctataactcgtcaggggttgattttagcgaaaaattgacttaggacatttttgtagagcattttaaatgctatcgaatggtgtgccatatagccggaaattttcaaaatttttcgagctaggccccctagaaattttcggaaattttttttcggacgaaaatgggggtgaaaaatatttttctggggtaaaataaggtgttgagtacgaatatgatgtctattttaagtttcataatttttggaattttttaaaaattctttattttttggcaattttttggccctcgggattttggcctaatatttgaaaattcataacaaatcgaagggtggatcaattatggtgcaattatattataaaaatagagaaaaatcaggagaa

SEQ ID NO: 26187 - DNA, 2564 bp, Heterodera glycines
  unsure (1)..(2564): unsure at all n locations
agaaaagcgttgattcatcgcattggtgaagaaaaagggccaaaaattggaaaaaaagtataaataaatggacatcagcagcagagaaagggtatcatcatcaatcaggtcaatgtgatcatttgggttaatccaaaatgggaaatggtcatcgctttaaggagaaacagtaataaaagtcatttggacaaaagaaacagcaaaagatggggtaagtgatcactgatcagagaaagagaatgtcgtgccatcgtttatagcccccacacattcacatcgtggccaagacttttattggtcgaagaagctgaacaagtcgggctgccgcttcggctcacctccgtagtacatgcggtcgtcacccgcggagggagtgcgcccggcggaaagaattgaggacgcactgatgccagcagaggggccaccagcgccaaagacaaagacacggagacgcgaacgacgacggaccaaaatgggcggtgccctcttgctgctgctgcttccgccggtgtttccgacggccatttgtccgcgacagccatcagttcggcagaagaattgccagctctgtcaccagcaacaacagcatcagtgggactgctgaggaacgcgaaatgacacctgctggcaaccagggatgttattttacatggaaaatcaaacaggcatttgctaacccaatacggcctcactttctcgtcgacgaattaggcgctgttatctgtccgggcatgccggatgatgatgaaccgccaaaatgaccatgaaagcgatgcgtttgatgtgccatcggctgcaacaaagctgtgcacgacgacaccatcgacgatgaagcgtcttccgcgaccgctgtgccaacgtttgagatgctgttcaaactccgatttgagctcgcgcagtcgcaaaaaatgctaagaaatggaaggaggagtcatttttggcgaagtgtttactgaatttaatggacctcattaagctgttcgcatttttgaatggccgagtatactttctcttcaatgtgctctttcagcaaaatttgttcaccgttcaggcactcgttttgcaaggcgtagaaaaagctcagtttggccaacagattctgcaaaaatggactgttttcagacgatattatttcctaaaccatacattccacacggatattcaattttaaattatgaattattgtgtataaatgtttcctgttttttgccccctaattgattcacctcgcgcatcgtctcaaactgcttggcaatgtcgttttgcatgcctcgcgattcgtcgaccatccgttgagcatgattcagaatctcttcaatgcgcagtgcggccaactcgcggtcgcgctcactggccaaacagtccaatgtcaccacagtgtgctaaaaaaattggaaaattttggaaaaaatggaattttaaaaatgaaattgtcaaacaaacaatggttgacctgtttatgcgaacgaacaacacagagggcacagatgaactgctgaattattgttagtttttaccatttaaaacaccaatttttactgtttttaaatttaaataattcaatttccgtggtgttaattctatgagtaaaaatgcaaccaatcattcattttcgaaagtggtggtaagaatttgaggtcgaaataattggaactatttggcttccttcttgtgatcctccgcccacctttttggttggcttattgcagtctttgcaaatgaacagttcgctgtccggcactttcttggcacaggcgtggcaatgtctttgctgctctttcttcaccatttttgcggctcccaatcgcaagaatgaaggcgcgccatcgtccacaaattggacagtctcacggaatttgtcgaccatatctgaaaaggaccaattctaaacatggacagagttggaaggaggagggggaagccgaggaaaactgacaatgagtttgaaaactttaagcaattccctacaaaattcctaacggcatcgatggacctccatttttactatatttttaaaaaaggaaccccaaaattctaaaatttttttggcgaaaatgactacaaattccagcaaaaaacatttcctaattcgggactaaaaaagaaaaatacaccactacaaaacgaatcaagcccccccccccatccctgaagtcaagggtctggctacgccttgtgcaacacgaagttaaatttatatttttttcaagaaatatcttgaataaatttctacggagagagcgcgcagatatacaaagtatagtggaatgttagaaattgtcggcaacctttgatggcgtagttcgtgctcagtccgctgtccggcaccaggcacattttgcggcactgcgggcattgaacattgttttggacggactgcacaagtgtggagaggggaccgacgccaagagtgtcgaaagacaaacaaatgtataatttgaaaaaaacaatagttagaaaagcaacagaaataatcgtcgccgacaatacggtggacaatgttctgaaaagttttcccagtcccattcacacanattcagacccagtaggtggaccnntgcagg

SEQ ID NO: 26188 - DNA, 1907 bp, Heterodera glycines
  unsure (1)..(1907): unsure at all n locations
cagtgccaaattatgagcacacaaacatttttttttgaggggtgggtggctgttatntaatagacaaaaagatttccaaaagagaaaaaaaactttttagaatatttaaaaaatgaaaattttggattttctttttaattatggaaactatatatttntaaagtaaattaataaatttgtaaaatttttatattgccatccaaaattttttgaaatataaagaaaagaaaagaaatgttgattaaaagtatttttattattttaacttagtaattaaaaattttatctctcttgtacctgacctggtactgaaaaacacgtacaactgagtccctaagtcccggtttgaccagttttgaccgggaccgggaaaagtccttggttttttcccggttttcccagccaaaaagtcccggtcccggttttgcccaaaattcccggtcccgtacaactctactctctacaaattggcttttatttttcgttattggcgaagaatttaaattaaaaatcattgattttaaaaataaacgaaatattttttaaaacattcataagttcaacagggaaaaaagccattctgaattgtagaagatttaatttcaaaaacttttgcggcgacatagcgcgggagattaaaggaacaaagtatgaaattgttaaaaacaaaccaaaaaaatcaatggacttgtaaaattattcgaataaataattttttggcattgccactttctccaaaagtacattaaatgaacagggtcgagagggcttgaaaagagtccattagcagataagaaaaaacacttaaaaatcggcatcaataaaaaaatgtgaaatattaaacaaaaataacattttagcgtaaaatttaacaacttagtatatattgtaattaatctttaaggtatgaaaaaattaggataacaaaatcgtgaaatatggcaataaatacggatcaaaaatagcgaaatattatggacataaatttttacaaatttgggagataaatatttttttctaaaaacgctttaaattaacatttatgcctgggggaaaaacttaaatatttaaatattcatttggattaataaaaacaaaactagtaagtttcgtcaaaagtgccgcggctcagcctattttttgaaaacaattctcatttgtcactgtcgtgcgtcgacaaaagtaatgaacgtatggagacgaaaatggataaatgaatgggaatgacattttcggcaacgccacgcaaaaaaaaaggttttcgaaaattaatttagctccggaactgctgtctgcagttgattgagacaaatagttaaaaaataaataaaaaaagtaaaattgaacgttatggctattataaagttcttttttttaaattttttaaaattgtacaaataataaaattaacaaaaataattaacttcggtaaataaaatgacaattttaattaggggtcattaaaaagaaaaaaaattatgttttctattgttagagagttctttttttaatttttcaaaattatacaaataataaaattttaaaaaataattaaatttataaaataaatattacaaatcaattaaggtcattaataaaaacgaagaaagattgtatttttgtgaagttgtcttgaaacaattgcactcgccgctaattggcccccatatttgttgggctaacaatttcaaacaattaatggaccccgtgacaataggtgaatgaatggatcgggcggctggccggctttatcacattcaattaaaaaagctgggcttccccatttaaatgtgcacaggatttgtccccatttcttccagccgactggcgccgcagcaggagcagcaacaagcaattcccattttattgnggccaattttcaaaaaacaaattaattgccacccatc

SEQ ID NO: 26189 - DNA, 1990 bp, Heterodera glycines
acaaaacctatgtccaattttataacagaaaatttttttttatttggctcaaatattgccttttcaaggccattcgctgtgcattttggcaagcctacaacagcatcgtgcaagtgatcgcttattgcgctgggcttgacgagcagttgaagcgctgctactgtggtccgctgttgtcgctgatcctccactttgacgtcgcaatggtcgcccgtcgtgccgaaactgtcgcaatcgtacggcgactgctcttccaattggccaagcaggcgaaccggcgacgcgtgcagcagcgcagacgactgaagcaacagcagcagccagaagatgatgacgaccaacaacagcaggatgatggcgttgctggaggcggagatgatgaacgtgttgaggaggaagaggagggggacaacgacggcggtgatcagcaggaggaggacaatgatgacgattttattgatgatgacgctgttgtttgttttcaatccgactaaaataaggtggtactccttcagttttcgtgtccccgtttttcggagcagtcaaaacctggttttaatttattttttctgttagaatttgggtctgtcctgtcacactgtttttatcgtgttacattgggattttttactccaccttctctagcctattttgaattagtcacttttccccacccgacagaaaatagtttgtgtgccagaagactgactcattttatttgtaaccgaagccaaaagatgacggggaaggggacatgctgaaagagtaccaaaaaatgtcagtactttgctgattcggaggactaatgacccctcagccaatcaatcaatcaaccaaaaccagcctcgatcaatcaaaaaactcctatttgcccgcccgcgcccattggtctctcgctctctttcagctcaccataaaaaacacatgtactcaagcaggattaaatcattatcatcaattcatcattattttattattatgtattacgttgttggttgtcacatacacatcattcaccgcccacaccattttcccattttctcgagatttgtatattgtgtgctttccgcgatgttcatttcattcattttttgtttttttctcgatcaatttccgtatttcgttgtgtatgatgtgttttgtgtggtgtgtcacactccgccacactctctcgctcttctctttttttgttcttctgttgtaacgtgcttaacaatattataccatataggacacacgagtttcatccatcacatcatcatcaatcccattcatttcttgttgctctgctggtgtgtgtgagattaaaaggcattaaatgaggaaggaagttgattgaatttagtgtaaatggggatgtactgggcaacagagtcattcgtttctattttttaaatggccaaagaatcgaattctatcacaatctaatttgttgtcttaatttcgtgtatacaatcatttgaatttgaaatggagttgtttcgttagcaggaaaggaaaagcattttcgaatttggcattcgtttttattatggccaaatgtttattgaaatggatttggagttagtggcttctgctgcttaaattaccggaatagaatttatataaatgctaaaataatcagtgtttttactcgctaactttggcgtaattacgttatcaaaatgtcaattttttgcaccaaaaaaaagtagttaaaggaaataccatttttagataaatttccgtaaaattgaatacatttccgatgatggaaccgaccatcgctgaactgtctatgccttacgactcatcagcagcaacgacgtcgcacatgacaaatgcatcgcagagtgagattcgggtggaggtcggtgaacaattggcaaatttagaattttgtatcttttttgtgtccaattttggtaaaaggaggaattgaggatcccttaatttacaataattgttgaaaggttcggatgagtttcttataagtgcatttatcactaat

SEQ ID NO: 26190 - DNA, 1331 bp, Heterodera glycines
taaaaaataaaaaaagaaaatttaattttctttatcccaaagaaatttccatttgtgaagaaattgttggaccgcgcgcgcacatctccgcttactaattttaaattaattacatcgttcatcatccatctcctcatcatttattcgccgttctcacaattttcgtttatgccaattcgaaagtcggcacaccacaatttgaataagtggccacaaaaattccaatcacacaaaaagaaatgggtttttttttggtaaaacaaaagttgccattattttcgggtaaaaaattaaatacatttttttaaattatcaggtaaggtgctggctgaatcgttacaaaaactagcaatttgaaaattttaacaaaaactgttttcggacgtttttggccataactttttttaaaaatacaacgattttttttggcatattccaggctacttagagaacactttgggctaccaaaagatataaagaattgaaaatttggttgcatgagcaaagttaaaacaccatttttgatgtcatgacataatatgtaaaacaaatatgtagatatatttttttctttttaaataaatttttggtgaattttttagagtaaaaataatttctcttttttgtttttaactttaccccaaaattaaatttaattaaatttctttgtttttcgaatgaaaaagagctctaaaagggtgggtggtcgacattttttttaatatatataaaatttgaatggtttaatatttttttattttaaatttattaaatattttaaatataaaacaattttaatattttaaaatgttgagtaattcatttttttttttgaattttatagttcaatggacaagttcaatgagcgaccctccacattgatgcgcttgtcgcgctcctttttccgcttccctgcctatttgcgcgaacgcgtcaaggacaccgcggcgagcagtcgaagttgtcccggctcacagtatgccattcaacactttgtttaatttaataataaattatttaaataatatatttttattttgaaatttttgaaaattcaagaccaagacctggaatgaattgggaaaagttttaggatgaacattgaggttttcgaactttttccaatgcattcttccccaaaaaaccgaccaaaaatcagtgccacgggaaaattatgggaaaatttaatttttgagttaaaaattgataacgaaatttctttaattcatttttggcttgcttttgttattaattaatattaaatgttatttagttactacaaaaatttgcggacattgaaaataaaattctgagtgtttttttttttttgc

SEQ ID NO: 26191 - DNA, 1395 bp, Heterodera glycines
  unsure (1)..(1395): unsure at all n locations
atatagagagtgagtgagaaaatgaagancaaaaaaaatgcatgcgaagaatatagaaggggaatacatttgaggaaacataaaaagaaccaagcagagggagctaaacgaagctgagattggtgaaaaagtgcttgagtttgtgattctgacttgtagattaatcgggataaataattttgagttacggactatcccacgatcggatattttgggggaaaattcttctagttgtgttggtgttttatccatttcttcaccacctaataggtcattagtggtactacaactaaaaaaaatgaattttccctcagctgtcagtttggtgatctatcaaaatacaactcacagcaaaatttaaattttccccgcaaatgtcactttgaattcccgaaccccctcccaaaatttgaatttcccctcatctgtcactttatgacaaatcataattttccccatctgtcactggtgaccaatcaaaaatttccaatcaaaaaatttcccccctcccctcgtctgtcactttttaaatcaagcaaattttctgtcaaaaaagtacaagacaatttgaaaccgttcaataggttttggtttggttccccccccccccaattaactaattaattgtcacccctctcactgctgaccataccaattagcgcaccccggtcagtcaattagtgactaattggcaccccctttccaccacctgtcacttctaattagtgtcagctggcgaaggtggcgaaggtcacgggctgttaactactgaaattgtagaaaacttactagtttttaaaaaaaaaattaaaaaatttccgacttttcatcaaaaatttcggaagtcggaattccgaccccaaaaatgttggaaatcggaagtctttccgtgccatacctggtgcctatcgacatctgcgagaaattttatgaaatttaatgcgatttgttaacagattttgtctaaaattgaccaaatgacgcagtttttgactcaatttctacaggattattaagtaaaagcctatccggcggtgccgataggcgccgccgggaaaatttcacaaattttgaatgaaatttgcgatgaaaaatgagttaactttaattaaatttattgtttattcataaaaaataaaaaagtcatcagaagggcgagaaccacttactctgacgactatcagataaatgtcgtagagtaagtgacaaaatatatggatgatcacaggaataaaaaaaaaaatatatgtgaaaataaataataaataaattgaggtcaaagtcaaatgaggtcgaaataccaaatcacttagaaatttgttacattctaactttcccggtcttacagattaccctagtgaacttttaagttttattttaaattgatttaaagaa

SEQ ID NO: 26192 - DNA, 1689 bp, Heterodera glycines
ttttccaaaaaaaaccagtcgatagagctcgaaaaactacgttttggaagtggtctccgtttttccgggaaaattcgttaaaaattcctaaaattcaaaaacccgaaaaccgttttctaggcctagctcgaaaaattttgaaaattttcgaaattttaaaatctaggaaaaatcgggcttttaaagctctacaataagtccgccggccaccccgcgctcaggtcaaagcctaatgagttattcaacggggactgaactgggcaaagttggtactgaaaagttgccaatttctgcagcccttccaagtataggtagaggcctggaattttttttgaaaattagaaaacacttcaacttagtttcctaccagcaagcattttttgatcagagttttagaaaaaaagttatgggccatcaaacgcaagcaaaagtgagaaatcagccgccgggactcagttggccaccggagcggaaaacccttatttttcccagatgcgcctcaaaaagttgtaagacccatccactactttcagggcgctcccggccttcggccgggagattttgttttttaagacgaactgcaacgtttctctatagtagtataaactagcgtggggcgcagtagttgctcggtgtagacagtatgctttgcatagtaattgctcggtgtagacagtatacttttggtatatatgggcgggcgctgacatgagcgcttcgcgcaaaggacttcgttgctagtgcatgcgcggcttcctacgcgccttttttatatttaaggtttaattcggccgcttcttcggcctcaggacgcacactccacatttttcaaatttgccgggatttccaatgaacgccaaaactttgcgtaatttttaaaaattgtctcaaaaattttcacaccgaacctagcctcggctatcctgatcagctcgtccaccacttcttccggactccgtcgttcagtttgttcagcttgttgttgttgttgttgctttgattggatgatgccgttgctgttgttattgttgtcattttcagtctgctgttgttgttgttgttgttgttgttgttgttggtccgcaaccacaaacaaattgtctgttgccgatgctgtcgatggcatcatgttggtgctgtgcagcagcaaattgtcaacatgtgccgaagatgacgatgatgacgcactgccgtggttggaaaaggcattggcggcggatgacagtggttgtggtggcggcatcatttgttgctggttgttctcgtcgtcattaatgcttgcgagaattgagtcgtccattcttaaaaaaagaatgattttgggtggccgaatttggttcaggacaataattgaatgtctatgctttgatagctgctaaatggaaactgtttgtaattttgatgagacacaatttggaaaaatgaacctatgaaaaaaaaacaattactggcgcttaaatagttgctaattactagtagagaatccgttatcatcacgtttatagatcagccaaatcagacatagttttgacagggaaaacaaattgcatttttaatgtttttgtttggaaggtcgagaatgatacctctcccgagaatgcatcggaggggccagcggggaggggtggggggggggagaacaaattgaatgggggggagaagcaaaaaagagaaagagtggcgggagag

SEQ ID NO: 26193 - DNA, 1024 bp, Heterodera glycines
acccaactcatccatacccaactcatccatacccagctcatccatactcagctcatccatacccactccatccataacgctacgagtcatcgtcgtggcatggcattttctgcttatgtggtcatggcatggcattctctgcttatgtggtcttgaccgtggccatttttgattatgcgatctcggtcgtggcattttttggttgtacggtattagtcgtagcattttttgattgtccggtcttagtcgtagcattttttggttgtacggtcttagtcgtagtattttttgattgtacggtcttagtcgtagcattttttgattgtgcggtcttagtcgtagcattttttggttgtacggtcttagtcgtagtattttttggttgtacggtcttagtcgtagtattttttgattgtacggtcttagtcgtagtattttttggttgtgcggtcttagtcgtggcattatatgccacggcggtgtatggatggatcgtgtctatggatgagttgggtatggatgagttgggtatggatgagttgggtttggatgagttgggtttggatgagttgggtatggatgagttgggtatggatgagttgggtatggatgagttgggtatggatgagttgggtatggatgagttgggtttggatgagttgggtatggatgagttgggtttggatgagttgggtttggatgagttgggtatggatgagttgggtatggatgagttgggtatggatgagttgggtatggatgagttgggtatggatgagttgggtatggatgagttgggtatggatgagttgggtatggatgagttgggtatggatgagttgggtatggatgagttgggtttggatgagttgggtttggatgagttgggtatggatgagttgggtatggatgagttgggtatggatgagttgggtatggatgagttgggtcatggatgagttgggtatggatgagccccttaaagggatgagttgggtatggatgagttgggtatatggatgag

SEQ ID NO: 26194 - DNA, 1133 bp, Heterodera glycines
aagaagaagcaaaaaagaaattgaaaaataataggtacaacgccaaaaagaaattgggtgaaattgggaattaaaaaatgaaatttcttcgattaggattttgaattttttttctaggcgacttatcaagtcccaatttttaaaaaaaaatttttttctgaaaatattatagttttcaagtccttctggtttgtaattaaatcacaaaacacatttgtttttctcttattgttcgcccattagcgaaagtaatgccattttcctctgttcgtttctgcacttttgccataattggactttttgcatttccgcttttgcccgacattttgcacccactctcaactaatgacattcacacgccttcctttttacttctccccaaacacctcttcccatgctttgtcttctaattttataatgaatttttgcgggcggcttttggcattactttttgtatgatggaaaaattggcatatttacttgtcaaagcctatgccaaaatctaatagtggggcaattaacgcttttccaataaaaaattcccatgatttatcgaaaattagtagccaccaaaatgcgaaactttactactcgagcagcaacttgggacacatccaaggctttccaaaatgcgagagtttaaactagagtcgaaatgcgagattaagaccgaattcctcccccaacaaattcggtattaactcgagtcaaatcccgagattgagactaacccccccccacacctccgaactgctggaatttatccgagtcaaaactcgagactcaaaacattgagcagaaataccccaaaaatgctaaatattgaaagcgagattcgagtccagaaaatttgaaaagttttttggaaaagagtttcgggattcaaaaagctgcacacaaatgcttcgcaattgttccctttaatgagcatgttacgtttaatttcactattattgctcaaaaaatcgggtcgcatttgaaaatttaaaaataattttttgattgtggagtaatgcgatgccggattttcttgcaccgcttttgacaccttaaataatggcttattcaaccgagtgccatccttcacctacacatgttttgccgatggcaaatacagacgacacgacaccttt

SEQ ID NO: 26195 - DNA, 1371 bp, Heterodera glycines
taaaaaatccttgacaaaatcacaaatttcactataatttcaaccaaatgctggacaatctggttgccgaaacggcaaaaatactaatttattcaaaaaaagaaaaaaattcgctttttaaaggatgccctctcgctgctgcatcagatcagcaaaatttccactccgaccatcatttttgagcgcattgtgccctatttggtgaggaggaattttcagcaaaattaatggaattacatatggactcgagaaaaatgaaaatttcatagaaaataattgccacaattcggctcattttgcaacatttcaaacactaaggcttctttttacccacaattctgtagctttttttgaccgtcaataaaaaattatgtactttttgttatgttaagattttgttgcagtgccagaaaaggagagcccggtatttagaagccctttaaaaaaactcattttaatgtgaaattatatttcatgaaatttgtttcaatgcattactggttaagcagaaaatattttatgtattttaggcccatgccatcggtgaccatttcgcgcttgtccgtgccgaggccattctgctgctgtgcgacattctgtccgcctgtgccgacgccattccgccggacgagtgccgtctgctgatcgactttgtgttccccaaactgtgccccattctgatcggttccgcgtgtctgccgcgcattgcgttggccaccaatttgggccgtcttgcgcaaatttcagcgaggcatttcaccacaattttaaattttatttaaaaaaacattgcgttatttttgtcgcctatagacatttgcgccaatgccaaaatcagatttaaagcttatttaaacgatttaagttatccgggattgaaaaaatttaaggtttgaacctgattttggacattggcgcaaatgtccggggctcaaatgtcatgtaagcatatcttttatccagatttttcgaggccagcgtcgcccgaatgcgcagcgaatcgccgcccgtcccagcggcgcaaacggcggaccgaaacggcggcagcggcggtcgaagtccgtcggcggcaaccgttcagcaacaaatgtccagccgattggagaaatttttgtccgaggagaagcgactgttgttggagacggaaaggtgcaagcatttaaaaaaaccattttttgaaattttcaaaaaatataattaaacacagaaaagggaggtgaaaaggggagagaatgaccaacaaaaaataatctctaaagtgtacttactgcacttcaatcccccatttgtccctcgtggaaaaatgataagtttgaaaattcgcatttttaaaaaaaaaaattatagaaaatttttcttaagaaaattcaa

SEQ ID NO: 26196 - DNA, 1328 bp, Heterodera glycines
  unsure (1)..(1328): unsure at all n locations
tcagtcgccgttttatttcgccaaaaaactgttcttaatagtaagatcaaaaatcgaaaattaatgnaatcagttcaagatttttatttttttaaattatttaatttgaatgaaaactttggttgttaaagtaataaaaaaagtaatatgaaaaaggcttcaaattgcattaattatataaaaaatgataaataatcgataaatatttgattttcttttaatttaatttttttttctttattttagagaaaaacctgaacttggcgacaacatatttattaattctcggctgattactctgcattttgatgtgtataaagctgagaaacgaactattgataaagcaatggccaaagaaaactgaaaaaaaactatcaattttttaatttacaatttttgaaaatttaataagcattctttaaaaaataattttgtaagattaaatttataaaaaattatatttatttttacatattaaaaaacaatttttatatatatgaaaaaataagaaaatatttattgtgtttttaccagtggaatgataagcaaagataattcagaaaaaagtatttgtttgttagcattgctttcagctgcgtcaaagcaaagccaaagcaaagttttaaagcacaaaattgagagaaagttcaagcagatcagtggaaatattttggtcagcaaaagaacggtcttcaaattttcgccaatttgaaaacgttggctaagcgaactaaaaaaaattgaaatattttttaaaaatttatattaaactcggtaaaattaataaaactttaatttttaaaatattaaatttaataaacctgtaataaaattcgatatattcttccttctttttgcgatttaactaaataacaaaaaagcttattatataattttaattttttttatggtctaccgtcaatataacatggagaacaccacaaaaaacactaaaaaattattataaaatgagaaaattaattaataaaatgttacatataacaaagaaatgcaaaaaatatgtgccaatgtgtcttcaacggatttacgcgatccaattgaatttggcattgaaaatatgatccatttggcattatgccaacaaacattccgccatcaacaaattgatatgctgaacaaaatgccaataaaatccacttaattcaaaaagagttatagtgaaaaacgcaaaaaagatctcaccattccaatgggaaaagcgtgtcaaaaatggttcaaatgattcattttcatactntacatatcgtaatgtggcgtacagtcgttcgacacaaatcagaaaccctgacccacaacaaatgcacaaa

SEQ ID NO: 26197 - DNA, 1194 bp, Heterodera glycines
tttttgaccaaaattcgttaacaaatcgcattaaaaattaaaacattttcccggtggcgcctatcggcaccgccggaccccctgtttccaaaaagtcttttggaataaccgccgcaaaaaaagtggaatgaaagcaacaaaaaaaaaatcgtcacccgtggggaggtaggaggtacccccctcccacccaagccgaaatcttgggaccgtccctggcctttatttgaacaaaatttattgttgtatacttttacaattgcaggcgcagaatgcggcggcccgtcaaagcgaacaacaacaacagccgaatggcggtaagttttgcattttcgtgtggtatgagtttggtttcaatttggggcccattctcaaataatgactttcatttgctatgagggtgtaggcaatgtggggaacggcggatatgcaatgaatatttatgctccaatgttcgccgcttgcccaatcgattccctcgctctcccccccccccccccccacttgtctctgtatgggtaagaggcaaacgctgcggcatttgtaaataccgtcactatcgattttttacacttaaatttaagacattccttttcaaaaaaagagggaaaaaacggattaggtaggtagatatatgggccactaaatttaattttaaaaaccattaaactgtatactaattttaattttttcgttgttcagcaggctctgttccggctccgcaacaacaacagaatcaggaaaatggcatggagagggccaacgttgaccaggcgctgaacgacgaggctttgggggcacaaaatggtgagtgattttccttttatgactagaaagagcaataaaatgaaatttttttttgcggaataaaaactttttcccccatagtgactggccaccccttcccatgaaaatttttcttggattctggattatctgctcatgctttattgggcgcaaaacattcccctcgcctcccattgaataaacttttataatcataaaattagaaaaagtggtggaaacatttttaaaaatgttttcttgaaatttaaaaaacaaaagattttccttgaaaattcgttaagatttcaaaaaaaaaatttcccagcaggaccaaccggcaccgccggacctctcattttaccttatttttaaattttaacaaaaaatgccaaaaatataccctttttgggg

SEQ ID NO: 26198 - DNA, 1290 bp, Heterodera glycines
ccaaatttgaatggatgcgcgagtaggtcaacagtgagcttcactgccgaaaaccttgagaaatttttgagttgcaattacaaaaacatcagataaaatactatgaggaataaaaaattttaattattttgcacccctaattttcaagtttttttttgtgcatatttggtgcatatcttgtgatttttgtgtatatttggcaattttatttgcatatttatgtgcatattttggttatttttcgtgcatattttttgcagccctgctaataatagaaatattagatagtacgccaaaaggagacacaaaattagagaaaaaaaagatattgtttttctctggcactctctatttattgatacacagcgtactcgtgaatgcagttgtctgagtcgatttctttggggatttgcagttggtcaaggtcggacagttgtcatcgattttttgaccattttcccttgaaattcggtaaaataatgattttttataatcatcaaaaattcaatgaagtataactttttatgtacaagtcatatcctaggaatttttttcaaaaattactccagttttcagtgtattttatggtgttcagacagatcaccatgaaggagtgatctgatcaagtaggtgtgaagtactttgttgttcagcctcaaaagttaagcaagcatgaattatttcagatttttaaaccaattttaagatgaatattactatggttataaattatatggaaattttttcaaaaattaaagggggggacaaaacacagtattacctaaaattttttgatttggtgaaggtttttagtccatataaatccatattttggtggttttcgggaataaatccatatttcgccattttggcctttttatcccatatttcggccatttttggcaaaatttcacaagaaaaatgacaaaaaaaaacgaaaaatacacccctaacgattgactttttggaaatttttaaaaattactcccccaaaaatacgaaaattttgagttttcgccggtcattttggcatttttaataaatattttcgcagttttttgcgaattttttttttttttaaatgaaaattcttttcgaaattttggcaaatttggaagtattttttatacaatgggagacgataaaaatttgcatttttaagtttttaaatccattttttggttgtttattgtatttcagtttatttaaacaaatattgaatatatacaccttttttggaatttttgagggttaaagcatatatttttggcagtttttagtccctatttt

SEQ ID NO: 26199 - DNA, 1657 bp, Heterodera glycines
agaattttcaaagttttttatttctatctttttttatagttcgaaattttctgtaatttttagtaggctaatagagcctgtgaagagctttcgaatgatatcaagattgtttgattcggtcaataacttcaagagttatattgactcaaagttggctcagacggagttggccagacggagttggcccgttccgcccacactatgggtcaaacccagtgttagacaaaattgctcataacgccaaataacgtaattggcgtaaatttttgcgcgctaattcaaaagttacactggtaaatgccttttttgtatttttaatttaattttatcgagcaaaccaaaggcacatagtgctcttatatggtgccaaaaacaaacaaataaaaatgatcaaataaaaaatacaaaatgaataccgtaataaaaatgaataaaaataaatcaaatgttaaaaattcacaggtgattaaaatatagtgtatatgtggcacagaaaatttcctactcagaactcattgcttttagtaaacccctgaattcctttgccttattaatttgcaccgctaccactggaaggttattccagtttcttactatcctatgaaaaaaattattttgtgttttggccgtgtggcgctttactcgcaaaagtaaaggcctcctgggcctttctgagaaaaagatcagcctctaggctggtgaaccctttaataattttaaaagctgttgtcaaatcattaatttttcttctttcttctaatttatgtaaacccgcgatttttagtctttccccatattttttgtacacaaaaccacattttctaagtgcttttcttgtaaaaaatttttgtacccgctcaattttgtctatatctttttttaaattagggttccaaacttcggtagcgtattctaattgaggtcgtacaaaagttttataagctgctgttagagtctttatttccctgcttttcaacactctcaaaatctgaaagcttctaagatatgcgtttcgtataattttgcttatgtgttctgaaaaattaagtttcgagtcaattataatgcccaagtcacgaacattatccgactcagaaatcttttttgagttaataaaatattcttttttcatattatttttccctaaatataaaacaaaacatttttcagttgaaatttctaacccatttatttttgaccatttttccaaagcctcaattgctttatccaactaatttgaatggtcatcgttttcatgtgtataatataatttaacatcatcggcatacatttttatgccaactgatgatgcttcatttgcaataaaggacggcagatcatttataaaaattaaaaagagtaatggccctaagacacttccctggggcactcctgaaaatattctgaaactttctgacaattcctcgccaattttaaccttaaaactccgattttttaaaaagttagttaaaaaattatgaatttttccttcaattccaatctttttgattttttgaagtaataaatcaattggaacagaatcaaacgccttgacaaaatcaatatagattatgtcaatttgttgattcttttgtatagaattatatatatcgtccatcattttaatattttgggttgtagtcgacctattttttaa

SEQ ID NO: 26200 - DNA, 1416 bp, Heterodera glycines
ccacgaccaatggcggcggcaaaatcattgaaagggtcgggaaagaagtatcgcttttacgacaaattgacccaactgtactaaaaattcagttcaaagccttctacggaatgtcttcggccactgcgatgctcaaacaccacggcactgtggcggagtaccgagccagcgaaggcaaaacggtcgaaatcccttaccggtggactgttttaatttcaaatgaacactaatgttaaataacaatttgaagaggtgatgttcgagagacggtgaagtcccttttgggcggagttcgctccgcgtgcacttacatcggcgctcaaaaactgaaggaaatgcctaaaagggccactttcattcgtgtccaaatgcaggccaacgaagtgtacagcgccttcgacgcataaataagcccagaaacttagggactgatcactttttgttatttattttccgttaagatgctaagatcttccgtttaattcattcactttggatttatttttgcattatttgttcctttttgtggcaattgaaactgcttctgatgtcctgacaataattatcgatgtcattgagccaattgcataaagattaaacttaatttcaaaattttaatcaaaaagtgaatgcatcttttgttattttggaaaatatcactgaaagaaaagtcaaaaggaccatggaaaggtggtcatgtctagtgatgctcgagagtctcgactcgagaaaagtctcgggtttttttggtctcgggttttcaagtctcgattttcgagactcgagaccgagacttttttacacccctaatgattgttggcctttggtaaacttctatttttataaattttaggttcttttttgttcaagttttttaatatatgcgtggtccagcgggttgtgttcttagttttgttacttatttttgcgttggatcagttcgcctccaagtattattttttcttctcatttttcaaaattaatgttttttcgatgggagttcaaacacaattttaacaattaaaatcgtaaaaatgtcatttttggactaaatctattaacaaagtgcactaaaaatttcaaaattttctccggcggcgcctatcggcaccgccggacccctgttcccgaaacatttttttgaaaaagagcaccacaaaaaatggtgtaaaaaagtcaatcatatgaaaaggaaaaatgtatggtagcttaaataaggaaaaaaacaaaaatttttgagaaaactcaaaagattgatttttttcgatttttaagtgtgtaagaaaaaatttttgaaaaaagtctcgggtttttttggtctcggtctcggggttttgggtctcggtctcgagtctcggggtcgagtctcggtctcggtctcgagtctcgggaaatttttggtctcgagcatcacta

SEQ ID NO: 26201 - DNA, 1106 bp, Heterodera glycines
gcattagtagcgcaataaaagttttttgttttgatttttcacaatttatttaaaaaagccaaaaaatcccggatccaattttaaaaacgaaaatagtgcacaaaaagtagccgcctcacggcggggcttaaaagcattgtacatcataattaaaagcgaaaataattttcgtatattttttcacaatttatttcaaaagacaacaaaaaattgataaaatgttgaaacgaaatagtgcacaaaaagggagggatagttagacgaaaagaggaatttttaggatgggacgcaccccatctgatattcacccttttctgctccataagaggtcagaggcgactgtgctcattgacacgtagttgtccaattaaggtacttggactttccacagtaaaatgtggtgcaaattttggaactgtcccgcctcacggcggggcttaaaagcatttgtagcgcaataaaagttttttgttttgaatttttcacaatttatttaaaaaagccaaaaaatccggatccaattttaaaaacgaaaatagtgcacaaaaaggagccgcctcacggcggggcttaaaagcattgtacatcataattaaaagcgaaaataattttcgtatattttttcacaatttatttcaaaagacaacaaaaaattgataaaatgttgaaacgaaatagtgcacaaaaagggagggatggttagacgaaaagaggaatttttaggatgggacgcaccccatctgatattcacctttttctgctccataagaggtcagaggcgactgtgctcattgacacgtagttgtccaattaaggtacttggactttccacagtaaaatgtggtgcaaattttggaactgtcccgcctcacggcggggcttaaaagcatttgtagcgcaataaaagttttttgttttgaatttttcacaatttatttaaaaaagccaaaaaatccggatccaattttaaaaacgaaaatagtgcacaaaaagaagccgcctcacggcggggcttataagcattgtacatcataattataagcgagaataattttcgtatattttttcacaatttatatcaaaagacaacaaaaaattgatataat

SEQ ID NO: 26202 - DNA, 1661 bp, Heterodera glycines
ggggatggtagccatccccatagcaaacggtatgggcttggtgtccatcataggattcatcacttatacgcaggaattctgaggctttcccgaagagctaaacgaaatctgatttcagattcgtgatcagcgtcctaaataacctctaaagacatatttctaggaagtttttcggcgaaaaaatttccccactcgaaaaccatgtgcaccccctatggtcccgaattccaaaatcacttttatttttataactttttactaaaaaatgataaaaacatgaaataaaatttatattatagagcaaaaaattgcggatttttgggctatttttattttacaaaatatcttttcagaaccgagtagtgaatttttttctgaaaattcgaaaatttccagaatatctggaataactttttttaattcaaaatagaaataccaaataaagcgcaaaaatttctccgatttttactccattttttaagcctctatacattaaaatagacctgatctaaactgagttatgaattttcaaactttaacccaaaatcccgagggcaaaaaaagtgaccgattttcaaaaaaatttaaaaaattccaaaatttcccaaacaaaaaacaaacatcatattcgtgctcagcaccttattttaccccagaaaaatatttttcaccccacttctcgccctaaacaaattttttgaaaatttctagggggcctagctcgaaaatttttgaaaattttccgacacatggcacaccattcgatagagcttaaaaagctctacaattttgctctaaggcaattttttgctaaaaccgacccctgacgagttatgggcccgggactcaaatgtcccgcttaggccaaaaaaattttctatttccggaaaaaaaccgaaatttttccaaaaatcccaccaatcgatagagctcgaaaaacggttgcttgaaagtggtctccgttttccccggaaaaatcggcaaaaaatcataaaattcaaaaaccccaaaacctcttagggggcctagctcgagaaattttgaaaattttcgaattttttaaatttggaaaaatcgagctcattgagctctataataagttcgctggccaccccccgctcagatcaaaccctggcgagttattcgcctggtactgaactggacaatgttggtactgaatttctccgcgcacctacaggcttttctattataagtagaggcctggaattttttttgacttttagacaacacttcaacttaggttcctaccagcggaaactttttgacttctgttttagaaaaaaagttacgggccctcaaatgcacgaaaaaatgagaaatcagccgctggtactcagctgggcgtcgagaatttttttctatagttttcccggatgcgccgtctcgagctaccccttggtgcaaaatttcagcccggtgtgcccagccgttcccgagaaattggttttagcgatgaaacccctaaccattctaacatatatataactagcgggtgcgtgaaccgtcggctatttagctgggaaaaagcgcttcgcgcttttggagcttcgctacctagactgtgaagcgattcaaattgatcgatttggttggagagatttttttgaatttttaaaaaattattagaggctttaagtcca

SEQ ID NO: 26203 - DNA, 1059 bp, Heterodera glycines
  unsure (1)..(1059): unsure at all n locations
taattaatttaaaatgcgtaattaatctagtnccccncaagggatccctctttgtcgggctcattaaatacctaattaattttaaaatgcgtaattaatcttaatcccccaaagggatccctctttgtcgggctcattaaatacctaattaattttaaaatgcgtaattaatcttagtccccccaagggatccctctttgtcgggctcattaaatacctaattaattttaaaatgcgtaattaatcttaatccccccaagggatccctctttgtcgggctcattaaatacctaattaattttaaaatgcgtaattaatcttaatccccccaagggatccctctttgtcgggctcattaaatacctaattaattttaaaatgcgtaattaatcttaatccccccaagggatccctctttgtcgggctcattaaatacctaattaattttaaaatgcgtaattaatcttaatccccccaagggatccctctttgtcgggctcattaaatacctaattaattttaaaatgcgtaattaatcttaatccccccaagggatccctctttgtcgggctcattaaatacctaattaattttaaaatgcgtaattaatcttaatccccccaagggatccctctttgtcgggctcattaaatacctaattaattttaaaatgcgtaattaatcttaatccccccaagggatccctctttgtcgggctcattaaatacctaattaattttaaaatgcgtaattaatcttaatccccccaagggatccctctttgtcgggctcattaaatacctaattaattttaaaatgcgtaattaatcttaatccccccaagggacccctctttgtcgggctcattaaatacctaattaattttaaaatgcgtaattaatcttaatccccccaagggatccctctttgtcgggctcattaaatacctaattaattttaaaatgcgtaattaatcttaatccccccaagggatccctctttgtcgggctcattaaatacctaatttaatttaaaatgcgtaattaatcttagtccccc

SEQ ID NO: 26204 - DNA, 1417 bp, Heterodera glycines
ttattttaattattagaattaatttgagtttcctctttaaaccgttcaattttttaaatagtattttcgattcttggatttctctacactcaaaaaagcattatgtaaatgaagactttcaatgtataattattattcaataggtattatctattagcctgcaaaatttcatgggttttcaaaaatttgactacttttttttgaatcataaagaattttttttttttgaattgtgcttaatggggagtaattagaaaatctaccaaatgctattatagtttttgtgcgtgcgccagaacaccgtttaatcttgcttgtcaaatgttaagcaattaattttaattcattgtaaatcccctttctcttttccttcctcctggccatttttggtgaattaccattcgttcattagtacagctaattaataagtgcagcacaaaaacaatagtgggccaaaaatgccataattttaaaaatgccaagcaggtgcatgccaaaacataacattaaacaaacaacaacaaaattaacaacataacaccttttttggtttcacctgtggaccacgcattggcaaaaaaacatcccattcacagaatgcagaaaacaaaatcaaaaacaatcatttaaaaataaatcccttggccaaatttggcaccgaaaacacgaaacgacaaaggcacatcaacaaaggttgaaggggaagggagcatttcgttacaaatttattggcattttattattacagaggaaaaagaaatggagttgaaaagggggggggggatggcatggccaattcgggacaattattaattgttaattagaatgggtattatgtttacaaatttaacaataaaacgttagaggtttattgttaaaattgatgatcaaataagggagagggaagaagtggaatgatataattagatggatactcttcactacaattaaggactcattgtcagatatgttttttggcgatttgatgagtgattaacataataaaagtgctagtgtaaaatatattattaattttcaattaaaaatcatttaccataattatggaattgtgagaagaatcagacattttggaaaatttaagattaaaatgaaattttacaaacgatatataacgggcgggaattggttatgataattaaaaagaggaggatggataaccggaacttcaatagaaaaatttagttgaaatatttaattcaaacaaacttaaaaagggttaattcctccttaaagtgtaatgtgtggcgtgctgtttaacacaaaaattaattaattaatgatgcccaacaaatggatgaaattgacggattgccatttttaatgactcattataatgatcaagcttttctgccgtgcaatcaaaaatcgtcatcggttgtaatggggttcagtttga

SEQ ID NO: 26205 - DNA, 583 bp, Heterodera glycines
  unsure (1)..(583): unsure at all n locations
tttttttttttttttgggggggggggggggggggggggaaaaaaaaaaaaaaannnncnnncccccccccccccccccccccccccccccggggggggggggggggggggggagaaaaaaaaaccccccccccccccccccccccaccccccccgggggggggggggggggggggggggggtttttttttgttttttttttatttttttctttcccccccccccaccacaaaaaaaaaagaaaagaaagaagaagggagagggggaggggagggngggggggcgccaccccttttcttttttttttttttttttttttttttttttttttttttttttcctcccccccccccccccccgcgcccgcggggggggggggggggggggggggggggggagagaagaaaaaaaaaaaaaaaaaaaaaaaaaaaaagaaaaaaaaaaaaaaaaaaaccaccgaaagcaagaagcccgcacccgctttttctttttttttttttttttgtttttttttttttttttttttttttttatttttttatttttttttgtgggggggggggggggggggggggggggggggg

SEQ ID NO: 26206 - DNA, 1978 bp, Heterodera glycines
tttttaattttaagggaaaggggtccacacccccaagttaaaaaaaattcccttaggggaattatttaaagggcaatttttggcaatttttcatcctttttggcccagtccaaaggccagggccacccccaaaaaaatggatgagaacatcatcggcgaattaaacgatgatgggcccattgaagaaaaggcggaaaatctccagtgcacatgacatcttcaattgcccgccttcaccaacaatgcgcctcaaattcaaccggaaatcggcacactcatccaaacccaaataagcgcaatgccgaaaaattggctgcgatcggcttttcagcaagggccaatgaatgaagcaacaaataaaaaaggaaatggcggacaaaaaatggggaaaaacctttttcccaatcaacggcagaatcaggcgaaagttggaggaaagttggaaaaactggcgcatcacaatggcagcgaacccatgagctgacaaccgtcgcagcagatgccgtcgaggctttggccgaacatcttcgcgactacaatgttgccgtgtccattctcctggtcacaattgccgccggacttgccgagatgaacaatcactacaagggaaacttcaaagggaacagaaagtgaattctcggccgccggagtgtcgctaatttcatccttagcgacgaaaatttaaaattttatgattcatctgtttaaaataattttacgccaaattcataacctttgtgattttaagcctttttattagtcagcattgtttacatttaaatttctgtcagcccgcctatgtaaaattgccgtatttaaaccattgcaaaatcaacatttcttatcgttcaaatcgttcattaataaatatatttgttcgatcaaaattcactaataaagtgtgaaatataattgaagtattgggaaatccaataaaattaatttaatttaaataaaataaatatttaaattaattcttattgactatctgaaaagagagtcaataaaaataatcaaaatttaaaataaaaaatattttttcttcaaaacataaaattgctaacattttttcctcggcatccgccggaaatgcaattttgtttccagccaaatagtgaagaagccaaatgtttactttcatttaatgaaatatttaatatataaagacaatcattttgtatattgaaaattattataatttttttaattgaaaaataaattacgtttttttttaaatttgttgctttttgagctgtataatgttgttcttgcaaattgcctttttgcttttgcttgcttcaattcaattggcaattggatcaccaattctaaaaagaagaggtgagaatttactgaaaatttttaaatttaattttttgtctcctttttgattaaaatttttaaaaacttttattgttatattaaagaacggttgttcttcataagaatattttatattcatctggattctaatgaaaaattttcagaaaaaaaacttcaaaaaaaaatcaatttttatccattattaattattttaccattaaaatttgtgccatttgagacgaaaaggatgccgcgcaatcgtcgcatacaatattgtagtgtcaaacattgataatgattctcaaattttgtcgcaacaaagcttggatgcccaacattgggccttgaccaacggacttgtcaaattacaatgttactccattaaggacaaaccctggccataatcaaattaattatacaataaatagtattatctattttcatgacactgttgtttcaaaataccctatttacagtacatacacaaaataacgagggacgttggcgcagcgatgatgaagacgtaacacttacaaaccaccaaaaaatttacactaaattcttaaaaatctcacaattttccaactgcggcacttcatatataatatatagggatgtgaaaaatatgtacaacatgtgctcagaatatgtacat

SEQ ID NO: 26207 - DNA, 1682 bp, Heterodera glycines
atgcacagtgctttgctaatgaaaagatttggaagcatatggaaaatttgtgtaaaaattttcttacattttcttaaaggtaaactctaatttgatttattcactccaaaaaatggaattgtaattaaaattgtttaacgaccaatgatcactcattgatgggggggggagtctttttagaaagattttttgatcattttttttaattttaaaaaatttgtgttaaaagcatttaattttttgagtgttaaaagcaaaagcagtgaaaaaatttaaaaaaaaaagaaaattctgtttaagaaatgttattttacctcaagtaaatacttgccaaatttaaatatgttcaaaaatgcagtacgccgcaaacaaacaaaaacccctcacaattccctcccctccattaacgtataaatttcgttgacgttttctgcggaccaaaaaagaaaaatgccaacgtcatgacaaacatggaacagcagcagaacacaaagcaacagcaagcactttgcaaaatttctttgggtaatttcataatttttatgcaatttgaaacaaattaaaaataaagtgaattaatgaaattgaactcaatacgccttaattaaattaaaaaggggtttctaaaaatgtgttcatcaatattttctaaaataaggacataataggtccaaatctacaaaatcaggctttctaagtattctttcgccaattttcaaaagccgggttcagtggccaaattgctaaagggatttttaggctaaaaaaccattcttttattttatcaccgaaaccgagaaaataaagaaaaataaagacaacgtgttcaaataatgacaaatcttagaaataaagacgaaaacgaatttacaattttctatatttttcaccattaaaattaaattctctcaaaattcgctccatgaaatccgtttctcctttctttctctttctctctctctcctttctttctctttctgtcttttctcttttcactcctctctccccctcctttcctctcctttctatctctctttctctcttctatctctccctctcattttatcccttcttctgtatcttttttttcaacgctcttttcttctcatccctcttctctctgctgatgatgatttggtgctctcgtttgaatgcttttcgtctccaccttcgccgccccattcaaccggtgccttcgcttttaagcttctttctgcaccgggcagaagagattttggcgcggatctgcgcagagtattcgataaatgaatcataattattttattgattccttcatccccggaggggatggatttattcgttgcacggggcgaccgatggtgcggggaatggtcattcatcggcggaataaacagcaaaattattcatcaattattcaatatgtaataaatttttattattttaaaatttatttttcaatacactaaaaacttgaaatttttttgttttttatagagaataaaaaatattttttattattcttttttaatttaaaattttttagtctgaattatggacacacaattcatgttgtttgttttttaatgtatatattaaaaaaacgaaatcttggaaaaataaaaaaaaatatatatataattagtctattctttagaatgggttaaaacgttaaaatggacaaatttacgactccgaaaata

SEQ ID NO: 26208 - DNA, 957 bp, Heterodera glycines
gtttctcagtcgtttacccgccggcggggctgcattacttttccagcttagctttagctttctttacataacatgccaagcatgtggcggcgatgcttatacaaagaagtgggaggagtgtctcaatcatcattttcctttttttaattaaatttactctttttgtgcaattaattgcccaacagctcgtaatgagtagaatacctttaattaatgtggaatcttcattttaattactaaatttaattttattttcatttactaaatggcactgtgcctcattaaatgtaattaatatatgtacgcaagccactgatttttacatttttaccatgatctttgggcgaggatttttattatgaaaaaccaccaaaaattaactaaatagtgatgaaaatggcaaaaaaaataatgaaaaagtatcgaaatttttttccttcaaggaaaattaaacaaaaatggtttaaacactggttggagatgaatttcaactcttttttaaataacgaaaaaaattattttattgcatcagaaagtcaatttttaaaagagattttttctttttattcacttttacaaatagaattatagaatttttgccataaaaatatttccaatttttttttagttttaagtagagtgccacgggaccgggacctggtagcggacaactgagtacaactgagtaccaaggtcccggttttgatcgggaccgggactagtcccggttttttccgggttttcccagccaaaaattcccgggttttcaacccaaaaaggtcccggtccagggtttgcccaaaattcccggtcccgtggcactctagttttaagtatcaaatttcaatattttactatatttctttttgttgcacttttgttagaaatttctcaaaaaatgcaaatagtgacgaacaccaaaataatgacgtaactattttagttactaaaagttca

SEQ ID NO: 26209 - DNA, 2285 bp, Heterodera glycines
ctgcgcgttattctgatctagttagtttgccccctcctcttcttcatcatcattcattatcgctgtcgtaatctgtgacttcggcttcagactcagttgaagaactctgggcctcttcttgaagaaagtcgatagctattttaattttcgtttttttacgaatcaaaattatatcatcatcagttggttaccattggaacaatgtgcagcctcccaatcacgaacctttttctcggagcgttcaaccatagaaaaaaataggctgatcggctcaacgtggtttatttttgctaagacttttttaatatggtgtccaaagagtcttcctcaaaatcgaccacgtccgaggcattgtcgtctacacccatttcttcctccagtttggagtacttttttttccagcacatccagcctattttttgttaggaggcgtgatgcaatgtgagtttcgctttaccattcggcacgtgattcgccttgtgccttgatcattagccccagcattgaggtagcggacccatcaaacgaatgacgtcgttttcggttatcagtattgctcgtcgaaggcggtagttcctttttttcttccttaggcgtttcgtttatcgtcatgccaagaaaaacaatttcttcttctcccttttccgctccgtgtcctttttcctccggtttcagaaccgtttctttatcacttttgcattgagggttgtccttgttgtcactgctcattttcttgtccttcaattgttctttaaaagttcttgattagtcattactgaaataaacattgccaaaaaaaactaaatcgaaaatggcattatgaaatgcttaaaattttatcgaaattagcgacaattaaatatattataataggatcaatatcgctcattcattgataaccaaaaggaagaacatcaagctcatcggtgattattcctttttggcataccggaaggtatcgcttgagctgctcacgcgttacaatctgactcgctcgggttggttgaattttgtcatagctgaacacggctggcatttctccttgtcgaccatagttcaaaactttatgacgaaaatgttcgaattgtagtgcttgactgttctgcacatcaaatgttatgccgcgtattttttgcacatatctaatttcgccagttcgctcatcaaccatttttaatgcgtattgctttgcgccttgtagtaaagcttcagtttaaaaaagatagcatagcaacgaagtcactcacctccacagacaaaacttttgatggaataaccggtgtattcctccgacatttgtccaaggaattcgccagtctgcagtggctcaactcctcgacgatgcttaacaattacgctgtctgtgtcctaaacatgatttaagttatgctgatgatttatcagttaaacaaaaaccgtataaagtaattcagctccctccgtgtcgtgcatccaggaaaataatcgtctcttggaggaagctgcggcaatcgaatggtataattttctcttaaaaatatagctgattgactacaattggtagaaccaaagcccgacctccgattgaagccataaggaaagaagggtttgtccgggcagtcaaggccaaatgtgcctttcagtccatccagccgtattggtaggagcaggcatgagtcacgccaaataagaagcgaattcccacgcgaatgttggaggcgaaattcaaaaatttttagcccattcattacaacatctggtctccttctggtctctccgagataacgaagaacgaaatggccatcaaatctggacgcgttgtgtgccttaaatggaaatacattggtgcctgttgctctattattacccaaatatatgtgttaaattcttcactccacgccctcattatccattctacaaagttggcaaccggatcatcgccttcagcttcgctcctttacaagcagtgtccaggataaaataaatcgcaacaaaaagaaagctgcccaatatttgctccgttccattaatccatcctcattcatacatatttcacattgctcaattgcacattgaacagaatcagcacaatcggagcaggtcacacgtgcggacaggaagttgactttatggatttgttgaccatcagccgtcatcggctctaggcgcgtttccgtgtcccaacagacgatacggtagcgctgtttttccaacggtatgcgcatttttttaatgaaacaaccggtatctttgccatgatacacctagaaaaggagggatggtttgctcaattaatgttcatgtga

SEQ ID NO: 26210 - DNA, 1680 bp, Heterodera glycines
aatttaatccataatatatatcaaaaaattttggctcaaagttttttttctctcccgtgaaaaacccaaaatgcacagaacccgggagagtttattataccctcaccagcacgctgaacctaataaaatataaacgttttttattataataaaaatagggataatattttatatattaaacagatatggttataaaatttcttttaaaaaataattaccaatcactatgataatgttttttttgctagtcacaagcttcgaaaaaatatacaaaaaaaaaatgttttagataccaaaaattactaaacactatgtgaaaatatatttttcttaaaatcttatctttattgataactcacagttcggatacatcggatcccattttcacggatgatattagggttcaccaaaattgacttattccgcaaatattccggatcatttgtgaattctttaacaaaaaaggttgagagcagatttttaaatttcaaaaaatctgccgccggaatcgaatacctgaaaatacattgtcataaaaagacccccccccccactaaaagtaccatatagttatgccaacattgtctgttccacttgaagggcacaataaattcacactataaaggtcagaattctcagtgtgggcggtaaaatatgagccggcttttcgtaaataaaaatagggcgacgtaattccctcaattggaacaccaagaccaccattatttgtcgataaaaactgtagttctaagatggagcccaaagatggctgccagtctttgtcacccttttgcataggcaattcttgggcatattcaaatattctttgttcttctgttacgccattccaaaaaacgctaaaattttacttctgtaaacattttctatatattttaagagttatgtcagtaaaaatgcagggtgccccaaaagttctgagagcctattaaaattgttaaaactttatactcatctgtctgtcagccaaaatttccggttgcaaactatctttttaactttttattatcctgtttaaatgctaacctatatagctggggttgtcagttaagcaaacaaaaaaaaggaattaaaaaactttttttttttcaaactccacaaaaaaaatgtccattgataatttcctgcttaaaattataagttaacaaatagaccacacttttcatattgatcgatttccagacatggccactgtgcattttgcttgtaatcagcaatcgttttgtactcctctgataaaacgttttgatgataaaatccagaagcgcgcttttttaattggcattgactttaaaaatataagaaattatttgatattaaaacaaatataagaaattatttggtaataaacaaacataaaaaaatatttgatatttttaagacaaaccgaacaagaacacggtttcggttagtaattctgcatataggaagttgaaatgattccggtatgcgaaaacgataacaccgataagtcgcgaccagacatttagcgatatgatgttatcaaaaaaaataatcaatatttgagcccaaatcatcagagctttggggggatcgttttggcgccgacaatagagtcgtaatcacacattttcgagaatctaagggaaaaaaaatacaaaaaaaaaaagcaaacaataaatttttaccaaacaaaaagga

SEQ ID NO: 26211 - DNA, 1689 bp, Heterodera glycines
ttgtcttttccttcttcggctgtgtttcttccagaattcttttttccttcttcggctgtgtttcttttcagaattgccttgtccttcttcggctgttgtttcttgcagaattgctttttccttcttcggttgtgttattcccagtaccattttggtctgttcccggttcggctgtgtttttcccagtgcccattttgtcttttccttcttcgcctgtgtttttctcaatgccaattttgtcttttccttcttcggttgcatttctcacagaattgccttttccttcttcgcctgtgtttttcccaatgccaattttgtcttttccctctccggctgcatttcttccggactcgccaccgaccgtatttcttccggattcgcctgttccatcttcaattgtatttcttccggatttgccatcgagcgtgttttttccagaattgccttttccttcttcgactgtgtttcttccgttgccaatttggtcttttcccggttcggctgtgttttttccaatgccaatttggtcttttcccggttcggctgtgtttttcgcagtggcaattttgtcttttctttcttcggttgtgtttcttctggtgccgattttgtcttttccttcttcagttgtatttcttccagtgccaattttgtattttccctctccggctgtgtttcttccagaattgctttttccttcttcggctgtgtttctttcagaattgccttttccttcttcggctgtgtttcttccagaattgctttttccttcttcggttgtgtttttcccagtgccattttggtcttttcccggttcggctgtgtttttcccagtgcccattttgtcttttccttcttcgcctgtgtttttctcaatgccaattttgtcttttccttcttcggttgcatttctcacagaattgccttttccttcttcggctgtgtttttcccagtgccaatttggtcttttcccggttcggctgtgtttttcccaatgccaattttgtcttttccttctacggctgtattcttttcagaattgtcttttccttcttcggctgtgtttctcccactgacaattttgtcttttccctctccggctgcatttcttgcggactcgacaccgaccgtatttcttccggattcgcctgtgccatcttctattgtatttcttccggttttgccaccgagcgtattttttccagaattgccttttccttcttcggctgtgtttcttccgttgccaattttgtcttttccttcttcggctgtgtttcttccggaatcgcctgttgaatttattccggatttctcaccgatcgtatttcttccagaattgttttttccttcttcggttgtgtttttaatgccaattttgtcttttccttcttcagttgtatttcttccagtgccaattttgtcttttccttctatggctgtattcttttcagaattgtcttttccttcttcggctgtgtttctcccactgacaattttgtcttttccttcttcggctgtatttcttccagaattgccttttgcttcaccgactgtgtttcgtccggttgcaattttttcttttctttcttcggctgtatttcttctggtgccaattttgtctttttcttcttcaattgtatttcttccagtgccaattttgtcttttctttcttcggctgtatttcttc

SEQ ID NO: 26212 - DNA, 1672 bp, Heterodera glycines
  unsure (1)..(1672): unsure at all n locations
aaaaaagagtccgtaaaattcaaaaacaaaactttttatcaatgcttcattcagtataactccattctgcggccaccgatcagcaaaatgccggacagtttgggcaaaaagtcgatcaatgtggatgaagtaaaattntaaaaattaaaaaaaaaaaaaacaatttttagtggcgccaaattttggacgtcctttggagtgacccgaagcctcagaatggatgttggccaaatgcttttcgtggcggtggcagctattttgggccggatgtgacaaagaaatttttggaaaagtgaatttattttttatttaattggtttattttcagaatgtttatttaacttaaaaatttccctattttatttttttatatttaattatatttacagaaatggcttccgtctgttaattcgatctcacgagtgcaaatatgaaggtccgtccatcataaaagcattattgtataattgtttttttaatgtttatgcattttaaaattaaaaatttaaattcaaatatctaaaaattataaaattttaattgatcaactaattcttataatttttccttcttttttcgaaaaaagctaaaattgtatttgttcaacaaaaatttcatttaaacttaaaatgcttttcatacgaatgttctaacccaataaacattttaaaaatatttttttttgaaaattagggcaatttaaaaaattaaaaaataaattttaaatatttagcaaaaattaaacaatttaaattgatcaactcattttttaattccttttttctttccaaaataagctacctaaattgtttttttccgtttccataaaaaaacatttttaattcgtcaaaaaacaaaaaattcattttgaaatttaaatgtttaaaaaaaattttcaatccaataaattaaaaaaaaaattttttttttcaggttacgaatttatgcatgaaaatcgggtgctcacaatattctcggcctccaattactatgaaactggtagcaacagaggtgcctatgtgaaatttgttggcaaagacaaagcgccacattttgtggtaaatatttttttttctaaaaatttttaaaattttaaattttagcaatacatggccagcaaagtgcacaaaaagatcaccgttcgtgaacggtaattcagaaaaatcacataccaatatgaaaacataaaatttatttataataattttatacaaaaaaaatatgtttattagaattaattttaaataaaaaatacttttattgaatttattttttaattttttaagacttagcattgtcgaacaatctgccatcaaaaaactgagtgaaaaattggtgtccttcaacacggagttgcagaaagaatttggaaaaattgattcgaccggcacaggtgggcaattaatcaattcattaattaataactattttatttatttatttctttctttattatgaacaatgttctgaaattttcgaactcaaatcattttaactcttttgagtttttttaattctattttagttttaaattaaaaaaatatatttttataatttaatactgaccttaaaatacattattctgagttaattaatatattttttccaaaaaattcttttaaatgattttaaataaatttttataaataaataaaaatcaaccaatttaaaa

SEQ ID NO: 26213 - DNA, 1858 bp, Heterodera glycines
  unsure (1)..(1858): unsure at all n locations
acgatcaagagtagggattntaaagataccggaggcttccaatgatttatgcgtccaatcacttaccatcctcagttacttaggccattacgttttctgatttggtcaatgcctacattctaagtatcaatcaaaagcatgaaatttttggttaaaaattattcaaaaaattattcttaacactcgaaaagagctgaatttcgttttttctcattgtatttttcctagtgttagtattatccccgagactaaacttttgcattgatcaaataagcaaaaacaaatggcctaagaaacttatgatagttaatgattaatagacgcataaactgtccataggctgtgaaatatttttagttaacccattttatttagatgtacaaccaaaacgactacaacagacgaccgattcaccagcggctcagtttcaagccaatgaggttttctgtccccaataactcgtgctcattgtcagtcgccatttttcccaggctttccggttacgattttctgcgtcgtcctctccatcgccatacgacgcaattcaaacggcctttttacaaccgcggaagtcatttcagtttcaacagatggcgcacgaacgattggaatcggaggggtgcgtcgatgccttttggacgccgtggccgttggggggacaacaaaaggatgaaaaagtctttggcggagatggaccgcgaacttgaagtttgactcattcgtcaatttattcatttttggcttttccaggaatatatgcgctcatcaaaacacccgcgagtgaaactgaccaaagcgacggactgattgaccattcggaccaaatcaaaagtgtttgtcgtcttccttttgtcgtcttaccaaagcctctctctcccctcacttggtcatttgctgctgatgaattttcgttgatatatttcccttttgtttgttctttattttataatggaacatttctctcgaccatttgttcattttggttgtcccgtatctcccgcttcccttccttccctttgctgtttttggaatcgttttctaaacaatgaagccacagaacctaattattgaaatatggaaagaatttgttacatgtcattgctcatttattcatttttgtgaataatgcatgctcaagcaataaaaattaatcagatcaaaggaaatggtctgttttccgccttctcttatgccgtctttccaatgtttttgtgcttcctcttcccgtctcttttgctcatctgcttttgttcgacccgtccgcgtgcgcttcgccccttcccccacgggggaacttcatttgggtcataatttcaaaacaatttccataaaactgccattattaaattagccatttgaccgtttattcaggctccgttcgcactgctttgttcaattttctgtgggcacgtaaatacaacgggaaatttgtgttgcgaatcgaagacaccgacagagagcgattggtggagggatcggagcaaagggtggtctgaaggaggaggccagaaccgactttcctcttcttcagattgagcagaccctctcccactttggacttacacccgacgaaagtccgttgcgtggtggccaatttggttcctattaccaatccgaacggttgcctctttaccgggaattggctgatcagttggttgacatcggccattcgtacaagtgcttctgcagtcaagaagtaatcatattatggcttcttggaattctggtgttgttcaactgtccatcccatcgtttagcgactcgactttttgcgtcgaaaagcgaactccgaacgcattccgttccgttacgatggcatttgtcgccagctttcgacagaagaaacgcgagctcggga

SEQ ID NO: 26214 - DNA, 1578 bp, Heterodera glycines
  unsure (1)..(1578): unsure at all n locations
gtttccatcctcaaattccccaattttttttagcgcgggatgcaaattcacggcactgctcaaattcccggcttcgtacccgcattatccgccaacaatgaccttcctcaccgacattcttcatccgaacggtgggaaaagcggctggcgcaacaattcatcaaattccagcaaccccccccccccccccctttcagttgacatgagtggccaggtctgcatcagcattcttcacccgcccggcaatgatccgctcggctatgagcaggcgtccgagcgttggaatcgcaaccgtaccgtggagtccattttggtgtcggtccaactgctgctggcggagccgaacttcaacagtcctgccaatgtggatgctgccgtaagtgattgattcgtccgtcggcacatttttgattgaccatcatcataattttttgtgtccaaatttccagattttgttccgcaacgacccggcacaatacaggaaggaagtgcgacggcgcgtggagagggcatcagcatcgacaccgcgagcgaggtcgtcatcaacaccaccgccggtagcgcagccgccgggagaacagcagcagggtacgccgcaaccgccagcgacaccgccgcaagggcaagaagcgcagcagcagcaacaacaaacgggcgaatggtacctttgatgtgacgtgatgcctctgagtgatgatattattatatagttatgtatatgtattgtattgtatgcatgtgtctgtcgtccgatcatttcataaattaatggtctctctctgtgttcgtttgccctgcttttgttcgctgttgtacatattatgtgtattgtcatcatctaccaattattgtatatacatatgtgtacatatgatggtgtatcgagcaataaactttgaaattgccttgatcctttccaattatgtatggattttgggctaatactggagaattagtgtcccggcgaaatataaattaaaaatttaggtcatattcatcgtcagcgaccctgaaaaccccaaaatacatgttttcagttatccttacatgaaaatatattaggaaaatctcagggtgaccaagtttttttttcaaattcaggccacaaaacactaaattccagatttaaaccccaaaattcagattttattcatttaacatttcatttacatgtaatatttgagtttttaattttacatatttatttaatcacgaaatatttgagcgtatattttgcaataattcaaaaacaaatccagataaagttaattaattttcaagcgtttagggacagaatctaaaagttatctctcttcttttggtcccaagaaaacttttcaaatatttgtgcccttcaaaaaattaataagagagaatcaggcggtgccttggcgccacttggaaaattagcaaaatttgtaatgccaaaaagcggtgccagcgacacattaagtgaccgttatcgtgaatttacgcgcatctctaatagcttaaactaattanattaataagtatgtaaaggtgagaaaattttagaaatggataacccaaagtgctacttttttattgtatttttgg

SEQ ID NO: 26215 - DNA, 1555 bp, Heterodera glycines
actggtgtttttgctaagaaaataacaaggattttttgaaaattttctaattttgaatttttttgaaaccttcgggagtgggggaaacgtagtacaccctcccaacccctttttcttttggcagaacttacttcatctaccaactgtccaatgcacacaatgccctgcgggcgatagaggccgacacaggcgggcaaacgggcgcgcagcatggcgaggtcgtcgccaaattgatagccgagtttgatgatcgccttatcaaggaagagacggtcgatgaactgctggaaggacttgtccgcgtacagcgcgtccaggtccaacaggtacacggagttgaccagtgccagttggagcagactggccctggaggggaacatacattaaataagggcggggtgagaatggaaatatttgtttgacgaatatttcaaaaattttattgaatttaattactgcataaattagttttctttttctaattaggcacctatggtattataacattgggaccttctataaggaagttttccaattccgcgctggtacaaagtgtccatgaccattcaatcaaccgcttactgacctgctcctggccacgtacggattccactcggcgtcaacaccgaccaaaacccggtgcgtcttcttcagaaagtactcgtcaagttggcgttcaaaaacgcgaaacgcgtgcgcagtgtcaatttcgtacacggcgcaacgacgcggcaaagacaaaaactgagtctgttcatccttagagcatagattgaccatgtcgaaagcgctaaaattagaatttcttattttataaaacagaccaaaagcactggaacacatccagccaaacggtgccgagaagcgccaacgggaaaattttgaatatttttgtgagaatttgtctaaaaattcaaaccgaattttgcgatttaagccaattttctaatgacataagggttctttttgggtttggttcggaatttcaataattttcctctgacccgttcgccggtgaccccctttcccccctcgctgtgaaagggttgccaattttgggctcttgcatggccaattatcgcgtccccgggaagcccgcgctgactttgacattcgacagcgttccgtcgacacaaaattgcgccatttttcatgcgcccgtttgtcgtggtggtccttcagcagaacgttcagcagaaatgccttcagcgtgggctgttggacgagcactgtgtgcaccaagtcgttaaagtgttcctccttccacgtcctctccgtgtacagcttgcgagcggcggttttgatcagcgagtgggcccaccgcgggttgaccaggttgtcgtggtcagacatttctgaaaataatttgttgcacacaaaaacccaaatataaatgtcaattatgacgaataaatattaaaaggaacgtaatcaaatgatttttgttctactgactcaaaggctttaaaacgaggtaaaaatattttacactttgtttgaagtgttggcttaaatggatagatttttgcattttttaaggtttttgtcgttcttg

SEQ ID NO: 26216 - DNA, 2421 bp, Heterodera glycines
ttgaatttggcagacggatttttgatcggctttttgtcgtcaggcttcgtgtccgatgcagcggcggcaccaggcttcttgagcggaggctgatgagacggatcatgatgaacaggttgctgatgtggtccaggcttaaacatgtcaaaaatataaatttgttagacaaaatggtaattcgggaagccacaccttgtctgctatcttagccggattcttgagcggctttttgtcatcaggcttcttgtccgattcagcggcgccagacttcttgaatttggcaaacagcgactttttggcatcaggcttcttgtccgttccagcgtcaccagacttcttgaatttggcaaacggattcttgaacggctttttggcatcaggcttcttgtccgatccggcggcaccagacttcttgaatttggcaaacggattcatgaacggctttttggcatcaggcttcttgtccgatccggcggcaccagacttcttgaatttggcaaacggattcttgaacggctttttggcaccaggcttcttggacgacgacaaagcggctttcttctttgcaaaaaaggacttaatcttctttggcgatttcggacgaaagcgctgaaaagggacagaaagaattagacaggacaaaaaacaaatgatgctcaaaaaattgttcacctttttgctggacgcaggtgaaccaaatcgcttccctttcttccggccaagacacataataataataataataataggcaacaattgcagagaacaatgaatgaataaatgaaatgaactgatgtgagcaaaaaagggaattccctcgctatttataaagagggtaatgaaaaattaaaaaatgaaaaaaatgggggggggggatttttttttttttttgataaatttcttatctgtttaagaagattaactaacaagcaatcttcagaaagttttaactgattagtgatcacgaatatgacattcattttgtcagattccgtatacggggacctgaatttgtcgaacaaaaatcggcattcaaattttttttgacatttttgtttcatattcgtgatcagcgactaagctcgttgttggagaaatgggcattgcagaacaatacaattgttgaatgattaaatgctatatgcttatttgttagctttttgtcacgattcggtttttttgttaaaactgtcaaatacaaaatttcagggaaaatttttgtataaaaatggaaaattttacgcgttttcttcacttcatcaattccctattcgtattcaacaattatttgttcgtctccaagtctcgtccaacgtctgcatttattgttcatcaatccttcatcggttggcatccgcgcgcatttcaaaatggacgctctcaaaaagcttgcgagccgtgcacgacaggtaaaaaaaataagcgtattctgaggaatcaatttaaaaatgccatcccacattccagaggtcggcggagatcatgctgaacgcggagaagaccgaaattggtgaggaggccatttctggattccaaaaattaaaaaataacaatttttcccaaaatttcaggcgccgagcttgaagcgctgctgaccaagacagacaagacggaggaggacatgaagaagctggtgcataccatcgaggtgtacctgcagccgaaccctggtggacacttggaatttgcaattttttggaggaaaacactaatttttttcccccaattttcagcagtccgagctctggacggtcttggggaggcgttgaaggtgtggtttttggcacattcacaattagcaacatatttttaatgcgcaccaaaatttaagggagcagcatcgatagtggtgggagccgagtcgaccgtcggaagtgagagaattttaatcggaaaatgctcaatttcattagccccactaattgttgccttttctgttgtttttcagccactttgccacagacagagtcgaaaatggcaccagcagggcaaccccaacccatccaatcgatcaccacgcaaaccttggcaagcctccggcacctccaggagaacgaactacgcaccgtccaggcgtggatttgcttcttttttttactcaatttccgacaatttttaacccaaaatccctcccttatcatttgcagaaggagcgcagcgtgttgaacaagaaacggttggatttggacgtgacaaaaagccgttggaagcgcgcctcggacgacaaaaaacccgctgtacgtcgtgtgttcttcgccgccggggctccatttttcaataattgacaaatttcactgtttttttcaggttgaggcagagttgcgcactgcccaggccgaatttgacacccaactggtgaccatcatcactgcgttggaggctcttcaaacggctatggtgagaattcccaaccccaaaaaa

SEQ ID NO: 26217 - DNA, 2692 bp, Heterodera glycines
  unsure (1)..(2692): unsure at all n locations
ggttttaggttctaaaaaggtgaaaataggtcccaaaaattcgggatttagggggggggaaaatcgaaaagtttttttacaaagcaaaaattttatgcccgatcgttaatgatataattattttataaaaaattctgtcgacaataaataaattttcgagatgagtttttgagaaatttgttaatttcttaggatgtattttataaaaattaaggtcgattcttagtggagtattttttttaattctaggtcggattctagggttgtatttttcatttttattgcatttttttgataatatctggcgcaaaacgccagcatagaatcaaataggtggtacaaaatttttttaagtttttagcctctaaaaataacaatctagaaaataaatgtcaataactggaaaatagcgtaacaacacccaaaaaagcttgtttatcgtgcgtgtcacaccatagaagctcagaaaaaaaaacagtcaccgggaaatttttataattttaatgcaaattctcaacaaattttgtccaaaaaataaccaattttagcgatttgaggcaaaaatttctcaataaaaataagattttagggtccggcggtgccgataggcgccgccgggaaatttttgaaaatttcagtgcaatttattaacaaaatttgtaaaaaattgttaattttttgaaaaaaaattcaaaaaaaatttccgaaaatttccgactttttatcaaaaatttcgaaaatcggaagtcggaatgccgacgtccaaaattttttcggaaatcggaattccgacccaaaaatgtcggaaatcggaattccgtgccatccctgatacagacccgtaaccgaatggcgaggggggcgggggaggaatccctctccaaagcaaatttttctaaattcttcaatttactaaaacacttcagctgctttgatttttttgaaaataaatttaaaaaaaatgagaaatgttttcgaattaacccatttcttttttgttacgggcctgattaccttgaacaatttttcactggaatttgcattactcaattcttaccatgttccgatgtcaaataattgtcctttcttttgtttttccaaattttagtgatttttatgcataagtcttctttctcttcgtttcatttcattttaaaatttctttggcgaataattttttttccctcttatgcaatttccagaggctgtcctccctaaagacaaacaccataaattgtttttatggtataaattagtgctttcaggcttaattggttgcttatagggactgtctctctcattggataattttcttttgtctgttttccatttcctttgtttatgtgctttttgcgtatttttgtttctattcatcagctttttgctttttctcgctgcttggtatttccgtcttatgaataaaaatgtgttttattttattacactgcaattggggctgttttatggtcgggattttctcgcgaaaaaaggtattttttaggacaataaaattgttccgagtcagcgtaactttctcaagtcggtaatcctttggaattgctgtcccaccggaaattgaaattgcttataaactgagagcccttgtgaaactaaatgcgcttcttcaagttcgactttcctagtcggttcaggttctcatatccggaaaattctcggcttttcatgatttagttcctactctcgaaaattcatataatatgggggtgtcatgagtcttgacaactcgaaaaaacttgcatctgctgtttgtagaattatttctaaaacatcaaaacagtggcatattaaaaaaattttttagtttggtgaattttcgatatttatcaagacttgcccaaaataccgaagtaagcaaataagatatgatggagggactgaaatttcatgaaaaattgtctcctacaaattctctccaatatcgagccgagaacatagagaagcaaagaaaaagagatagtgttagtgagcaggacagacaacgaaaggaagaaaaaaagagagaaagagccatcagcgggaaagagaaagcgaactcacactgctgaacacagagaaagagagagagagagagagagagcaaaaggaaaaagagacaacgcagaagagaaagcccctcgggggaacaaaagcgaacggccatttcttctgctcttgggacacacaacctacagcgtcttcttcccatgccaatcagctaattagccactaattaaccccaaataacaaaactgtcccctgcttctcccgacaatggcttccaaatgccttcctcccgaacttttgtacgaaattgtgcctttcgtccttgcgaaaatgctgccccaaattcgctctcgtcctgtcggctgcttcacaaacttttactgccacgtgtcatcaaatggcaaaaggtaagccgtgccatttttgggacaccaaggaattatgctcgaaatgcaatttgtcttgttcaacaaccaaagtatacataaatctctggatcctaatcaacagtaaacaaatttagatttgccaaaaaaacccaccaaacataaaacaaaacctaaaaaacaaaacagctcaatanatattgtaaaaatctctcaaatctcatttttatccgttgctacccgacatttgggaatttataacttgngacctcgacatcgacatttggggacctgacttttgt

SEQ ID NO: 26218 - DNA, 1176 bp, Heterodera glycines
caaaaagaaaagaactgaatgagtgaataccatcaaacaattaattgtttcattgaacgataatacatatttattgggcaacttatgcatccgtccttttttatatttttattcgtaaatttccccctcttttgccccttgcttgatatgtgccgttcccccacccctttccccttctttatccccccccctttctttgccatgtcctgcccctgccccatttccccctttgccacgtgccgttccccttcttttgctgccccttgatatgtgccgtccccccctctttccccgcttttccttcttattcgtccccccctccctccccttttttcgaagctttggatgctaataattctgagattatctccgccttccccctccaacatttagcatcgattttctccgttttctcaacgattccatgcgccgaatgcgcacatttccatccatcactcatttctcattcactcattgttcggcggacggatcgcattcatttgtaaagctccgaaaataaacccccaaaagtgtcctccgattaattcgcttcttttccctcccttccgctgattttggccttccaaatggccgacaaagaatcgtttcgtcaattcggaaaatatgaaaaattttgatgaatttccgagtcattttcatttgccccaaattattttcccattcccgttaatacgcagtaagcaaagaataaaaggagaaaggaactttaaatccgacaacataacataaaatgacatatttttaatgtcaattttgcatattcacaaatttgtgtgcgtacactttcaatcacatttttatatttgcactttattaccgataaagacatcagaatcgaaaaattttaatgcagaaatgcgttttttgagctcctttcttcaaaacaattgagcaaacaagttttttcactaaatttgcggccctatttattacataaaaacattaaagcgtttacttagcttgttgatttttattaaagcatgttggacatatgtatattacaaaaaagagcattatttagagaagggtcgaaaaagtcaaagtggggttcgaaaaccaaacgatggatccttttcaaggaacaaaaatgggtaggctaaatgccttcgagactgaaccttcgagtgggtaaaacgcataatgttcaacaaaatc

SEQ ID NO: 26219 - DNA, 1195 bp, Heterodera glycines
  unsure (1)..(1195): unsure at all n locations
cactatgggtcaagcacactgtgcagagaaaagcctagtactatctcgtcgtttctctttttctttgtaatttctctcactttggcgtactatctcttcattttaattatgtaaaaaacaacatttacttttctatgtgtaactttttttctttatgttaaatccgtaccaaattttgcatagcgatagagaaaaaaattctgcatcgattaataaggaaatttaatacaaaaataaggctcactcaaaagttatttggtgaaaaattttgtgaatttctttttctctctttttggcgtactattttcacatctctaacacacaaaaaacatcaaattcgtaaatgctaataattttggttgtaaaggaacaaaatcactttgagcatttagaatcaatagaaaaaagaataaatttagcattttggttagaaagagctgcctaggacttgagttataacatgataaaagtttgaaattccgacaacttttttctgagatgacaaattacttaacattcgcttagaaaaagattctccttttcaaaatctttttttagataccaaatttgttcagtttgattgggtatgaagcgagttatggctgatcaaaataaacagtgcaaaaaaggcatttaccagtataaattttgaattagcgcgcaaaaatttacgccaaatgcgctatttggcgttatgagcaattttgtctaacactgggcttgacccatagtgtccccatctattctcttaaaaaataagcaaatcaatattttagaaaagtcaatatttttttctaaaaaatttttttaccgggctctagtgctgagattggtttttaactattcggcagtcaaaaaccggggttggctttcatggaataatgccctttcgggaaaactgctacttacaaatcggactcttgccatgaagtttcgcattgcaattaggcaaaaattcagctgctcgcatccaacagtcgacgactgtgaaaaacaaggacattcggaaattcctggacggcatttatgtgtccgagaaggtggccattgccgatgaatgagcacacaaagacaaaaaacccattgttaccccttttttgttggtcagaatggataaagaaattgtgttatttcgccgggtggtttcaacaatttgttttanaataatcagaaaaaaatatttgtgagttcaaag

SEQ ID NO: 26220 - DNA, 1042 bp, Heterodera glycines
tttggtaccattcgaaagctcttgacgagctaagtctaaaaatcattgtatgaagtcgaaccggtgccatctgagcacttggactactgagtcccagtgaaaagtgacatttcagtaccaaagaaataaaggatgaacaaaaagaatttgacgagctaactttcgcaaaagggagcattcgaagacggagcaagtagtggggcgagacggagggcggaggaagcagtgctctaggtccgctctacattttcaaatgtatcaacaaagggtctatctccactctctggcgagatatggcctgtcaaatcagagtgggtccttaaacatgaattttattaatcttaagcatttcttggaggagataatttttagacaacttttttatttctcaatgcatttttatcgcctttttgtctgtaaatggagggaattgccagtgaaaagatgttttggaaaatttttcagttttgtcttaaaaagtcattcgactcgctgtcacaaaacaacttttttttcactggcaatttcttccagaaagagtaaaaatggctataaaattgcatagagatataaaaaatgcgtctaaaaaaattatctcaacaattagtcgggaaagctgaaaaaatttctgttgcaatagcagtggggaggaatgagtattgtataattgtaaaaagaccaattagatatgattaaggcactctataaatgattagaaaataccaaatagtgattaaaaatttttttgttaactatttcggtacttatgtactttacagaccataaaaataattaattgtttttaaacttttctagggggttttcggggtcgctgatcacgaatctgacatccatttcgagcaatctgatacttcgtacttgaattcgaacaaaagtcgaaaactcatttttcatcaaaattcacatttattgcacaaaactattcatatatattgtatggaatagacaatagtgattcataaccatttcgttcagtgcgattgatttacgacaataaaggctgattttggtgaaaattaaa

SEQ ID NO: 26221 - DNA, 1760 bp, Heterodera glycines
ggaatggttgaagtgcttgccgttgctgggcccgccctgttgatgttgtggcgtcttaaaaacaaaatgatttttttttggaaaaaatagtgggccattcattttatttagaaaaaatggttcgccaaattgtataagaagtaaaactggaaaaaaataaaaaatactaattccagtacagtatctccatcgaaaattagcaatggtacggtagtcgaaatggaagcaaaaagatatttaaatgtaaagttacggcatcatacaataaacccaaaaaatccgtaagggcataaaaaggcctgatacggtaaagaaaaattgctttgcactcgcctgcattgagggcggcacaccgccggggcccgctggtgccatcatcggtggaggaccggcgccggccaccaacatttggggatggattggcaccatcacattgtttggcaacagcaccataggcagtccgccagggccacaaatctggcaaaaaaaaaaaatttaaaaatgccaaatatttcctagaataaagtgtccccaggggctttatttttttaagcctcctcagagggggggggggggggggttatatttttggaaataatggtaattgaatttgtttgattttggcacatatttttaaaaacccaccacgggcaccggaaggagcggcggttggccgggcaaatatttgaccgacgacaaaaggccggacggcaaattggcgggccgcaccggcatcatcatacagcgagggatttgggcgggctgtaaatggatgaactttaaagagagaaaattgggcatcaagaatgatatcaatcacggggtcggtgggtggacccatcgaataatttcaaaatcagaaatttcaaaaaacaataattatttttattggaaaatttcaagaaaaaagttttgaacaacattttttatgaattttttggaaaatttttgaaatcattttttaattagtccgtaatattttgaaaaaaaacgttaaatttttttcatttttttctattagaaaaacacctcttctatgtaacaataagaaattttaaaaattgttaattttattttttattattttcttgtcggcgggggggggggaggttccccacttattttcgaatggaaaaataaataaatttcaggttttttaaaaaattttcccatgaaaattcaaaaaatgataaaaaaaaattctttaaaaaattgtttgaagtactttttactagaaaaatttcaataattaataaaaaaaaatcgcttttaaaaatttccggggaggggggcacaaatagaaaggggacgggtggcacggtcgcgcaccataagtgcccgcggcggtggcattggcgcagtgcgaaagtatgtgttggagaatgtgccagccgggtacatggcctctaacctttggcggtgctggaaaaatttttcaaaaattattttttcaaatttaattttttttcggattttcggcaccagcatggtcatgtggaaggcgtattgaggcaacatgttggtgggcgtgccgttgccgggtgccggaatcagcggtcgttggtcaccgccaccattggccctcacctgctccatccaagtgcgacctacaaaaaaaaattttttttttttattttaaaaaaatttcggcattatttaaagagggggtcgcttcgaaaagccaatttcaaatgcccaagccgaagccgagtcgaagaagaaaacattggagattcaaatttttgattttatggactttt

SEQ ID NO: 26222 - DNA, 1469 bp, Heterodera glycines
ggaaaaagacgaggaaaataaaatgaaaaaagcggaaaaacggataaaagagttggaaatgacaacggaagagctgaaaagggagaacaacgaattgaaaaaggaaatgagtaattacgacgaagcgaaaaaagagttagagaggacaagggaggaggtgaaagaagcgaatgagagagtgggaagggcaagggaggaaatggaggaaaagaagagggagtggggcgagagagagtcggtcgaacagctaaaaaagtgagtgaaaagaaataaatgtattacaaaaagaaatgaaattcaacagagaagagacggagaagacattggaattggacaaagagaagtaaatgttggcatattcaaatgagaaatggcaaaagtggacagacttttgaaattggaaaaaaaaagaaaaaaagccatttcattgcagttgtaagactgatcagtgatcactattaacccaaattgaaatgaaattaacaagcgaaattaaaaacaactaactaaaagccctctttttgatgctgaacgcccaagcagcaaaagtctgtgtcaccaatacatacatatgtaaaagtgtgtagaaagaagcaccgattcaacgtttctttaagaattttggaaatggaaaaaaaagtgattgaaatgaattcaaagttggaaagagagcgcgaagaatggaaagagaaagagagaaagctgacggaagagagacaggcgacagagaaggaaatggcaaaacaaagcgaacggtgccgacggaaagaattaattaccatttgaatgaatgtttcagagcattcaaattggcagaggaagtgcagaaatgtgagcagaaactgtcaaaaatggaagagaaagaaagggaatggacagaaaaagtgagagaatgccattgggagggatggaaagcgcaatttgcgactcattgtcaggtgggccgagtggaggacgaaaaagccgaattggcagcggaactgttagccgagagacgacgagtggaaaaaagcgaaacggaatttgaaatggccaaacgattgttggaggagaaggaagagagaatacgggaaaaggagagagcacaaaacgcacaacaattccccggcacagcggaagaaacgcatttcgaactgcaggagcaacagcagacgaaagtgccaatggcaaaggcacgaaaagaaagggacggaaacgatggggacgaaatttgccggatgagcgcggagttggaaaagtgagaagaagcgggccaatcaatgcacggcacggctcccttctgtctgattttggattgagagcatttttgcccttgagatttttaattctgattttttacagcgttggctgccaaactcagtcccagggccaggggaccaatcttaaaagaggataaagggagggcaggggtggtaggtgccgtgtcacttcgtaaaaagcattgtacgaattggcattgactcgggagg

SEQ ID NO: 26223 - DNA, 1165 bp, Heterodera glycines
tatagtacggtactaaagggtgtctgttcccgatacgcacattgttcgttggtaccgtatcactagggttattaagcattgttagggttgggacccaattgtccggtacccattttgaccctttgctttgcttgtatttccctcttcccttcattatgtcacgcccctttttccgcccataaatacccgcgatgttgaccctccccgttcacttctttcttttatgttatttccttcttttattatttgaatattcctcccaatttatttgtgtcttcttttccctgctccaaataaatattgattatttgtttgccatcggccggcataacaattggcgacgcccgtgctgacttttattgcactgtgggcatatttatttgaattgtggacgcagcatttggattttgttgatttgcttgaagcaatcaacaaactttttccaagtttgactctttattggagggagaggtcaacagcaatcgaatttgctgaatcatcgctgaggactgcaattgtttattatctaggcgataataaacaacatttttgttggacctgctaacagtttggcactgttagtagtggaaaattttgcgctgctgattttgtgtctaggcgacacttctcagttcatccacgcgcacccactctgttaacaagctaggcgctgttagcaatagagtggtgaacgacaaaaatgggagacgcagccattcaacgattgacggatattttgcagcaattgttggctgcgcaacagcaaaacgcgccaccggcacagaacgcctcccaattgccaacactcccggacgtggaatgttttgatgctagtcagcatcgtggctgcgaaattgaggattggctcaagcgatttaagttcgtctggactgtgcagcgccgaacctccaggatgagctgaaggtgaagctgttgatgacgaaattgtgtggaccgacgttcagcgaatattgtaagtctgtcttaccgagagaagtgaccgacttcgactttgtggagacttcggagaagctgaaggcattgttcagccgacctcaatcagtttggattgaccggtatgaatgtctccgctcggtgaaagacgacgacgaggattttggcaccttcatcaaccggcagaagaaacttctacgggatttcaact

SEQ ID NO: 26224 - DNA, 1131 bp, Heterodera glycines
tggaaaattttgaaaatctaagtgacattacgccataaaattacaaattttctgaagaattttaagaaataagaacaatagcccgaaataaggacaaatcttacaaataaggacattttattttgtaagatttggaccctccaaataaggacaaatcttataaataaggacagatccgagccctgattttaactgactaagaaaaaagtttcaaaattggcggcgctgaaacagtccgcgccgattaagtctttcgattctgaacaaccttcacctgtcttcaaatgtctcctcaatttcctctctcctttgtttcttttcgcctcttttcgccccttcctctctttctttttccccctcctcttcttcattcctctcctccccctcttccttatttctttttttccctcctcacttcctttcctaagggcgcgttagtttcaccgctcggctgaaccgagcggctactcacagccacacaccggaccgggtcgactgggccccgccgactgggccctaccaactgggccccggattaactgggccccgccaactgggccccaagggccggtcacattttccatttcatactgtcaaaaattatttgatctctcaaaaatttattcataaaattctaagcatccatctgataatttacagataaaaacatttttaagccattttcccttggattcctgtactttttggatgctcggttttcgacctttcatttctccatgtagaaaagtcgtagagacatggaatcttttgcttttgtaacaaattttgcgcccttctatctgtcatattttcctttcatgaaaaatttttccaaccccctaggatggtttcaagccattttacggttttcaggtcacctcgaatgagtgatctgatcacgttggtgcaatggacttttttttgataaaaatcaaaagttatacttacatgaattttccagattttttcttgccctataaaaagttacatgttttcaattgttgaacgtataattttggaacacactgtataactaacagtgaaatgatacatttgctgaagaaatatataaatatgtatttacataaagagacagccttaattatcataattgtcgagtatttgacaatt

SEQ ID NO: 26225 - DNA, 1233 bp, Heterodera glycines
tgatcatatacggccccgtctgcttctaatctctgatcacttttattctgatccttttttgtcttttgattacatgcgctttcccatatgcagatgacatgtacggctcgtcacgcattccccgtccggctgatttggcatccaacaattcatcccgtccggccagccgtgcatcagatatgggctccgactttggcaccaatggtggcgtcaccagcgcgacaccctcacgcattccggcaccgcgtgcccagcagcagaagggggtacgattcgcgagcggaacggggtatgttttcggattgagaaaattgcagatttatttatttttaatttttgtttattccctctaatttttgaaaattcctatctaaaattgaaatttcccattcaaaacaaatacataattaggcgtcatgcctcattaaaacgttgatacatctacttcaactaaaaattatatttttacaggggcagcagtgacgggagtggccgtaatacgccttcggtcctctaatgaatgcgtgtgcggaatgatctggcggtgtcggaatgtttcacccgctaatgaccgcatcaattaacaaaaataaaaaataaatcaaataaaccaaattgtgtcatttgcgtgtcttaatcattattgtctaacactttctttttcaattactttttattccaatttgttcatgcctatcatcatttgttgtcactattattacattttattcatcgtttcatcaaattgaggccagcagagatcgaccggaaagtgtattataagaataaaacattaattcatgtgtattcccccggggtataataatttgccttcattttaaaatatttattttcttttttaatttcttcacaattttgttgccttggttttaaattcattattttttgtcatcattcatttttgagcaaaataaatttatttttttaacattttatcttgtacatttctagccagaattggttattggcatggattaaacgtgaaggcctttgcagtccgcagcaaaaaaaaaattgaataaattttcctgtttatttaaattatttttgatacgaattattacgaaacaaattttttttgtttctgtattgcgatttaacttttcagaatgtgttgattttgcaggaaaatacatttaattttattctttgacatgagaaaatgcaaaacaaaaagagtaattagaaggcattataaaatcagatagataa

SEQ ID NO: 26226 - DNA, 1407 bp, Heterodera glycines
  unsure (1)..(1407): unsure at all n locations
tgagtcgatccaaaaaactcaaatgatgataaatntaaataaataaatntaattattcgattcacaaaatcacggtgccgtagacttaaccctaatgtacggcggaacgcaagtcatttaaaattttttaatatcattcgatagccaaaagagttctctattagccaaaaaaaaataccaaaaatgtttaggttgaacaaagttatgaccaaaagaactcaatgaaccatgttttcagacatttttggtcataacttttttgaaacttagcccaaaatttttgaaattttataggctcatagagaactcttagggctatcgaatgatatcatgaattataaattaggttgattttgagcaaaattatgggtactttttttgaaaattttcatttgatgattattatattatgacatagcaccattcacgagatttttatgtattcgtaagaattggggggtgcgggtttgagagaaaaggttttttaaaattgggagaaaaggaaaaattttgagaagaaatatttcatctatactttatgcaactataaacaataatgcctagtcgctaaaccttcatctttatttgatttctgccttggttcgatactcacacaaaaaaaaattatttcaaaatgaggacagactttttctaagcattgtccaattgtttggaaacctcaaaaattatgttaatggcactgatgcctaaacggattaaagaaaataattccgccatgttttgatacagcctatatttaacaaataaattattaaaaaataaaattcaattaatttaaaattaaaaaaaatttattaatttaatattgaaaaaatcaatatgatttctctacgaaataacttgaaaattcaaaaagttatttttatttatcaattatactcaaataaaatatgtattatccataatattatgaaaagaaaaaataaattaaaaaaaaagtctctattaaaaagaactaaaaaataataaataaaagcactgataaaaaaataagtttgatgaaagaattttgttttccaaataaaactaaaaatattttatcaaattgaaaggaatttggaaaagtaccaagtgacccttcaagttatgatatggaaatactatacaggcccgggaagaagaacaaggtgacagaccttctttcgatataaaaaatatcggaaattgaaaatcaagaggaaaaaattaaaataattcgaaatttaaaaaatcgtaaaaatgttatgtttggacaacaacaaaaaatcgaacgtaacaacattttacattcaaaaagttataaaaaagtaaaattttcaaaataaaccgaggaatgaaggaaagaaatacgttttaaatatttaaacgtacagaaatgatttattaaatctggatgctttttttcaa

SEQ ID NO: 26227 - DNA, 1256 bp, Heterodera glycines
  unsure (1)..(1256): unsure at all n locations
aaaaaatactaattaatttaactattatttatttttttattattatattcaaaaaataggaattataaaagcattattatattagaaatattaaaacaattgccttaaatagtcagaaactattaaataaatctaaaatatttattacctatggaacataaaaagaaaaatagctaacaaataagctataacaatgagaaagaccaacaacaatgttaacaaactaacccagtgtcattgccatgatatttaaatttataaacgaaataacaaaataaatttctgaaaaatgaatttatataagaaaattaaattaatttttattaagaaaatttgggcaaaaatccagatttattcatcaaacattaacaaataatttccaacaaataaattcttattcatttttttgtgaataatattaataatactttttaaaattttgaaaataaattttaattttgccttttaaacaaagattaataataaaaaaattcataaaaaaaaattcacgaaggagacaatgagaaacaccttaactttaaaccaataaaaaaattatggttgcaacctcggccgcgccccgaccccgaacaccgccatttttggcaattttcggggctatccccgaccccgacgcattcaatcccgacaaacactgactccgaacttgctgactccgaaaaaaccgattcccgacttttccaatcccaacggtcggggttgcaaccctgaaataaatcctttaaataaattttgatttcccccatgggggattatttttcaacctcctcgtagactgggcgataattggagactgggggattaagatagagggattatttttcaaaccgtctcctagactgggggataattggagaatgggggattaatggaaattgggggataattagagcaaatacggtaggttatttctatagttgttttggttcaaaagaatattagcgattgacggatcagaggaatcgaacatgaaataaataaaaaacataaaattaaaataaatcctaaattatataaaaaataataaattgccaacaaaacacaacagaaggatgtgatacgtaaggaaccaggtgaatctaataaatatacaacaaattaatttttacaaatcgaatttgatttgtatatatttattaatcttanatataaaaagagatattaattaatcagagctcgtcaataaaatagtaaatcaaattgatanaaatattttcgaacaanccgcaaaagat

SEQ ID NO: 26228 - DNA, 1473 bp, Heterodera glycines
ttcaggtcatgaactcttccgggagtcggcccttccgttggagcatcagcagcatctcctgatgagtcaaccaaatgcgcttgccaaaattgcgaagagacttatctatgagacccgcatgtgtaaagagttaaaagaaattggactgcaaccgcatcatcagcatagactcgaagaagcgcaacagaagtttgctaaaggagagtgtctgacacaatgtgaacttactctactgtttatggaacaacaagagcgcttgcggcagaagcgcttccggcagcagcagcaactgcagcagcaaccaccgcagcagcagcaaccgcagcagcagcagcaaccaccgcaaaattggattttaagtgatttgttaataattttcacaaaattgtctattttatgtgcatgacttaaggttttttgtgaatttgaatgggccccagcggcgcaggtagtcgccgccggaaaacaaattttttagagcgatttagttgtaaatcattcccaaaatttaaatttttgttggttttagtgcttaaaattaaattttggaagataaaaaataactcgcaaaacatagtcaagtttcgttaaaaaaaacgaagtccaatttcgtaaaattacatactcaaaaaaagaaagtcaaatttcgtaaaaaaaaactacgaatttaaaacgaagcacaattttgtaaaagtaacgaaattgataaaaagacaaaggaagaagtcgaaaagcgaagcctgatttcgtaaaagtttcccgaaaattgatcaaaaaattattaaataattaggatttttttttgatttttacgaagtctcctatctttttcccgttcgtcccgaatttttctcacattcattcacattttcatcccaaccaatacgaagtcgaccccccccccccccctttttgtcgattgcgtaaatcccaaaaacacctaaaaacatatttgaattggattgtcaaaattaaaaaattatacatctttgtgagagaaatacagtgccccaaaaaagtcctgactcaaacctgaaaaactatcttatagttcatttaaaaacttgaaataattcatgcttgcataacttttggtgctgatcaaaaaagtaattttcgatatccctaggggctggaaaattttttctagaaatggacaagcccactggaagagcacagaatttgctatcgaattgcttttggaacggtgcatctacgatttgtatagttatacatggttgaataattgatcaccataaaaatgatcaattttggtcagtgccataactttttgtagaagcatccaaatttacaatcttggtatcttttgatagctctaagtgtcctctatttacctggtaaatttcaaaaaattttttattgtgctttcaaaaaagtgtgtcttgtaattttcataaatttatttggtaaactttttaatcacaacttctttgaaacttaacgaattttttt

SEQ ID NO: 26229 - DNA, 1219 bp, Heterodera glycines
aattctttcgccgttcggcttagggggtgatgaactttctgcccacaaaatttggtgtcaatcggacaaggtttgcgcgagttttgctgcgcaagtctcgggggtgcgcgagggggcggggcgtcgggaatgtactgctcgaaatggtgtcagagatgaaattctttcgtcgttcagcttagaggctgctggattgacgacctgtgaaatttgaagtcaatcggaaaaggggtgcgcgagttttgctgcgcaagtctcgggggtgcgcgagggggcggggcgtcgggaatgtactgctcgaaatggtgtcagagatgaaattctttcgtcgttcagcttagaggctgctggattgacgacctgtgaaatttgaagtcaatcggacaagggttgcgcgagttttgctgcgcaagtcttggggtgcgcgaggggcggggcgtcaggaatgtaccgctcaaaatggtgctagagatgaaattctttcgccgttcagcttaggggctgctggattgacgacctgtgaaatttgaagtcaatcggacaaggggtgcgcgagttttgctgcgcaagtctcgggggtgcgcgagggggcggggcgtcgggaatgtactgctcgaaatggtgtcagagatgaaattctttcgtcgttcagcttagaggctgctggattgacgacctgtgaaatttgaagtcaatcggacaaggtttgcgcgagttttgctgcgcaagtcttggggtgcgcgaggggcggggcgtcgggaagtactgctcaaaatggtgccagaggcgaaatttttttgccgttcagcttaggggtggtggaatgatggcctgtgaaatttgaagtcaatcggacaaggggtgcgcgagttttgctgcgcaagtctcgggggtgcgcgagggggcggggcgtcgggaaagtactgcttgaaatggtgctagagatgaaattctttcgtcgttcagcttagggggtgttgcaatgacggcctataaaatcccatctgaacttcaaaaaattcaatgtttacccccctccccactgttgtcacttaattgtgcacagcgatgcggacccctcccattccctagattcttatcttatcacccatctgcaaaggcccggttctccccccacccatcattttcttttcatttcttccgtttatatggattgcggacttttatttatttgttccggccaatattttttatattt

SEQ ID NO: 26230 - DNA, 1907 bp, Heterodera glycines
  unsure (1)..(1907): unsure at all n locations
ttgtccgatttgcgccccctgagcgatgacttcgtccattgctgccacggcgcgttttccacgttgttgcaattcctcagccatgctcaaatgattgtctcgctcgcggtcgattcgtgcaccgatttcgctgagtccattcagcacggcatttgtctccattggcacttggagaccaggtcgggctgccgccttccgttccgccactctgatggctgccgccttgggtttttccattgcggccatcaattcttggcgcgctctttccttcgatgcgcgaaatgcgccctcagctgatgcgcgtccaccggcgaccattgaggcagcaacgcctccagctctggccgcacgtgcctgtccaccacctttgactggcagtggaatgatcggaggcgccgagcattccatagttgcttccgcgcgtttggcaaatgctgccgccttctttcgatccatctccgctttgaccagggcattggtctttgggcagcgagcctcgtcgccagacaaatggccaagcaatccgcatttgttgcagcgcgatttctgcgcattcagcgggcctcctatgcgcgctcgcttcacgaatggtccctcagctgccgccactcgtttggtcttcggtgcctccataggtccctgaattcgaggctttttggtctcttggacaaccggcgatggtgcggcactggccaccgctgcttcgagtgctgccaccgcttcttcctcatcgtcgtcgtcctcctcctccgactcactctccgaaatgtcgattcgaagcgcttcgtcgtcactttcttcatcaatttttacgaaacggacgacttgttgtttttgctgttgttgatggtgttgctgttgctgctgaacgaattcttcgctttcatccaataactttgaaatgtccatggtcggttggagttccggtggttgaagggggaggaataaggaaaggcaagtgactttttgctcctttccctcctccttatatagctgccgccagagggcagaggacacaattttgtgtccctgattcatgccataggcgcacaaaaacggatgactcatgtttgttcccttcattcggaaggaagcatctccatcaacagcgctcatcggccgatgattcaccgcctcttcttcgcttcccgggtgcacatctccgccgaagccgtgcagaaagatctgattcatcggcgcttctcgcattttcaatgaagaaggaccgcgggaaggcgaatgaatcagcgccgatggcaattgttttgcgccgaccgagtgaatcataataaatgcggacagcacaagcaaaattattttgcatttaagcggcccgatcaattcaatcttcgaattcgccggaacattcatcacaattgatcgttcctccgatctcggtggatctccgcgcatttccaccggatttcccgtcggactctcagagtcaatttcttggataatcaccgagtggttatccggtgagatcccttccattggattacccgcccccgactgtggagtgccatgatattccacagtaatggaactccccttgctgcttatggataaccgtttcggggatttttctccctctaggggtcccatgttgacagtttctggattgtcatcccatggcattcgggttccaaagtcaaacgggggatcgcgatcgaacgtttctcgtacttcgatcagttccaatgggtagtagctcacatggtttcgccctcctttctcacacagacatggagcctccgggaacatcaaattccggttgtgccgagtccgaaagtattggatgacaatcgggcctcgtccattgaaggcacccaattcatcggcaccgagtgccgtaatggtcgtgccgaagagaatcatgtttgcattctccgngtttcaaatgcgtg

SEQ ID NO: 26231 - DNA, 1803 bp, Heterodera glycines
taaaagaaaaatgagttcagattgaaattccaataaaaatcaaaatcccctccattaccagccacctcttctaaggttgcacatcgtattgttgtaaaaagttccacccccattccatgttcctctctgtagtgaagcgccacgccactaaaagtcagtccgtcaattatgaagctccgcattttaattgtcccacgacctgttgggtttggccagggattggccgttggtaggggtgaaaagcggcgaatggttggcaatggggagcagcagcagagaagagttcctgttgaaagtccaagttctcattgttaccttccaattgattggacgggaatagtataaaaccaaccctagcagcgcaaaagaaacattaaacagggtaaaaacattacttccctttgcatttttaattttattcgcataaggggggggggcagtgcacctcgcctagacaacgtcgccgcaaaaaaacatccaaataattgtttaaaaaattataaaagtttcttgcggtgcttttaacccggcgactttagctggcaatgttacgcggcgaccctttgttctgctccaaggggaagggggaggtaaagcccttattgctgccctctggctacgccctctgtgcctcctgttttgaaccgacctgtctttggttttgagaccacgtgttgacagcatcgacgggctgctgcctttgctgctgctgtgtgtgcccgtggctgctccctcgcgccccccttcgtcccctccaattaaaattacctcttctcatcccgccctgattttttcgttgccattttggacgttcttcatttaaaatagcggatgatagaaatagcaattaatggtcaaatttaatggattttccccttccccgcccttgaataaccgctgcttttattaagaaaatgcaaagaaacaaaaaatcttcggcgacgtttcgaccggcgcttgttttttcagtgacgttttagggtgtacagaccagccacccattttggtatggttcggcatcatcccaatgtccctccccccgctgaccattcattgtctgttctctttcgctgtttcgcttctgcagatgtttctgttcctcctcgcatattaatggcaattccaactcgtcaaattctgtgtgtctgctgagcacaactacaaaacatggatggccattgacctaaaagcaaataaaaattgaattaaatacgcaatccaaacaaccctttgaaataaaatgaacatctactccttccttaacccgaacggaaaatgagtataaattggttccattggatagagagcatagtctattctatcgcaatttttaatattacgcctccatatcaagaaaccaaatagttatggtgcataaaaaatccaaaattggtgcctgattttgtgtggccattccatttccaattttgttctttttaatgattccccaacatttccaattgattgtttttgtattttcgaggctcataactttttaatttatgatattgggggcgtgtatattaaaatttaataggattgatcacgtacccaatgattccaaaattatacccattctacagttcccttgtcagttggatcgcttgttagctttatgcgtacaatggatgactcacgtgtctgtttcgcaaattatccaaaatagtccgattcgggtcaacaacataataccttagaaatgaataattagttataaaacctattagtttttatgaacctcaaatcttctgattgttcatagttacagtttattttcaatttcatcgcttagagaaacctcca

SEQ ID NO: 26232 - DNA, 2228 bp, Heterodera glycines
  unsure (1)..(2228): unsure at all n locations
cgatttgacaaaagttgactttgatttgacgattctgattcgaagcgggttaacctggaaaagaaaaaaaaatttttttttacgaattttaccagatagaataaaattaaattatntaaaaaatagtattttaaatttttcgtcagcgaattgtattttatttttcttggctttcaaaaaattttttgagtaatagcacaatttttttatgtcggtaaaaaataaaatattttataaaggttttaaaaatatacaataggcctagtattagccggaaaattttaaatttttttttattaaaacaagattaggaacccaaagaaaaagttaaaaattttcaagttaatacaacattattagagcaatagagaatgataatgattgtaaaaattagaaaaaacaaaaacacaaaatttttaactcaaatcaaatcataaaatatcaaaaagataaatttgttggatagaaaatattttttataaaacttttatatcagggctgcaattgaaaaaactcgctttccaaggacggatatactgcttttcaaggacataaggggcgcaaaaaattcgtgaaatccagggacgcgtaaaaagtttttatcatatgcatgaaaaattatgatttattatttttttttaaatggtttgttttttcgccggcattaattttgcgagagaaaaaatattaagattttaagaatttttcagctttaaataatatatttatatttcgagttgggaaagtttctttcttgaattttcaatttataaaaataattttatttgaaaaaaggaccaattttactctcgaacactgcgaaatgaatttgatttgcaattgtgtgggcgaaaatgataaagaatgagatttttctgggatttatgcgaaaaacccttgggttttccaatttttaatacatattttagcatgtatttgttggctttttttaatttagcacagtttcaggctttttgcacataaaaatcccagttctactcatattacaataaatcattttctatatttttaatttttattcagtaacaaaatgggttttccatagaaatgttttgaatttttcgaatgggatttgctgattttttttccaaaaattcaaaaatccaccattgcttgatgagcttgaacttgatgaacttgacttgcctggggccatttgggtgaaaaataggaacaattgccatgaaaaacccgcccgattccgcattattttgttcttttcaatgaacccccatgccttgattctttggtcccaacccttaccaggggatttttgggtgggcattaaggcccaaaaaaaaaaaaaaaactaaaatttttggcttttccccccaccccgggggggttaaccccatttttttttccaaaaaaataattggaaaaaaggggcttattttttttcaaaatttggccccctttttttaaaaaaaaaaaaaaaaaaagggggccaaaatttttttttaaaaaaaaaccgcggttattttggggggcccccccaccccccccggggggggggagaaacccccccccccaattttttttttttttttttttttttaaaaaaaaaagggggggggcgccttttttttttttttttttttttttttttcaaaacccccccaaaaaaaaaaaaatttatttttttttttttaaaaaaaaaaaaaaaaaaaaaaaaaaaaaaaattttccccccccccccccccccccccccgagggcggggggggggttttttttttttttttttttttttttttttttttttttggggggggggggggggggggggggggaaaaaaaaaaaaaaaaaaaaaaaagggggggcgcccccccccccccccccaaaaataatattttgtgggcgccccccccccccccaaataatatttatttttttttgttggagggggggggccccccccccccccccccccttctttttttataaaacaaaaaaattttagtattttatttttttttttttataaaaaacaacggggggggggcgccccgccccccttccctgtttgggtgtttttatatctgggggggggggggggggggtttttttttttttttttttttttttttttttttttttaaaggggggggggggggggggggggcgccccccgcccccccttttcttttagaattttttttttttttatttttttttttttttttttataaaaaaaaaaaaattttt

SEQ ID NO: 26233 - DNA, 1258 bp, Heterodera glycines
ttctatgaattgttaaagtttttacaaatttttttaaggtgcaaaagtggtggtgtctgcaaaacattttctccggggtttagacaatctaggaaaattagtaagcatttgtagtgttccgatacgtatccctgcacaatttggtgagcccctgatcaattccaaattatttatggacgatcaaatttttagaaattattatttatttttgcataattaattcataaatatttttttcagaaaattctttgaaacgcacccaatattatttacatgctagtctaggcactcggatgctttttctatcaaaaagggagatgaataaattttcggggggggggcgaaggcccaccacgaggccgcgaagaggccgagtgagtaccttcggtgcaggaaaattattaaattttaaaaattttttagttgctttttaaatatgccaaaaaatgtaggcttaacttttttagtgaaaattcgatcactcatattttttgctaattgagcagaagcgtaccaaactttgcagggatactccccggtaaaggactaacttacactgaaatgagcgccgagctagctggctcaaaaaaattttcgaaaatctgagtctttcgtttttatttattttttgcaaaattaattcttaaatattttttcagaaagggttctgaaacgcaccaaattttatttacatgttagtttaggcactctgatgctttttctatcaaaaagggagatgaataaatttttaaaaatttttaattcctttttaaacaggccaaaaagtttaggcttaactttttagtgaaaattcaatcactcatttttcgagtagtgatcagaagcgcaccagattttgcaggggcctaaaaaggtcaaggaaaggcgtctctgcgttgatttagcagtagtacctatgaatttaaattttctatgaatttttaaagttttttgaaatttttttaagtgcaaaagtggtggtgtctgcaaaaaattttcacccgggtttaaaaaatctaggaaaattagtaagcatttgtagtgttccgatacgtatccctgcaaaatttggtgagcccctgatcaattacaaattatttatggacgatcaaatttttagaaatttttatttatttttgcataattaattcataaatatttttttcagaaaatgctctgaaacgcaccaaattttatttacatgctagtttaggcactctgatgctttttctatcaaaaagggagatgaataaatttt

SEQ ID NO: 26234 - DNA, 1520 bp, Heterodera glycines
agttatctcagaaatagtacttattttcatacaactttttctgagcttgaccaaattttttaaaattttgcaggctaatagagaaaagctgggctatcgaatggtaccaagaatgtaaaattttattgcctttaagcaaagttatgccatgttttatttttaaaaaatcgctaaaatggcggattttaccaaacgacgattacaaaatgaatatttttgaatttattagacaaattgccagggacttttgtggtccctgactacgaatctcacaccaattcttatccctaacccaaactcgaacaaaaattcctaaaattttaatttttcaaccttcggctttttgttcgaattcagggttagggacaggatttgattaaaattgtgtcagattcgtgatccagacaccccaaaaaccccgggtaacaaattttcatggttttttgttcatgttcattctttggtcacaccttgtgcatgaagtatttcaggatcatgctgatcagctcgttgcaacaatttctgcaatataattaatcggatgggatttatatttaaaatgtttttttttaattttacaataaataaattgtacgacaaaattttgaaatttcgatttttggacatttaagaaaaaatttcttgtaagatattttaaaatttagaaataaatatacacgaaaaaatgccaaatacaatgcaaatttcttatttttcttaaatatttgcttaatatttcagattttttacaaaattttgatcattatttcggcgatttttcgtaaatatggaatttatgtttattattattttattttttttttggttaaatttttagtaaaaaatcgcacggtaaatttttgaagtttcaggtttttgggctggtcaatattcgggttttttttttacaatattttgataattatttcggcattttttcgtaaatatttgtttttaaatacttcacaatttctcataattataaatccctgccccaaaattaataatcgccataaaaaggaccatttttaatttttggatttataaaaaaacaacaacaaacatctaattccactgtaagatgaactatttttttcgcatttgtaaaaaatttttgcatttggccaattttgagtcccattaacatgcataaatattttaaggcatcattatgagttgggtcaattgcaagcgcctcattagcgaaaccaatacctaaagagagcaatttatgtgtaaaatcacaaaatgttgcgcataaaattatattaaaaattgaatatgtaaaaaaaaagtgttaattatgcaacaaaaattttcaaaatggaggacaaaattttccaaaatttctttgaattcattaatctaaaaataaaatctttaaaattgctcaatttggcatgaaaaatcatttttgaagaaaaaaaaaactaaataaagtagtaaaaatttttggattttgaataaaattgagtaagaatgaaaaatttttcagttttcaactttttttgacataaatt

SEQ ID NO: 26235 - DNA, 1508 bp, Heterodera glycines
tgaggtctaaacaatgacaaaagtaaaatctgattacgtattcatgatcagcggcccaaataacccctaaatacatatttttggaagatttttgtgagaaaaatttttccactcaaaaaccatgtgctcccccctttggtcccgaatcccaaaatcacttttatttttgtatctttttttaaaaaaatgataaaaacttgaaataaaatttatcctatagagaaaaaaattgcggatttttgtagtattttacttttcacgagtgacttttcagaaccgagttctgattttttttctgaaatttcgaatttttccagatattctggaatatcttttttatttttagagatagaaattccaaataaatcctataaaattctcctgaattttctctatttttaaagcattattatagttaaatcgatgaaaccatcactgagttatgaattttccaatattatacaaaattccagagggccaaaaaattggaaaatatttttgaatttttaaaaaattccaaaaattccgaaacaaaaaacaaaggtcatattcgtgctcagcacctcaaaataccccagaaaaatatttttcacccgcattttcgtccgaaaaaaaatttccgaaaatttctagggggcctggctcgaaaatttttgaaattttctcgacctatcctacaccattcgatagcattttgaaagctctacaattttgctctaaggcaatttttcgctaaaaccaacccccgacgagttatgggcccgggactcaaatgtcccgctcaggccaaaaattttttctatttccggaaaaaaatcgaaaattttctaaaaatgttgccaatcgatagagctcgaaaaacggttgcttgaaagtggtctccgtttttccgggaaaattcgttaaaaaatcataaaattcaaaaaccgaaaaaccgaattttaggcctaactcgaaaattttggaaattttcgaaatttttaaacatggttcgatagccctttgaaagctctacaaaaagtccgctggcgactacccgctctgagcaaaccctggtgcggcattcagctggtactgaagtgtccaaaaaaagtagttcttacgttgccatttttccaggccaggcctttggtctgatcaaaaaacttttgctggcaaagttgtagagcacagttggggggtgtgccttttggggtccgctaagctctgaaagcaaaagcaaaaaatttcgtaacagtgagactgtcggcaaagttggtttttgagccgctggtactcagttggcccttggaccggaaaacctatagttttcccagatgccccgtctcgagttaccccttggtgcaaaatttcagcccggtgtgcttagccgttcccgagattttgtttttacaaacgaaaccccttaccattctaacatatatataactagcgggtgcgtgaaccgtcggctatttagctgggataaagcgcttcgcgcttcttgagcttcgctacctagattagct

SEQ ID NO: 26236 - DNA, 697 bp, Heterodera glycines
agagagagagtgagagagagagagagagagagagagagattagagaggagagagagagagagaaaggagagagagagaaagagagaggagagagagagagagattagagaggagagagagagagagaaaggagagagagagaaagagagaggagagagagagagagagagaggagagagagagagagattagagaggagagagagaaaggagagagagagaaagcagtgatagcaaagagggagagagagagagagtttacgcacccgctattaattattagtaagtataaattgtatggatttctttacaaattttttaaagtgaattttttcaaaaatgagctagttttgcgtcaaattaaaaaattctagataaaataagcctttttggtctaaaattcaatttatgaagaattttaagaaattaagaaaataattaagtatatcaaatccaaaatcaaagatgtgaacatatataaagcccctgattaaatgtttcgtagcaccgaggaaattttttgacaatttgttgggttttgttaacatattttgcccaaaataattttatttgagcgaatattttggagaaaatacataatgagttttaattattttaagttttaagaatgaattttaaaatggcagcttcgaaataaataaaaaaagaaagaggaaatgggccggcggtgaaaattt

SEQ ID NO: 26237 - DNA, 922 bp, Heterodera glycines
catacaaaatgagattttaaatgtggcaaatttttggcatttgttcgcttccgaaaattttcgctcaaaacagaatatgattattccaattgaagctagaattgagaaaattgacattttttaaggtttgaatccatttatattttggtatagtttatatttatgtcgatttttggtgtttcttagtccatctaatttataatcctaattattaggtattatgcatataacgtattcacagtaaagcaactttatctttaaaaacatccgataggaaagatggaatataataaaaaaagaagatagaatcgaaaacagaacaaacaataaaaagaagaaaaaatcccagccagcccaaaagatcactgcccaaatgatcagtcggctaacgtatgacgacgattacgatcgtttgcaagcacaaaagcaaaacaaaacggcaagaatcagcacaaaaaacaaaacgattccaatcacgataatttcagtgagaacttttgtcgtatggtaatgaccatatttacgataatgaatatcaatgttgccctccttcgagtatataacggaataattaatcaaaaagccagtgcatataatggaaacaattgttgcagaaatacagccacccattgtgctgccatcagcacgctttgttcttcttatgttcaaccggcgattgtttttttggtgtgaaaatggatggttttttgctgaaaaaacaaaaattattcgatgaataagctttagctgttcaacattaaatccatcaagaaatggtgagaaaaataaacattttttctacaaattgttgctgtttttgggttaattcacaaaaaggcagaatttaaaaaatctgattgatcgtcattaaatttgtttaaatttcagtttatgctgcatattatgatttgtaaattttgag

SEQ ID NO: 26238 - DNA, 1067 bp, Heterodera glycines
ccgcagagcctcttcaaattttttccattaccgcaagagctgcggaaattgtgaattaattctcagaaaaatggctatctcgttttaggacaattttctatctcgtaaccccgatgctaatctgttccgcagagcctcttcaaaattttttccattaccgcaagagctgcggaaattgtgaattaattctcagaaaaatggctatctctttttaggacaattttctatctcgtaaccccgatgctaatccgttccgcagagcctcttcaaaattttttccattaccgcaagagctgcggaaattgtgaattaattctcagaaaaatggctatctctttttaggacaattttctatctcgtaaccccgatgctaatctgttccgcagagcctcttcaaaattttttccattaccgcaagagctgcggaaattgtgaattaattctcagaaaaatggctatctctttttaggacaattttctatctcgtaaccccgatgctaatccgttccgcagagcctcttcaaaattttttccattaccgcaagagctgcggaaattgtgaattaattctcagaaaaatggctatctctttttaggacaatattctatctcgtaaccccgatgctaatccgttccgcagagcctcttcaaaattttttccattaccgcaagagctgcggaaattgtgaattaattctcagaaaaatggctatctctttttaggacaattttctatctcgtaaccccgatgctaatccgttccgcagagcctcttcaaaattttttccattaccgcaagagctgcggaaattgtgaattaattctcagaaaaatggctatctctttttaggacaatattctatctcgtaaccccgatgctaatccgttccgcagagcctcttcaaaattttttccattaccgtaagagctgcggaaattgtgaattaattctcagaaaaatggccatctctttttaggacaattttctatctcgtaaccccgatgctaatccgttccgcagagcctcttcaaaattttttccattaccgcaagagctgcggaaattg

SEQ ID NO: 26239 - DNA, 1586 bp, Heterodera glycines
attcgaatttggcacttttcctcggcattattggcgttttgcctttctcctcccttcggcttacccattcatgtacaaatttcgctgaaatgcgctctcgagaatgttcagctggtcaggggcgaaccaagttctgactcggcgtggtggagaagcatcggaggattggcgagaccgtcctgctgaaaaagttttaaatttattatttcgattttaaaattaaatataattcaccgtaattttgctgtttttggtcggcatttgccccttcttcccccaatatcactgaaatgctatgctttaaatggccttccgccgggtgtcgcttttttctttgtgtgtctttcaccctatattttaaaatatttatttgtttatttcatttattgcctttttatagaaaatttcttcgccgccggcagcgaatgattaggcgaagaagctgccccgggagaaactgagcctgaaagcttaattttataaggccttaaataccaatttgctaatgcggcattgcctgtttcagcaaatctgcacagaattttggacacgcatccgtgggaaacctaaggcaaatttgggactggcatatgaatgtgtgaccaaattaatgaaaataatcacctttaattgccgactaatttggcacggcctaaaagaacggaaaataaaggaagagatgccgaaccaatgaagggaaactcgtttgatttttgcaaatggccaacttccgtttcccttccccccccccccactcacttcactccttccattgcccatttggatgatgtgaagccgagtttggtggggcagcggacgaccgttgatgaaaatgccacccaattggttgactctgcccttttaagaggcacggagaagtatttatcaaatgctaattaattcgttttgaattgtaatggtggcacccctcccctcccccccccctccccaaatttcgtcacttttgtttgcatttaattacacttctctccgtgacgacatttgccaaacattgaactgattgaggaaacacgaagacgaaacaaaacaatcatttgcaaattaatttcacaaaaccccaacccaaaaactaattaaaatatgaaatgccaattagaggcataaaaatggttgatttttcattaattttgtcacctgtcctattaatgaagagaactgaaataattgctttgtcgttgaaattggctgctgatcaatgggatttgcggagggaaaatggccaatcatttaggaaaaagcgcggcgtaattaagtgaactaattggctaaatgtggcaattatcttttaattaggcctttttgcgctgatcatttgttgtgaatggattctgtcgggaaaaggtcatttcgatgtttattttatgtctgttgtagtgcttcttctgcccacactttgccatcttttgctcctttaaaggcgcccttttggtgacagccgaccgaccgccgatcattcagccgttttttcataagacaaacaaacactccgcccattctgcccaattttgcgcgtcgctttgtgcctgccattttcccgccccttctccgattgccccccccccccc

SEQ ID NO: 26240 - DNA, 1586 bp, Heterodera glycines
  unsure (1)..(1586): unsure at all n locations
atgtaaataaaattttttaaatggtgattttttntggggaataattctttctaaagggtgaaataggcacaaattgtcataaaatgacctaaatagacttagaatcatcttttagtatttaaaaaattaatttttgatatcccatttcaaaaaaaaaaatttttttggagcacattttcacaaaaaattctataaattctcaaaatttttgaaaaaattgcgaaattttggatatttttggggacatttaataaaaaaaattccttaaaaattctcaaaaaaaatctcaaaatatgtaaataaaagtcgcgatttttgttcgcaaacacaaaaaagaaagtgtttttcctactaattaggctatggagaatccaggaaaaaacatgtatttgcataaaaaaagaagccctgaaaatgaaacattataaaaattattgcatcatgaaaaatttcaaaattttcaatttaaaaaatattttttagtgaattattaaaatgtaaaattgttcattcaaaaaaaattaatttgaaaaaatattaaaaacattgcgaaatcactaaggattacaaataaagcttgaatatttgttacagatttttcatcgttccttcatcatgaaatgccatgcagatgactttcgctgggaagccaatgtcaaaaatagcaaaattttaaaacaaataaatacctgataaggatttttggcatgtactaagaacaatttaattatttattttatttctttgtaaatgaataaaataaattaatttatttaggtagttgcttgcctgtcgccaatgggtcagcgaattccgattggtggacgaacccaagatcggcatggaaaatggaaatgcattcaggaagccaatgcagttaaacttgtccaggaactttgaaaagcacagcaaaatatgaacaatttacacgaatgaacggcttaaaaagatgattaattaataaactcaatttattttagtgtttttttaaaataaaattcgtgtgactgaaagatcactggtgatcaggcccggcggttcgtttcgacagggcggagtcgttatttaaaaacatcataaggggcgttatttaaaaaacaactaatatgaaattttttgggctatgactttttttaaagttaacaaaattttttgaaaatttgcaagctaatagtgaacacttagagctatcgaatgttatcaaggattagcaattggttgcattagagtaaagttataggcaaaattatttattttgttggttttttaaataacgcacataatggtgatatttaaaatacatgtaataaaagttacatacttaagttctttaaaataaatatttttattgctataaaatctatttaaggttgacatataataattatatttatttcaaatcatctcaaaaaaaattctaaacaatccggcaaatggaatggaatcagaggaaagggcatgaagcataagaaagtgtacatggttaggtgcaagacatgaatctcacagagatttatgcgactcgcaacaatcgacaacccttttattatttgccagcaatatcccatcgaatgacgcaccaattt

SEQ ID NO: 26241 - DNA, 1449 bp, Heterodera glycines
  unsure (1)..(1449): unsure at all n locations
attttatgtcaatnntatttttagggttcatcacagaacaatgatttccatggccaccaaaatggtgaactttgacacaattggaaggaatattcaaaagttatttcaatattttacttttgtcaccagtagaagccgagagacggaatgagacgacggccaaaagcacaatcagaaggattttgaaaatgtttggcattttttcggatcttttaatattttattactgtgccgcgttgatttggatgattttcagttaacatatggacagtatttatatacatttgctctcttttgcttgtctcgttggaaaacaaattggtttccgatttgttgatgttattattaattttcatatatttttctgatttcctccgacataatcgacaaaactgttgttgaattaataatttagatataatttttctactttcgtgtaattgttttgccacttttaatttttttatatttattaaaaattctgaaaaataatttaaaagtggcggattaaaccgctgggttgctcttcacttccttgttccaaattaccaccatacgactttaactcatttttaccaggctccaccgcctcgttctagtggtcaaaatatatacatgaatatgtaaaaaaaatcatgaaatatgtacaaaaactcaaaatatgtaaataaaattattgtaagagagtctggatttgtaagagatttggattattcgtttaactgccgaagcgctaggatttaacatttacacatttaatttatctcacatttaatttcctttttgcttaatgtaccgccccttcccgacgataattgatcaatcacatttcactttcatttgtatttaatgttcgccatttttctctgtaatcactccagtcactccggaataatgccacttatcccagtaagtgtttccatcaaaggcgggatgggatccctgctgggcttgatcaccccatggggcctttccttcgggagtttatgagtgtcctatccctccccaatttggaaaccccagtgtcccaatgccagcacgccccaccgcgcacggacgcgctcctttattttaaagggttatattttaatatgtataaaaactaccaaatatgtaaaaaaaaggttgtcttcgaagtttaatgaaacagttataaatttatggaaataaatttttaaaaaaaacataaaaaaaaatacaatataagcaagattattgcgaccccttttattgtttcgacaattctaaggaaattattcattaggtacaaatcgatttctatttaattacaaaaaattcccatttcnccatgattcaaaaatttagaaacggatagctagagcgctgaaagtttgcagtcgggcctaacttttggtgtgcatctcctgaattggaaatacatcgaaaatcccaatttcgatttaaactttttggttcaaaatcggttta

SEQ ID NO: 26242 - DNA, 1480 bp, Heterodera glycines
  unsure (1)..(1480): unsure at all n locations
aaatttaaggcaattactaaaaattaaaanttagaaactctggaccccaaaaggtgtccacattttgntgagtgccaaaatagacttacgattaaggattcatccaacgcttctcaaccgatgctcaccgttttgtcaatcgccggtccaaacactttaggtatgttgatcactttttttgtatgataaatggcacatccctaccataggcttacattggctgcttccccaatatgttttggcggcattgtccgaaattcttctctcaatcaccgctttggaattttgctaccttcaggtcatttttctggttttgatcagaaacaactttgctatataataaaaaactgacaaaatatgccactgggatttttttaaattataaaagaccaaaaattttcacgacaatactcaaccacgagaaaacaagaataaaaatttagttttttcttgtgccaattttgggtatcctttttcagtggcacttttgtatgatcaaatagtgcatttttaggcaccaatttcgctgaaggcgacaatgattaggtaaatggaaggatgcatttgctgttgtatcgtatttcgatttttccactgaccgattcagctattggtttctgatgatctatatcggttggtccctggtgccactgtttgcgcgtttacaatggtcagccgatccggtcggtggtctacggcattttggaaaatttcatttttaatatcgtttatatattttttttcctttttattgcacccttccacgccagctttacatccctccctattaatttctcaggctctatttgaaagctttattaaaaaattagcatcattttttgtatctcacaaattttcacggcgctccaccagttgccaaattcttaattcttaaaaaatctacccaataatttcaggtcccgggatcacccatctttagactggctctctattttgggagggttcattcttctttttttaatctcaaccttatttatcagacctcactataaattaaatactaacctaatcgctgttcgcaaaatttaccacatcaatagatggtgcagcttgtggttgctgcttgcgccatgcttacagccggcgccgtgttcgccgggttggcgcactttcgctacacgtacaaagaccgcctgccgttatacgatggtggcggtggcacgacggtgggcggtgcgccaaatcggaaggcagccgcacaaactagtgccgtcaccggtggcgcactgacagaaatgatcagcggactgcgtgccagcgtggcgcggctgaccaagcgcagggtgatcagactatgaaggaatggaaatggtcaaaatatgaaggaaagaaattgatcggaatatttaaaaaataatgaacattggtttaagaagtgatggtttgagtggaattttaaataaatttgataaaaaaataaaaggctgccatcgtccaaggtcggcttccaaggacgggt

SEQ ID NO: 26243 - DNA, 1369 bp, Heterodera glycines
tccgtcctaagaaacagatgatgttcagcagaaatttcatatatttgccagaaaatgccaacccaattgatcagagagacttaacacatggcactttgaatgccaatttaaaagcacagttattccgttcgctgcttacgtggcggccgggtcaaagtcggcccacacgcggatgaactcgtcaagatgatgaggcccaagaatggacgaatcccttgtcagatagtcaaagttgtccatgatcacagccacgaacaaatttaacatctcaaaaaataagggtttgaaaaaaaagtgtggcgcaattgaaaataatgattttttgaaaatttttacaagccaaaggagagaccattttacttgtaaatttatttatttttggtcatagaaaaacgagaaaagtgttctcgtaggggtttagaggttcactataatcacggtgaccaattccgaagaaaactcgaacaagtcgaaatttgcaaggtttggggttagtaattagcttccaaactcaggaaatcccgcgggatttgaaaaaataatatttttttaaggcaccaaaattttacacaaaattgttttaaaaaaaataaaatattgaaattgtagaaaaaagttagttcgaaatttcaaacattgaaaaaattattttgagaaagaatcaaccaataaatttaaaattttcccaccaaaaatgaggagaggaacacaaaagtgacaaagtatgcgtagctcatgttggtgccgcatggttgtggaccaacgccggacgatttgtccaacatttggagtgccatcgacgcattcgttttggcacaaggctttccagctaaaaattaattgaaatgtatcaatttagatttttctcaaaatgtactatttatttttggattaattactcgagatctatggcctcggttctcgagtctaaaaattttccttggtttttgggtttggtcccgagtctattttcggtctcgacatcggttctcgagtctcagaaatttcgattctcgagcaaccctactgattaaacatcatttttaggtagaattttatttgattgcccttaaaatgtttttgatttaattgcatgaaattaacaaaaaattcatggacatattataaaatatcaaatttttaaaatgattttatcaccagttgagctcaacataatttcttgccacgcctcgcccgttgcacaccttaaaaaaacaaaaataaacatgaggtataattttcaaaaaatatattaccgaaataaaaggataacagcattgaaaaatgaaagaaaattgttgtgccgattaatttcactggatggatccaaaaataatcatttttgtctgatttttttttttgtcttttg

SEQ ID NO: 26244 - DNA, 1177 bp, Heterodera glycines
  unsure (1)..(1177): unsure at all n locations
ttatatttagaatacatataaaatatcttattcttaactttttaggactttaaaagaattattatcaatatttgaacaaaaattcatacaataaaaaggtagaattacggcaaattaccataaaaattataatttttaacaaataagaaatgttaattaaaaaaaccataaagcaataatagaatttttgaaaaaaaaactttaaaatataataaaatattcctgcacatgtaaaatccgcaaacgagagtagcgcaatcaaagcgatgtcttcgattataataataagttttgttttaataataatatttttaaatttctaattaataaaaaaataaattgcagtgtgccaagaaaagctgggaattctatcagatattgttaaaaaattacatttttgtatatttttttatatgcaaatcaataatcttattaaaaatgttttttttatttgttgtaacattaaaaaaaattagttttacttagaaatttaattaaaattaaataaaccaacttaaatctcaattttaaagcatggatatagcaataaaaaaataatatgaaagcaatgtcttatttgtgaagtaatgttacctaagtaaaatttgattatatggaataaaaaattagaatattataaagaaattaagcgtattgtctctttggcacaaacaccgaacggtattgtgattgccatggccgtacgattcgtgatttatgccataaattcaagaaatttataaccaaaaatgaaaaatattataaacaaaattaaagtcaattttaagtaatttaatagctgaatttgaagtaaataaattataaaataaaaaactaattaatcaataaaaaatgtttgtataacttatgctaacctaattaaaaatataaaacctaaaaaaaataataaatcattactttatatagttataaaattattatatatataaacattggacgaaatcaatttattttcaataaaacgcatattaataaattcattattttgtaaaaaaaaataacaaaaatcttattgaatgaaataanaattaatgctattaanntagatacgaattgtttcactttttatgaaggtaccaatcactaaataaggagatgattcaattttaagtagggttaagccccgagccttgngggagcaaaagtcgggggccgg

SEQ ID NO: 26245 - DNA, 808 bp, Heterodera glycines
tgtgggcttcaagtttgaaaattaaaattttcgtcggatttaatttttttttttttttggatcgggagtgagaaagtttttattttaatttatttttttaaataattgtctagttaaaatttattatttttcgtgaccgaattaaattgtataattaaatttaaatatttttattgacatgaggattattttcggttcgcccctactgagacatttcggttcggcccccccggaggctatttttttcggttctctcaccacgtgaaccgattgtatttaaattagagcgaagcgggaccgggaattcattaaataaaacatatcactatttaaattattaataagaagaattcattgacttgtgatatgcgactctctcaaactaatgaagagagctttctttcccctaaagttgggattgaaagaagtgcaaagggcgccctgtgtagctcagtggttagagcattccacggaaaggaagggacgtgggttcgaatcccaccgcaggctgatcttttgcacttacgccatccgccaataataccacatggcgctcctgggtggattatcgcgtctgtgttcgcataaatggaaactaaaggcctaaattaactggcatgcgacactctccactcttacgtgccggcgtacgacggcatataaaagagaccggggaccggtcttctcaagggccggagatgtgatatgcgactctctcaaactaatgaagagagctttctttcccctaaagttgggattgaaaggagtgcaaagggcgccctgtgtagctcagtggttagagcattcc

SEQ ID NO: 26246 - DNA, 1459 bp, Heterodera glycines
tgtgtggaaatcagtatgaaaatgatttccgtgatatcaatcacacgacattgtccgaacgcggagcgttacgcgaagcaatgcgatgtttgtaatttatccgcaataaatagtccaatatttttaaaaacaatttattttcaattattgaagaaatatttgtccagcattaatttcgcacttccgtaccctgaaaaaattgttagttgtctatgatcaaaatgaccgttgcgtggaaaatttttctggaaatctttttttaatccaatctaaaaatttaaagccttgcgggaattatttatgcacattattattgagtataattaattaaatacatatataaaataataaatttaaggcttaaaatgtgcggatgcgccatgtcagaagagttgtccaactcaactggacgtaaaagcatttatcacaagcattgcgaataaagtaaaactgatcatatgattactataaaataatttttttaatttttatttttagaattattatggcgctgctcgacaaatattttcggacaaccctttagggtaatttaattgaaatgctgtaaaaatgagtttccgctgaaggttttcggtgtgctgaccatgatttatcgaacatctatttcaaccacttccaaatcccaagacgaatgcgaagttcggaattagaaaaaataaataaactttgatttttgtttcgaatttggaatcggaattggccaaaataggtgtgtgatttttgattgcaaacccttaactctacagtccctttgtttagaattaatttcaaaatttactgcaccgaaaacataaataaattttaaaattgtaataactaaaaaaatatttcctatttaaaaaatttattgcatataattagtataatattttattgtaggcttacttgtggtatggtgtgtccaacttctgacctctgtgttggctcatgtaatttgtatgccacggaagaaggtgccataaacattggtggacttcaacaatttgccactgaagtaaaaaaacaaacaaataaatttccctaaatgataaaaaacaataaaagttaggatttaataaaaaattaaatacattttaaatatcattttcattatattatatgtcccttattctaagataggaatagaaacttatgcaaagagcttttaattatatcaaatatttaaattttggtttgagtttttcctttttttatagttagccaaaagaaggacataaaagtaaagattttgaagagttttcatgattaataaaaaaaataaatttttaaataaatttaaattaggttttcatgaaaatgaacatccatcaaattgtgtgccgtgagattgagcagggccgaaactctgctcacagtcagccggtggcactgtttggctgtggacctgccagtatttaatgggccacttttcttgcacgacttggctatacggacatta

SEQ ID NO: 26247 - DNA, 1668 bp, Heterodera glycines
  unsure (1)..(1668): unsure at all n locations
aaatttttaatttgctttttaaacatgccaaaaagtttaggcttaaataaaaaaattttcttcggctctagctcttcaataagcaataaaatcgtaccaaattttataggcatactccccggtacaggactaacttaacctgaaaaaatgacaattgtaattgattttaaatttttttagaaattctgagtttttaactgtttatttatttttttacaaaattaattcataagtatttttacagaaactgctctgaaacgcaccaaattttatttacatgctagtttaggcactctgatgctttttctatcaaaaagggagatgaataaaatttttaaaaatttttaattcctttttaaacaggccaaaaagtttaggcttaactttttttcagaaactgatcagaagcgcagcaaactttgcagggatactgaaaggaagagaaataacctattttaaatattatctagtcagttcatttaaataatttttattcaaaaaaatttttttttgggttttcggggcagtccccctgaaccgatgttaggcttaactttttttcagaaactgatcagaagcgcagcaaactttcagggatactgaaaggaagagaaataacctattttaaatattatctagtcagtttatttaaataatttttatctaaaaaatttttttttgggttttcggcagtccccccgaaccgatgcgcccagatttttttcagaaaatgctctgaaacgcaccaaattttatgtacaagttaaataaagctctctgatgcttttactatcaaaaagggagatgaataaaatttttaattgctttttaaacatgccaaaaagtttaggcttaaattaaaaaaattttcttcggttctagctctttcaataagcaataaaatcgtaccaaattttataggcatactccccggtaaaggactaacttaacctgaaaaaatgacaattgtaattggttttaaatttttttagaaattctgagtttttaactgtttattattttttgcaaaattaattcataaatattttttcagaaaatgctctgaaacgcatcaaattttatttacatgctagtttaggcactctgatgcttttactatcaaaaagggagatgaataaaatttttaatttgctttttaaacatgccaaaaagtttaggcttaaattaaaaaaattttcttcggctctagctctttcaataagcaataaaatcgtaccaaattttataagcatactccccggtacaggactaacttaacctgaaaaaatgacaattgtaattgattttaaatttttttagaaattctgagtttttaactgtttatttatttttttacaaaattaattcataagtatttttacagaaactgctctgaaacgcaccaaattttatttacatgctagtttaggcactctgatgctttttctatcaaaaagggagatgaataaaatttttanaaatttttaattcctttttaaacaggccaaaaagtttaggcttaactttttttcagaaactgatcagaagcgcacaaaactttgcagggnatactgaaaggaagagaaataaccctatttaatatnnatctagtcagtcatttaataattttattcaaaaaatttttttttgggtttttcggggcagtcc

SEQ ID NO: 26248 - DNA, 1775 bp, Heterodera glycines
  unsure (1)..(1775): unsure at all n locations
aaatagatgtcagaatcgtgttcaccatccaactgtttctaccactcgtgtgcgttctcgcctcggccgcgtcgctgtcgatttgcagtgtcgntcatgttcgttcacgaagtgtcgtcgtcacagatgagcaaggggaggcgancaccagtcancagaagcagattnngtaagtgaagaaaataatgatggattactgcaaattnttgcctatttatacacttagacagcgttcaaaaaacgagagatgaccaataagnggagatgccagagaaaaaaaataccctctcattttgatgttctctttctttgtctctctgttaatagagaaaaactaaattattgtgggcacattttgacgttaaaaaaatattcgaaattcgtcggttggaccttgaatttcgcgttttggcacaaaaattgggctaataaaacgaattgaccaaaaacgaaacatccttcgtccgcctatataaagggaacggttcgaacaaaatgctctcattttgcgtccgtcagtattttcatcattgttttctatttgccagttgtgtcaaagcatcgttctgctccttcatcgatcacagcaaacggaagaagtcgtcacacgtggtggcatcatggagaaaatcgtctacttaaagctgatgcaaattgtgctcactttggcattcatttggcaactcctttcacttcaccaattctgcggcacttttgccgacccaaaggtgcttctgtttttgttgccaattcatttaacaatgatatgcttttcaggccttcatccatgacatctcagttggccgttgcaaacgctttacgctcattggaaaggactcaaaaagcggcgaatttggcgctgtgttcgaccaggacaaatggcacaaccaactgtcgatgatcagcaccaatggtcgaccaatcgaagaacagcaacaccaattcatggacgaattagccgcgaaattgccatccgctgaacgccattgcattccgataacggtccgccagcaaaacgaataataacgataaattaattttcatttgttttttcagatttcgctttttgacgggattggcaaagacatgaaccccctcaacaatggcactttgcgtcgtttttccctcctattgtgggccgcattttggtcgcttcttccccttggcattgccaccatcatagtgctacactctgtggaacaatataaaggagtgagcgcagtttgtggccacagcaaattcaacccgacaaaatcgcgtccaaaattgcttttcagtcgaaattcgatggatttttttttgaacaaattaaaattaatttttgtcgtttgcatttctgtgttcgcaaagtgtcaaagcatttaccattgtgtcgattaatttgttttgtttttaagttccccttctatttcaatgccttcgcttctatcttcttctggtgtgtctctgctgcgttctcaaccaatttgctgctttattggacgagcttctggacttgcgtcaacttccaagcggaccacacaaatgtgccgttggtcactttggtgtgtttgttttttggcatttattttgcgcatttttcaactttgaggtgctcagcatcgtcatgatgtgttcgtccgtctccgagattttcttcatatattcgctgcgccagaagaagaagaacggaagtgccgtcatcatgtgaacaataaggccagagacgaatggaaagatgctggtgccaacaaacataaccaatgcggcaatgaaacgacgatgttatgaataaa

SEQ ID NO: 26249 - DNA, 1510 bp, Heterodera glycines
cgtcctgaggccgcgaagcggccgaatatcccacaaaaaattaaaaaagggcgcgaagcgcccgacctgaggccgcgaagcggccgaatatcccccaaaaaattaaaaaacgggcgcgaagcgcccgtcctgaggccgcgaagcggccgaatgtccctaaaaaattaaaaaacgggcgcaaagcgcccgtcctgaggccgcgaagcggccgaatgtcccccaaaaaattaaaaaacgggcgcgaagcgcccgtcctgaggccgcgaagcggccgaatgttcccaacaaaattaaagaacgggcgcgaagcgcccgtcctgaggccgcgaagcggccgaatgtcccccaaaaaattaaaaaacgggcgcgaagcgcctgtcctgaggccgcgaagcggccgaatgtcccccaaaaaattaaaaaacgggcgcgaagtgcccgtcctgaggccgcgaagcggccgaatgtcccccaaaaaattaaaaaacgggcgcgaagcgcccgaatatcccccaaaaaattaaaaaacggacgcgaagggcccgtcctgaggccgcgaagcgggcgaattccccccaaaaaattaaaaaacgggcgcgaagcgcccgtcctgaggctgcgatgaattgctaaattacatcaatttctagcgacgcggcgaaaacgcatccctgatcgcgaagcgctttctcacagcaccaaaaacaaaactgttcacaccattgccaactgtgcaccctagtttctactctatatagaataatctcaggactcgtctctaaaaccaaaatctcgggaacgggcgccgggaggggctcgggagtgtgacatcacttaaccaacttttgacggcgcatctgggaaaaatacgggttttccggtccggcggccagttcagcgccagcggcgctgaaacggcccaaaaatttttttgtccgtttttgctggcctgtatctttgcgggaagaagcgggagcgaaaaacgcttggtgggaggattttaagttggagtgtttgggaaaacttggcgtttatttggcaggcctacctgcaaaagcctggcctgtacacgttggcaaaatttgaaaaccatttttggcgtttttcgattttcgcgaataactcgctgggggttaagcggagcgggttgacgccgcttgagcatttgtgtagtttttaaagctgcatccgatggcgctttcagattttgaaaattttgaaaatttttcgagctaggccccctcgaaaatttttcgtttttgaattttattattttttgccgatttttcccaggaaaacggagaccactttcaagcaaccgtttttcgagctctatcgattggtggcatttttaatttcaaaattttccggaaatagaaaaattttccggaattgagctccccatttccgtttgaggcttataactcgtcaggcgttgattttagcggaaatttgtcttagagcatttttgtagagaattttaagctctatctaatgtgctttatctcat

SEQ ID NO: 26250 - DNA, 1224 bp, Heterodera glycines
aattggcaatgctttcgccccgtttcgatgctcttgtggacatccatttcgatggcaaaacggaattgacactttggagaccaatcgcaattcgcaacagtgtcgcagcagtgccagaattacatgtgtttttcgacggtgccaacaaatccgtgccatttccattgcccgacgcccattcgccgccgatgccaaacaacattcgttttaaggaccttcgaattaagtaattggaaaatgaaaaacacttaataaacaaaaagcattcactctttttcagttgcattgaccattccgtgatcacatttcttcgtgccaatcaactcattttccaaaagggcaccaatttgcgtctgtcggttccttttggtccattcaacattgatgatgtccagtcaatttgggatgattttgcgcgtcaaatttggcccatttttgcaccaaccattcgacactttggctttcccgattgccatattttggacacattgcttcgtctcgtttcgccgacaattttcacggatgatcagatcaacattcattcaatcaattccggtcgtcagtttcccgaagcgattggtgatgatcattttgaggggccaacaacagcaacattagatcgatcaactacaaattatgatggatcaattgcaacttctgctgctgctggtcaagcattgtcaaaatggttgcacatttcgagaaaagatgggcagccgaagcaattgcgattccgcaattttgccaatccgccaaacatggaatggcaaaacaatttcaaagaggtgtgacaatatttgttgactctactgcagtttacgcgtccaatcgacttttatgagtccaatcttcaactttttttggccataacttacgttcttacttggtcaatgaccacattcttggcatccaacaaaagattgaagtctgtagaatattttttttatacctaaatttcgaataacaaaaaagtatggccaaaaaaactgaagattggactcataaaagtcgattggaaacttaaactgtaatagagccaaatattgagccaaatatttttgtttagcgactgctgtttttatttgccctttatttcatttccatttttgtttagaaatttctgcgtgccatcacttccgccagctacaaaatttatttcaaaacggacgcttcatttgaaccatttgaattggtgaacgaacgaacgcaagaaaagctgacatt

SEQ ID NO: 26251 - DNA, 1541 bp, Heterodera glycines
  unsure (1)..(1541): unsure at all n locations
aaagttacggatactggctggcccccaatgtccctatcacactgtgttaatgttatttatatntgntctattacatcgaccccancgtagagtgtccatctttgtaaaatatctgtacaagcgctcctttattgtccgattgcccctttcaacgactccgggcgtgaggtcaggactatacatcacatttttgataataaatttttcctcaaaatattttttcatttttccagcctgaaactcgagtccgctgtcgctatatattttcatcgggataattttcgacttttcgaacacccgatcaaaagcctcaatcatgtcctcactcttctttgacttggccggtgcactgaagatcattcgactcagcacgtcgatgcataccaacagatatttgtaaccgtcgttatgctttttcaactggtcaaatatgcacaaatcgcactgccaatcggtatggaagccgctcggtaccgtctttagtctcgggaattttttcctgatgggcttgtgaatcgtgtatgttctctgcttttctaggaatttattaacgtcatcggtcgtaatttccgagtcaatctttttggcctcatttaaaattttttgaatccaagcaaaacttgccggagattttaaattaaaataaatttttgataaaattttctctacagtcttgcccatattagtggtttgaatggtttcttctctcgtgctatgccgtgtgtttttatagattttattgcctttttacttccacgtccccacatgaccttcgatttatcaaccatgtcttttactgttggatccttcagtaaccgatctttaagaaattttgcaccgcgcggtgtttcatctttcttccccgcgagatacaacaaaacatccctataattactgttttcaatcggcaaattcatgttcgactgtacctttccggccgccgtaattttaaataaatctttgttttccttcacgtacctaaaaagaccgtttaaaagggtcgggtgtataatagttttgattggaacgggtgttttgtgtgtggatgttgtttggggttccggagttaactcctcaagggtatcattatttgattcaggatcaggagttcgctctttaagtcttttcctaggaataattattttccgtggttcttcggtctcctgtggtttggattggttattgaggcccagatatggtgcaacatttggaccgggtacatgattctcaatcacgaccttctgtggcctattttcaagtatcccctttaccgtacgtctttctttatagagccaatcatgtctcttcgccttgaggtactcgcttatgccggggtcttgtaaattctgagaaatttttgcgtctaaactcgctttttcattttggagataatcaccactattcatcgcactccgtagagccaaatattccgcctcgggaatcattaacattttctttgcaaatttcatgatgttattttttctaataaatgttgagctcaaacacccagtaccgggaccaagacagctcccagggctata

SEQ ID NO: 26252 - DNA, 783 bp, Heterodera glycines
aaagtacagcgctatatgggaagctattcccgaaggattctggtttccccataaatctgggcgcatcggttcggggggactgccccgaaaacaaaaaaatcgattttttcaagtgtccgtttggggtactcaaacaattatggggagcaaaaatccaacgcagaattaaagtacaggctatagggaagctattccggaaggattcggtctccccataaatctgggcgcatcggttcggggggactgccccgaaaacaaaaaaatcgattttttcaagtgtccgtttggggtactcaaacaattatggggagcaaaaatccaacgcagaattaaagtacaggctatagggaagctattcccgaaggattcggtctccccataaatctgggcgcatcggttcggggggactgccccgaaaacaaaaaaatcgattttttcaagtgtccgtttggggtactcaaacaattatggggagcaaaaatccaacgcagaattaaagtacaggctatagggaagctattcccgaaggattcggtctccccataaatctgggcgcatcggttcggggggactgccccgaaaacaaaaaaatcgattttttcaagtgtccgtttggggtactcaaacaattatggggagcaaaaatccaacgcagaattaaagtacaggctatagggaagctattcccgaaggattcggtctccccataaatctgggcgcatcggttcggggggactgccccgaaaacaaaaaatcgattttttcagtgtccgtttggggact

SEQ ID NO: 26253 - DNA, 2049 bp, Heterodera glycines
  unsure (1)..(2049): unsure at all n locations
atcgaattataataatagaaaaaaagttggggtcggagttcgggaatcggaaacggctttaaatttgtcaattttctatttttacttaaacgatgagcctttatgcgaattaatgaagtaatttgtccgtccgcgtttcgccattatttgttctcgagatttgctctcgggtttatggtcgggaaaagatgcaaaaaaaaatgcgaggaggagaaatgtcgttgtctgggacaactgaaccgagctcaccgcttaacataataaccataacaataataaaataaacaataagctttgctaccgntgccagacggcccccccccccgccccccacagagcaattaattaatgatggttaatgaggctaattaattagtagttaatcgtcccaccctgaccggggcgaggcaatttgctgtgcatcatatgaatgagcagcagcttcacaccagaggccagcatggggcggctgtcaggaaaagtttgggcagctggcaccaattgaggggcgggaggcggcgatggtttggcgaaacgtctcggaaaattataccaaccaccaaccaattagcaaatttggcgaagcatttcactatgtatataaaggggacgataattaggatttcacaattttcattggaagcatttcgtcgattaaaatgtgggccatggggtaccgaatttttggagtttttggccagccatatgacacattcatattggtgctcattgccggtctcggcacaattttcctatccacttcaaatcccgataacataataatttttgccacgagaatgacaatacgcaaagaaaattaggaattcaaaattaggcattccgcaagaatgccgaaaaaagttgttacacattacgtatttgccctggatgagtaatttaaaaaaacattttatttttgggcaatcattctcatcagattcgttttaaaaaaaaatccatcaaaaatataaaaaaaattatggcatatcccagcgaaaaacccggaaaaattcaattatatatatttttaaatttcttgccataatttttttttataccctgaactttcggaaattgtttatatttttggatttttgtggctttcttctaacgcataagtacgcattgaattttaaaattttacctaaaaaattaatttttgccaattttggcaggtggttgaaattgtggcacaacgacaacagcaacaaagtgtgccgcaacaacggcatcattttgcaaaaatgggccaacaaaagtggccaatgatgccaccaaagccgacgacaaaatttacaacaatggcacaacaacaaaacgaacggcgcaaaagtcattttagcacaaaggtggaaaaatgtggaaaataaattaattaaattggaaattttaaaaaatagattaaaagttagaatatttattcactttaaacatttgaaaaaataacaacacaaaaatattcttttacatacaaaaagttatttaaaaaaattcatactcaaaacattaattttaattggaaaatcaatcttttgtcattcattagtaagcattttatgaaatctgagcacaattgatcaaaagttgcatcagcggaataaaaaatactgatttgtgaggtggagagggaattggaatttttaggtatttaatggggattttacaaaaaaagcaattcgtttccacgataaattaaatattaaattaacgactttttgtaaacctttttttttttttgctataaaacacaatttttctggatttaaaaatattatgatatttaaaaaaaaaattgccacaaaaaattgaaatttactcctttctgctgctcaaaagttccaaaagtgaaaagtgccaaaatttggtgatttccggcacaaaatagattttccgccactaaactcactgatctccccactccaaacagtgaattagacagaccgtctgagacgattaaactgttgtggataatcgcataagctttgcaagattggacggacggcttaaaaacaccggaaaaaattaaaattaaaaaaaaggtctcatggt

SEQ ID NO: 26254 - DNA, 1424 bp, Heterodera glycines
ttttaaggtatcacatttcaaggattatagaaaagtacttgaaaatagatgttccttttttaaaataatattttttgttatgaaatactttttaagggttctgctttccaatcgtttaaatattatgaaagtcggcgaacggaaatccgtcaaattttccggattggacaagacctctgtaaaactgttgacgaatacaaaaaagaattgtttgggttggtttttaattggactttgggaaaatatctgtttgagggtccaaaaccgaaaccctcaaaactgatcggaattgaaatgtccaatttgaacagcgattgaaccgtccgacctttaataacccataaaaacggtcttaaagctcgttttttctaattaatgcccttctttatgggttttgtgtttgtgtctcaagcgatatttaccgaaatttaattttgattttaatttaaaaaatttaagagatgatcaatcacataaattttgtgtgtatactcgtaaaggagattttaacaaatttactgaaacaaaaaaagacttcactgagcagggcattgaatttggatttaaatatttaatggtaattaaatcatttaaatattaatggtaattaaatcatttaagtattaatggtaattaaatcaatttatgttttcaatatttttatttctaattaaggaatcatttaacaacatttctgtcgttttattgggagaagacaagcaatttttgaaggatttaaaaatcaatcgacatgtaaaatattgggtttactaatataataaattctaattttacagttaattgccaacgtttatttgccaaaagtaatgccgagaatgaatgacatggcttttgccataaaaacatgcgattccttgctgatcactgcacagagttcaacgtttggctggtggatcgcttatttaatgccggacaatgccaccattttttataattcaaaattcggcaaaggtcggacatttttttatgaaaatgagttgcgattttttgtgctaattacttcaatttaggcgttcctcatactcggttaaactttttggctgaatgggtaccgatacaattaatcaaaggaaagatgactcttgattaaattacacattttgatctcctttatctgtttgaatcaatttaaagacttatttatctttttaattacatttttaattaaagcgttaaatcatccatccccttcttgctgattgtgaaaggagctacggacaaaggacccacaaattaaatataaaaaacataaaaaatcaaattagtcttaacaaaaattatggaccaattaacaaatgaagcccctccgggaaactcctataaaatggaagaatttatttaagaatgagttatggaaaaaaaagtttatttacagagttgggagaagaaaaattcattatttt

SEQ ID NO: 26255 - DNA, 1973 bp, Heterodera glycines
  unsure (1)..(1973): unsure at all n locations
cccccccccccccccccctgcgtttatccccatccgaatgtttttttaatcacttcaatttagaattcgagttgctatacatggatgaatttgtcgacaatttgttaagagaagaccattattgtgatatacagctgcctcgtctacaggttttaaaaattttttgccgattgtgtctttcggcaccgttctttgggggattttcttcaaactttacataagtctacaactttggaaggggtgagaagtatcctgttttgaatttgtctgatttctatttttgtcttttttatggacaattaatccgaatttcggggttcatactttttcttatggcttaaattctcaaaattggccattttggtgaaaatctgttatcaaaaattacacccaaaactaaatttaaaaaaattgacaaatagcgcaaaaatgtttgagatcattataaaccatggaaaatttctttttatctttgccaaaaatgagcagtgctggggggaatggattggctgcaaattttcctagaaatatttctttccgtttgaattttcacgaaatgaataaaacaaagcaattttgcataatcacaattttaagaaacggcaagcactcgaagaaaaggaccaactcgagttgtacgcttccgccttggacgaagacttagagcgtctttccaccgactccgaagatgagcaggagacgcggaaagcacggccaaatgtgagaatcgagagcctttttttgggacgataattgttagggatgcgatttttagttaaatacctaaaattttgcgcatttaatacgcacagataagcacgaaaaaagcattttccacttggttttgggtgtctacgttgagatttttttttacctatttaagtacctattctgggatttttttacctaaaaatcgcatccctaataattgtaactaaatgacagatcgtttctcggcgccgaagtcgctcgcgcagccgtggccgaagtcggagcaaatcgagagaacggagacgccgatcactttccacggatggtatcaaatcaaccctaaggacaaattgccagttggatttagaccgtcggggaggacgaagtgccgcgaaagacaccgaaagagaaattgaggagaataacgcactgagaaagaaattgggattggcaccattggagcgttaaattgtttatttattcaatcatcaaaaatttgattataaatattaaattaatcctaaattttgtcataatatatgcgattttaatcaacgctaaaaagtcaggctactagctgaaatttggtcttccgctggtaatcaccgactattctgctcattgccagtatttcgttgtcggattagaaacatgcggatttcagctttagaatacttattcttaagtgtttggttgatattatacttttacaaattgttggagaatggttaacaattaaggtcctttgcatactattaaagcgaagaagggctttttgaacaaattccggcgatctttggctggcgatntaagccgtgccccccccccccaatgacttagaaggacgttcagataagttcgtgcaagaatgggcgatgacgaattccatgatgatgttggcggaccaatgagcgcgcaaggctgcactgcggaagaataaagtggccctttgggggacgaggaccgagaggacatgatgctgctggactagacggacatgtgaggaggaggaaacggacgaggacgatacgtcggacaccgtcgacgaggacgaactgctgttatttgaaggggcctagaaataccgacaaaactgcactcattatgactattttttattcaacaataagtaaaaaataactcacattattcgatgccgagtttacctcatcattttaatcactcccgattagtgtccatataagtctcaccggaataaacagcagacatcttcgtcagcttgaatacatgtgaaaaatcct

SEQ ID NO: 26256 - DNA, 975 bp, Heterodera glycines
cggtaatgaggggtggggggggagagtgatcggcgatcaattctttggccgccaaagatctgccggctcgtcaagtcatcagcttcacgtacgaattgtaattggacacgtcgcgcttgagaatctcacgcaccggacccatcacgcgctctgaaggcaattaattggccaatgtgaaatggtggaaaatgccaaacaaactgaccaaatcgtgcccggtccaatttcagacatttcagcagagttttggccacgacggtggcggcacgagggcgatcgagaaggagggcgatttcccctttaatgagccggtaattaatgcagcggaggagtgagtgccaaaaccgaccgaaatagtcagagggtcccaattttccgaccacttcgaagggcgcgtcgtcgttcggtctctgcagcacctcagcttcgccctccacaatgatgaagaattcgtccccaggatgtccttaaatggtcgctaattgccctccgtctgtcttccccttcgctcttttaccctgctccaccacgtgggtgcccgaggggaattggcactgttccaacgcatccgccacattggccctttcccatttgtctaagtcggctgtaaaagagagaagaatgaatggggcagaatggcattatattaccaagaatctgaactttgctcaggaattcgtcgtacattttccgctttcgcatcgtcgaccccataagaatggcgcggtaagtgatgcggtcgatggcccacagtttgaccgtgttcgtcttcgcgactacggtggctgcgcgcggagtgccataaatcagtgccaactcgccaaatgaacctccctccttcaaaaaaacagtttaaagcatttgcggctgcctttccgtcacaccttaatgctcaacacgaactcgccattgacgaacacatcgacctcgccactgtcaatcacataaaaattgtcgccctcttcaccctgaatt

SEQ ID NO: 26257 - DNA, 1110 bp, Heterodera glycines
  unsure (1)..(1110): unsure at all n locations
ttggagacttttttaattcntcggttggccacaaacttctaaccttccgatttagctgagctggaaaatctcaaattcaaatttttgaaaacaaaaagccaaaatttcgaatggagtcgccgcacaattgccgcagctgtcacgccagtgttgaactgagttcggcatccgccacgatgatgggcgcactgaccgacgtggaaatccaacagctgaaggagcagaaccagcggagggtgaagcgggtggtggcactggtggcggtggccattacggtgagccaaaaaaggagatcacttttttggcactttgtccgtctaattggccccaaatttacgcaaaatcaaagtaccgagcccacaaaattggctcggaattcgagaccgggactgggtccgaaattgaaacagtccgatccggtgagtcggcacaaaattccactacttaaaaaaggccgagactcaagaccctagaagatccccactaccatcggcataatttcatgtaccttttttcctcttgcagacgattgccgtgattttggtggccctttctctgtcgttgggcccaaaaattgatcagctcggtgagtctgatcagaaatctcaaaactgatgtgaaattggctaatgtttaagtcagcgaatcgttggagtccagccagctgagctccgctgaacttctgttggggggaccgaaacggacaacggccgaatggcaccacccgcggcggcagcaggagaagacgaagcgggacatgaggacaaatggggacggcacatggtaagagaggggagggaacagtaccgccaatttatcatagccttcaaaaaattatgaatttcttggctgggaactgatgcaatgccgagacccactctcgatccattataccgtgaaacgcggacgaaaccttccgtaccaagtaatccgtgcgggatacggtactgtaatggtatgtaccgtatcggtaccatgcaaagggtccacctcgtttgggcgccaacccgtttttggactataacgtttttctttgtcaaccaaatccaacattcttggtatcattcgatagccctatatgtcctctattagcctgcagaatttagaaaa

SEQ ID NO: 26258 - DNA, 2031 bp, Heterodera glycines
cggctcccgaagcatcggttaaaagaaaagctgttcataaaacattcacatgcctttattaggtgattattttttttctacatcagcttatcagcaattctctctttggcacttattccgccagtttaattaggcacgtatttacaaccattgtcaacgcagcaccgcttggcgttgaaggagggctggcatattttggcaaaacctaccattggcactactaaattcgtggctgatcggggacgaaggccatgctggtgtcggacacttctctctgcgtcgcacacaaaccactaatcgaattaaaatattttattcataaacaattttattttcacataattttggaggaaaaggcgtggatgcgcttggcattttggcattgcacgcccggcggaagtcaagtcatatgatctttccccgaagccttttcgccctttcctttaaaatattgggcggatggtatttttatttttatgttgaaagaaaataaataataaagaaaattttttttttagtgagcaaagtatgattatttctattcacacatttgaaattcatgtgaaaaaggcattgaaaattttcgcttaaaaggccttagaattcgcttaattctgacttcatttcacctttcttcgaccattcattccaatctttaataaaaaaaaatatgcaattattctttttattcgccgttttcattgctgccaatgcttttgactctgcccaaagtgtcggcaaaacgtccgctgaggacgaagttcgagcggtaacggaaggggcggcaccgcagcggcaaacgccgacgcggaaatcgttgaaaatgttcggccacggcctacgccatcacacgggcatggatttgctgatgaaactcggccagcaacaggcggaggagcccaaggtggtcaaattttgaaaacattttacgtcattatttttgaagttcaatttttttcaacaaatattgaagaattttgaaacattttgtttaaataaaaaaagaagttgcaaccaaataatttgatgcatttggcatattaatttcaaaatttaaattaataatttgctctttcctcctccatttcagtcattctcctcaatggacattcttcgcctttttgatgggcttgaccaccagttttaccacgatttggagaaagtgagaatgaaatttattttcactgaaagataattgcaattcgtttctttattttaggcacaatcgctttttgaagaaaatgccaaagttgtgaaaagtcttgaaaatcgtgttgtcaaacttgagagtgcaatggcaaaggcagcggagcattgcgaacccggcaaagtccaattggtctcggctcattacgacacggttggtcattaaaattccactaattattattattattatttaattttttattattattcaattttctgttaggccattgttctgttggctttgctgattgttcttctcctgtgcctttcgttgctgttcgccaatttgatgctcgccaacttcaaacgcaaaggcgtcgtgcaaatgccgttggcaatgatgcggggagagagcgagagtctgtaaattatcggtatacggtaattaagcaataattaagcaaaaaaaaaattgaaaaatatgagagaaaataaattttaggcttctaagatattccaacatttttgcagtaacttttttttttgttggtgctctgttttatgttagtcctccattcctaatataccgtagaatattacctcataatcatagtaattgaaaattgtatcatatattttttgctaatctttatcatacatcatccacccgtatttatgaatcatcttcatattttttttgttttttcgaaaataaaataataatatttcgttttgttgtgtgttcttgctagagtctacgagcggagcataattcaaagaaagaaatactgtaagcctattgatatgccaaaaaatatcagtgagccatcccatctggaagagagagtaaagggtgattgtgtgttatctgtggacagattt

SEQ ID NO: 26259 - DNA, 1096 bp, Heterodera glycines
  unsure (1)..(1096): unsure at all n locations
cccccgcggggacgggggcgggggttttgctttgaattaggtccaaaaatctcacaaaaaaatattttttaagaatgatttctttggctccacattcctttatttgttgatcgcctcgatactatttcttttgacataaattgcacagatttcgactaaaaagtagccaaaatttagggatttttgggtaattttttttaagaaaaaaaaatttttttttgcgggggggggggcgtgccgataggggcgaattttaaatttatttctaacagatattcaccaaaaaaattaagactttttcgataaattttcgttttttaactatattaaattatcgtgatttactcaaaattggaactcagattttttaaattttttttcttgcggcacatttttcaaaaaaaaacttgatgaatgtgcgaggggagagttccggcggtgccgataggcgccgccgggaaaattttttgaaaatttgaatgcaatttgttaacaaattttttacaaaaaatgagcaaaattcgcgagcttgggattatttttaagaaaaaatataggaattttgggggccggcggtgccgataggtgccaccggggaaaattttaagaatttatatgaattttgttagaacttagccaaatttttcagaaattttcttcttttagatgaaaataaggcattacccccaaatcagaacatttcttagaaacaagaacataaagaaaccctgtattaatcagaaaaaataaataaattaaaggaaaacgttagccggaatcgaaatcatgacaaaagtactgttagtattgaagcactatccaccaatccacaaataaaataaaaaacaagtaaaatttattttatttcataaaaatttctcgatagttaaaaaaaattcaaaattgtcaaaattttttgccttatttcccacgaatatgccattcttaggggtgtattttcacccccgtgcccccgcgggggtgaaggtcgcgggggcgggggtcagagtcacgggggcggnggcgggggtgagccgaaaaaacctgtcccgcccacgcccccgggggcgagggcggggctcgaaccctaatttaa

SEQ ID NO: 26260 - DNA, 1407 bp, Heterodera glycines
  unsure (1)..(1407): unsure at all n locations
ttatgtaattgtaaataatatgnaaatgtattattattattattattaatagtttattccttttttattagccgtatgcaattcaataaatgacttaattatntataattaattaatgaattaattggttcgcgtaagaattaaaatatttttttttgtatacaattcttaaccaaagtttataataatgccatttgatgagttagcagaatgcctgcctgttcagcaagagcttttcaacatccttaaaatctcactttttgttagcactaaaacgcccaaaaattcaaaaaattttcagaaaatcccatctgatcagatttgtgatcaagaaacttcatacatttgcttctttattcagcaccgatcaatcacaaattatacattttttagtggaatgagcggaatgtctgatcactcatttgattaatagtgatcatttgtcctgttttgatcaatttttgttttccaattcaattactcttttttttaaattattcccattttaaaaattctttttccctttttattaccaaattgtattacatacatatgaatgcatttatttctttactagtcaaattagtcaatctgttctgtccaccgccgcttttaatgggctgtttttggtgcttcgattaaaaaagtcgcgcatcccccgggggaatttctaaaattggattttcggaatttttggagggtcaaatggcggtcaaataagagcaggatttctttatttgtttaaccatccattctcagcccaaaatggaggttatttggccttacggatttggatcaaaaagccgcaaaaaataacgaaaatattttttgaaatataaattttaaattttagtccgaattttaaatatatgaaatttaagttcggttttcggacaaaaatcttcccgagactttccatttccgatctcggttttttggaccttgaaatcaatgagttggctcgattaaatttacctaaaattcaattccccgttcaaatttttaaattttaaacatttaattttaaaattatactcgaaataattctctttccaatttgttacttttttatagctttcctcatttactaatgactaattattaactaattacctaaatacgcgaattacgacttccaattttctctcccgccgttctccaatttttttttctgcgtcgtttcactcccaagaaaatgaaaattcaatttttctccgttccaattttccctggcgtttcgtttttttttaaatttcagtccctttggcgctctgttttgtgtgcctgcctcccgcccgtgcgccctcatggggcttatttttgcccattatgtgctggtggtgggggtgggtgttgtgcttcgtaacgaaaaaatggcgggtaattacgccccgtccccctcccccc

SEQ ID NO: 26261 - DNA, 1552 bp, Heterodera glycines
  unsure (1)..(1552): unsure at all n locations
atatgtcatcgcccgtntaaggataagaaatattataatgaggaaaaaatgatctggtgaggaattgggccagaatagaatctttaaatcctgtccttaagaaaataaaatttattaaaccgattaaattttataatatttttgcaaaaaatttatttaatatgctaagtgaaagataaaaaaattaaaatgtacaagatagaaaaatctatgagcaatggaatcatttgcattatgacaaataaataaataattgaaccaatttaataactcatataatttatatttgaatgtttaaattaataattaaaacaagttcttagttgtattcaacattaaaaggaaaaaaatttaaaaaggaaatgaaggaacattccagaaaaagggatttggtagaactggacgaaatatgtaactgctgctttaactattaagaaaatataattttttattcgttaagcagataaatattttttctgagttcttacaattaaataaccgatataaaagtcataaatagggacgtgaattttagtgaataaaagtttgaattttgctcaagttgatttttgtaattcggttcagcgttctcagaatagcttgaaattttgcatgaaaatacgttggcatgagacctagcactatggtaaatttcagaatttttaatattgttaaaacttttttacaaaaaaccgcctgttttcaaaacttgaccacaaagttggcgtacaggctggaaaaagcggattttcttaaaaatctctgagtgcataaaaaattctaaaatttggcaaggtgctagaccttataccaaagtattttaatgcaaaatttcaaactcttctgaaaacaatgagctgagttagaaaattccgcttggcgatttgtgcaagtttttcttcactaaaattcacgtccctactgatcaccatcctcaagctgttcgctgctgctgatgctggtcggtccatgtgggctcgtcgttccatccattcgttgatgcaccagtgctccgctgaacgccaagacttgctgcttgaggacgccgtcaagcggccatcgttcatgcaccaacagcagttgggcagcatatcgccgtaagtattctttctctatgcagatcactgattgatcagctgattgttgttgtttttttaattaaaattaaatgcctttggagagagtatttatatgtaaactcatggcgctcgatttcatgggatatgtttggggatgggatggcaattttttttaaattcttcatttcatacgagggcgaatataaaaaaaacaattttttaacgaatttttttggattttattatttttatggagcatgtgtaaagtttgtagaatttttttttaattattaaaaatcattatttcattttatttatttttatattaaatagtggaacaaatttcaaccgaatttggcgccatttgaccgcgtccgccgcaattgttggtcaataccagcagcaacaaaagcagaagcatggcactaacaacaacagcaacaacaacagcaacaacaatagtattaagggca

SEQ ID NO: 26262 - DNA, 958 bp, Heterodera glycines
agaaaaattgaagaatttttatgggccctaaactgcatacctaagagccgtattcgtcgctgatcagtgatcactaatcacgaatatgacattcaaccaatttctaccctcagacccaaattctaacaaaactcatttttcatcaaacattttaaaagccgcaaattccgatttggttggccgaaaaattccacaaaattcgatttggtgcatcatttctatcgttttgaagcgccacttcgagtcggtcatttggggtcttcgagtgccccttcgctctcctccgtgacttccaatttgtacagggcctaagaaaacataaaaatgctttctagcaattttaaatttggaatactcacaatcagattaatattttaaccattttattttaatttcgtgcctattttaggtgtctaaacaagcggcaatgtttatcaagtcgcattccgaggcgagcactttcctcattaaggttgttgtttagaattggaaagtaaataaaagctaactaattcagatggaggaagaaatgacagagaatgggacggggggaagctgtggcaggacgaagttggagacggacgacacggcactgtgctaccgacgccatttcttaggaagagtcagtccattgggggaggggggggggggggagaggacaaaataacagtggccaatgccgagtttgtaatgaccattaattttaaatatttgggagagtgtcaatactcccgagaagcaaataaataaataaatgaatgttcccataggaacaccacaacttttatgggaatgacccgctgattggtccgctggtgctgagtgttcgcacggagacaatttcctgccaaaatcacttccgcatcattctgcgaactagtcacgtgttcaattcatttgcgcgtgtatatcaattccaaagtgtaaggtccatgaggttgtcccagcctcggcattg

SEQ ID NO: 26263 - DNA, 1616 bp, Heterodera glycines
aaaaattttgaaatttttttgtaaatggcaataaaagtctattttttttttctctaacttggcgctgcggtcggtttaacgtttttttttgccaagaaaatttcgatttttcaaaaaataataaataaaaataatttgtaaggaaacaaatgacgaaagccatcggaaattatcaagcaaattaaaaacattcgatgatgaacaaaaattgacgataattaacgaattcgaagcaaaagctgatgaaatcaaacagcaaaatgagcaaaattataaaagaaaccgaacgcaaattcaaaaggaaattgcacaggaattgggcatttgccgttcatacatttggttttggaaaaaggaattaggtgaaacagtgagaaattaaataatcagtagggtcgcgacttttagtgacgaaaaatcccgaaatagttaactaaaatagtgacgaaaaagtgccaaaataatgaagaaatagtgaaaaaagtccgaaatagtgtcgaatagtgacgtaattttcagccaaaaattaagcaaaaataatttttattcactgattgcagttgcaaatgagctacatttcctttataaaattctcttagtaaatattgacattttttaaatcaaaaattttgtcaagaaaaaaaatttgggggaagaatttttgaaaaaattttccaattcttagtggtgtatttaaaaaaaattttttggtcgattcttagggggtgtattttttgaaaaaattttttggtcgattcttaggggtgtattttttgaaaaaatttttaggtcgattcttaggggtgtattttttgaaaaaatttttaggtcgattcttatgggtgtattttttgaaaaaatttttaggtcgattcttatgggtgtattttttgaaaaatttttaggtcgattcttaggggtgtattttttgaaaaaattttttggtcgattcttaggggtgtattttttgaaaaaattttttggtcgattcttaggggtgtattttttggttttattgcatttttgttaaagaattttccaaaaaatgtcgaaatagtgacaaaatagtgacaaaacgccaaaataggttttttgagctcctttcttcaaaacaatgagcaaaaaaaagttttttcactagaaatcccgaccctaataatcagtgaggttcaaatttgggtgcttggtactccgaccctacaaattttcgaaatttattttaaaatttcatccgtcgacgccgcatcggcgcctcaaaaaaaaatttaaaaaaaaataaaaatcaaaaaaaaaaaataaaaatttttatttttattttgtcaataatttctttttaatattcctaaattaacaaatcatagaataaatctttaattataaagttttttttgtttattttttagattttttcagtttttgacttttatttttttttgtttcggtgatttttaaaatatacaatgaatttaaacaatttatttgtttaaaaaaaaatacattgaaaatggaggttcttcctgctcaacacaaaacatatgtttcctcccatttgttttgctaaaattctcctatttcgaaaagaaagttgcttatttttaagtcgtccaggcggccca

SEQ ID NO: 26264 - DNA, 1767 bp, Heterodera glycines
  unsure (1)..(1767): unsure at all n locations
aataaaatttatatatagagcaaaaattgcgatttttgtagtatttatttttataaaatacttttcagaaagggagttctgaatttttttctgaaaaatcgaatttttccaggaattctggaataacttttttattttggaagatagaaattccaaataattcacataaaattctcncaatttttctctatttttaaagctttattccactaaatttgaccaaacacgaagagatttatgaattttcgaaatttcactggattttccgtggctcaaattttgacgatttttcaaaaaattttaaccaccttccaaaaagtctgaaacacaaaataaagcgtatattcgtgttcagcacctcaaattatgccataaaaatgcattttggctaatttaggagtaaaaaattttttcatgaaatgcaaaaccatggggtcccccctatggttttgagtttcaaaatcacaattaattttataactttttttaaactcatggtaaaaacataagataaagcacattagatagagcttaaaattctctacaaaaatgctctaagacaaattttcgctaaaatcaacgcctgacgagttataagccttgaacggaaatggggagctcaattccggaaaatttttctatttccggaaaattttgaaattttttcaaaaatgccaccaatcgatagagctcgaaaaacggttgcttgaaagtggtctccgttttcctgggaaaaatcggcaaaaaataataaaattcaaaaacgaaaaattttcgagggggcctagctcgaaaaattttgaaaattttcaaaatctgaaaacgccatcggatgcagctttaaaaactacacaaatgctcaagcggcgccaacccgctccgcttaacccccagcgagttattcacgaaaaacggaaaatgccgaaattgggtgccaaattttgccattttctgcagcattggcatttacagatagccccgccaaataagcgccaagttttcccaaacattccaacttaaaatcctcccaccaagcattttccgctaccgcttcttcccgcaaagttacaggccaccaaagacggacaaaaaaaatttcacgccgtttcagcgccgctggcgctgaaccgtccaccggatcggaatgccgatagttttcctgaatgcgcctcaaaaagttgtaagacccttccaccactttcagacccctcccgacagccgttcgactcaaattagtttttaagacgaactgcaacgtttctctatagtagtataaactagggtgaccagttggctatggtgtgcatgcgtggcttggtaatatatggccctcatttgttattttaaaacattaattgcattagtgtgatgttttaaagcgctatcgcgctatgggacgcggcttcgccgcgtcgctagaaagtgatgtaatttagaaattcatcgcagcctcaggacgggcgcttcgcgcccctttttaattttgcgagagacatttgaccgcttcgcggcctcatgacgggcgcttcgcgcccgttttttaattttgtggggaacgttcggccgcttcgcggcctcaggacgggcgcttcgcgcccgttttttatttttttgggggacattcggccgcttcgcggcctcgacgggcgcttcgcgcccgttttttaattttttggggggcgttcggccgcttcgcggcctcaggacgggcgcttcgcgcccgtcttttaattttgttgagaacattcggccgcttcgcggcctcag

SEQ ID NO: 26265 - DNA, 732 bp, Heterodera glycines
tcgggggggagctcaaatgtcggggaccccgatcgggtagtgatcaactaaattttttaacaaaaaaaaaaccattttttctttttaaatgctcgaaatcttccttttttcactttaaatctcagggccctgtccggtagggcaaccgagaccgggaaaaacaagcactggtaagaatggtggtcggagtgtaaaattagtgatgaaaattggaattaaaggaaaaattaaaaaataataattaatatatactttaaaagtaacgcacacaattataaaaatggtctagaggctagtcttcttgattttctacttctttcccattgttcaatccctctatagaaattaaaatattttgaattttcttttgtatattcattggtttcctatcgacaaaatattattcttaatttttttaattgtattttatcattttttaagaaaacccatacaaattgagcatagtaatctcacttttttgttttgcctttcacttcctcttcctcttgaattccctcggaaattcccaaaatttcccctctttggtcggaaattctcaaatctccccgtattatttccaaaattcccattccaagtccgaagctcagctatttgttgtttcaattgatccattaatcttcctctcggggaagcttcttcttctctatatcaaggctattgagcatccaggaaaaaaacatgtatttacataaaaaaggaagccctataaat

SEQ ID NO: 26266 - DNA, 1092 bp, Heterodera glycines
  unsure (1)..(1092): unsure at all n locations
tttttagaggaggtgatgcgcgaaaattggacattggcaatttggacaccagaaaatttgaaactaaacagaaatttcgacaccgccgtgaatattggaccccaacgcttaatttgtcgcccaattttatttattttaaaaattaaaaaattaaagaattaagagaggatttgcttattagggatgcgcgacaaatattggtaccgagcctagaaaattctaatttttagctaatcggtgcggcatcgattatatttgattattgagtgagaagaaatttactataatcaccttctggtctttggcataatttattataattatgaatttttttaatctactattttccaatgtctatttttccaatgcccaattttttagatgccatttttacaatgtccaattttccgggagccccggcggggagtaatccaattatgtatacatatagcggctcactcggtggctccgtcgttgttggcgtcggcggcgatgttggcttaggcggtggaagcgtcataattggcttatcattagccatgtctttgccctgttcaccaatttcgcatttgcaatggacacttttgtacttctgactcatatttttcgccgtcttttcggcacaatatgtttcatcgttgtgaaaagcgcattgccatccgctgaatacaaagcccggactgtcatctgtgtgtggtttaacaaaaattagatcaataattacggatttcgtgaaatccattatatacagccatgcgggatggaaacagggccctggggccattttggccagaaacctagattttgacaaaatttccagaaaagccggaatttatggtgctttaaaaatggaaaaaatgggctatttttgggcataattttccgcacaacccttcattcttcaattacaatttggtttttaaggccttctgaaatatgagaaaaaaaataaaattttggtcatggtttcccccattagagatggggtttanggtcaaaagtctaagccaaggggtacgaaaaattaaaaaaatttttttgtcaaaactttcaagaaatcttgaacnccgaatagtttgaccttgaaattaa

SEQ ID NO: 26267 - DNA, 1216 bp, Heterodera glycines
aaaatttgtcagaaatcggacaaaattgtgactttgctcagaatggccaccaaatccttcagcaaacccttgggaatgtctttggccgagagagaacggaacacgcggtaaataaacaaatccgtctgtgatttctgactcggattttgtttggagatcaaaactcaaaattctgggaagtttttcattctcaataacattttgttctttgaaggtatgatataagtagcgagaatattaaccttgctaagcgtttgatgaccttgaaatatcgactggctccatcaaatcccagggatcaacttcattttcacaagcgttttgttgagtgacgcattcatcactctgctgattggaggacgaaaaatcattggcctataaccatgtttaaaagatttacatagttaaaacccaagaaccgaactctaacaagtcagtgttttggttgcatgtaaaatcgctaaaagtccattgttaaaaccttgacgtgcgggtccgggaagcgaatggtgcgcgcgtcgtgcgtgacaatgtacggcacttgcttgtcaccgaccgcctgcttcttcaccttgcacagtttgtactgcccttcacgactttggattcgatggatgacaaaccgttgtttgcgtatttgatgcaattgcgcaagaggataagcggcaacgacttaggttttagtttaaaagagtgaaaatttttgaaatagtataaaaattagagaaggtctaatgccataaacaaacaaaaaaaataagaatttcggatcctattactttaacgaacaaaaaacaaacaaacaacggagatcaacaacaaaaaaacatggagatcgaccacaaaaaaaaaacatggagattccgaactgtcttggcacatcagacgagttcgccaccaggcggcggcacacgaatgagaatgagaattgcaccatggtggacatgactccccacgatcaccagatcgttcggcaattgttgatctaaaatgaaaaaattatgactttcttctatgacaaattgactacttgaaaaaaaagacgctgctggattggaggcacaccctcgaaaacggcgacacgcactttcaacattgaaatagtttcatattcagcgagttcataggggcgcaaattccctgcgtaactgatacgcacaataaaaggttccattttttaatttgcttgtttgaaaaacgttaaaaatcatttatt

SEQ ID NO: 26268 - DNA, 962 bp, Heterodera glycines
cttctattatcttagtgaaattgtttttgtttttgttaggtactttgcaaaggccctgtttttgtacaaagtcactatttggacgtgttaactgaacgcgaagaattgggtcactcccacaaatttgttcaatttacaactgttaaggtgagcaattttatgctttttcaaaaattgtgctgcgaatgatttattatttgtcttttctccaattgatttttttaaaagattttcgacctgttcaaatgctacgagtgttggaaggccacacatttggagcgaattatgtcccgtcgaatggacagagaaacgcgttctcgtcgagttcgtttggataatcacagcactcaaaggacaacggcatcaaaaacagtggaagttggggcagaaggctcaacgaccaaccaaagcagaataaaagctgagggcggcgagcacagtgacgatgaggtgaaaaaacaacaaacgaataattacgaaagagaaattatgttttttattaaataaaatgacaaactcggtgcatattctttaggaaagtacgcttccatgggctgggttaaccaagcaattaatttatgccttttcagactgtcgccgatgacccgggcgtggacgattatcgcactttgtgcactgtgcgcatttccttcttcaagggctttggtctcagctacccaaaacggacaattcaggtactgtttatgaattatgagctgttcgctttagccatcccactgttccccatttgttttacgcttccattaattcccaggaaacgccttgttgggttgagctgcacctgaaaagggctctccaattgctggacgaggtgatgaacactcccctgatcgaccatttgacttagcctttcccctcatttttaacatctcaactcaaatttccctttcatacggaaaactcatcaagtaatttgtgcggaaacacactaacgaagagca

SEQ ID NO: 26269 - DNA, 1029 bp, Heterodera glycines
atatgaaattctttattaaaagataattattatttttcaataaattcttttattattaatttacaacaaatctttaaatataaattgatacaacagtgattagtaaattcattaaattaaaatgaaaatatttttaacaaatttaattaaaaaaatacgtgaaccgtcggctatttagctgggaaaaagcgcttcgcgctttgggagcttcgctacctagattagctctggttttggagatttggaatttttaaaaaattgttaggggtttttaggccgcttccagtgattagaagaggtacaatggtgattagaagagttacaacagtgattagaagaggtacaaaagtgataaaagaggtacaaaagtgattagaagaggtacaaatttgatgaagaggtacaaaagtgattagaagaggtgcaacagagattgaagaggtgcaaatttgataagaggtgcaacagtgattagaagaggtgcaacagagattgaagaggtacaaatttgatgaagaggtacaaaagtgataaaagaggtacaaaagtgattagaagaggtgcaacagtgatcagaagaggtacaaatgtgattaaaagaggtacaactgtgattgaagaggtacaacatgagaatgtaataaacagatggcatataaaaaaaatacaaattatggacaataaaattaattaatttgaaacaaaaaatttattcatcaaaaataatttaatttaaatttaaaattatttattaatttttaataaaacaaaaaggttcaaattaattaaaaacggtgaaaataacgtaaaaatgcacaaaaaaataatgttacaccgtccggattcgaacttgcccccccccccctcaaaatgatgccccagaatccccaatcacacagggattctgaggtcttaacgatgtcaaaagtaaaatctgatcacgtattcgtgatcagcgtcataaaatagcccctaatgacatgtttttttgagaattttttgtgaaaaaaattttttcaactcaaaaat

SEQ ID NO: 26270 - DNA, 1110 bp, Heterodera glycines
  unsure (1)..(1110): unsure at all n locations
agaagggagtgggaaacatgatttcaaaattttcaattttttctagtctaatctactcaaaacggttcagaattcgataaaaataacattcacggtgcgaaaaatggggtttgaaaagtttattggggaaaaaaagactttacaaaataatacccctgggagaagggagtgggaaacatgatttcaaaattttcaattttttctagtctaatctactcaaaacggttcagaattcaataaaaataacattcacggtgcgaaaaatggggtttgaaaagtttattggggaaaaaaagactttacaaaataatacccctgggagaagggagtgggaaacatgatttcaaaattttcaattttttctagtctaatctactcaaaacggttcagaattcaataaaaataacattcacggtgcgaaaaatggggtttgaaaagtttattggggaaaaaaaaactttacaaaataatacccctgggagaagggagggggaaacatgatttcaaaattttcaattttttctagtctaatctactcaaaccggttcagaattcaataaaaataacattcccgattcgaaaaagggggtatgaaaaatttattgtgaaaaaaagactttacaaaataatacccctaataaaatcaactctaaaacataatttcaaaattttcaattttttctactctaatctactcaaaacctctcaaaattcaataaaaataacattcacaaaacaaaaaataccttttaaaaattttattttaaaaaaaaaactttacaaaataatacccctccaaaaaaccaattataaacattatttcaaaattttcaattttttctaatctaatctactcaaaaccnttcacaattcaataaaaataacattcacccttctaaaaattacatattaaaaatttattaattaaaaaaanactttacaaaataatacccctttcaggagaaaatntcaaacatnatttcaaaattttcaattttttctactctaatctnctcaaancnnttcanaattcaaaaggaataacattcacgntcnaaaaatgnnntagccatgcagatggggaaaaaaagactacaaaataatacccct

SEQ ID NO: 26271 - DNA, 1754 bp, Heterodera glycines
attccagaaatatggaaaaagtcaattatttgccctgtcccaaaaattcaaaatccggtaaacccagtcgactttcgtccgatttccctgctatgttctgtttccaaaattggaagaaaatatagcaggaaaaataaattttgttgaaaaaaataatttgttaccaaattgtcaacatggttttcgtaaattctgttactactcaactttttgaagtggtggatgatttcagttttgctttagaaaataaaaaatcaattgatgtaattttttttgatttggctaaagcattcgacacggttccacataaccggctaatatctaagctaaaaagcattggtataaataattccttattaaaatggattcaaaattacttagaaaaccgaaagtttttcgtcaaaatcgggtctgatttctctgacgaatatccctgtctcagtggtgtgccgcaaggctcaatattgggaccactgttatttctcatttacatttaggatttaccaaaattctgcgaaactgaaaatgttaaaattaaactatttgccgatgctcttaaggcctatcatgttctttcaaatatttccttttctccactccaaaattttattaacaaatttaatcgatactttaaattaaacggccttaaaatcgcttcaaataaatgtttaactttacatttaggacacaaaaaccagaaaataaattattttattgatgactttccaattcctaaaaatcccggaaacgaaccatcagagagagaccttggcatttattttactaatgatttgaaatgggcacaacatattgacattatctcgaaaaaagcattacgatctgctttcgctatactaaagtcaatcaaaactcgtgatacgaaaatacttgtaaatttgtttaatatttattgcagaccaattttagaattcggatctccaattttcaatccttatttaaaaaggatatagaaaaactggagaatgtccaaaaaacttttttgagagtaatatttagacgtaacaattatgctgctgatttacctaattatgctgaattgttaaacatttatgatcaaaagtcgcttgagagtcgtaggttaaaaatagacttaaaactttttcatgaaataattttaggtaaaataaatttacaaaataatgaatccttttctttttccaaaaacattgtaaaaaatgaattcactataagatagagcccggacaagagggtcggtcggtcggtttcggttaaaaaaccgaaaccgaaaaataccgaaaaaaccgaaaaaaaaccgaccgaccggtccgatctctactataagaacagcgtattgctcaaccaatgctagattcttattctttctttattcgaacctctcgtctctatagacttttacctaaagagatgagattactaaatccaaatgagtttgccaaacttcttgaaagatctgatctgaatttgttgatttctttgccacccccagctccaaaagtgaccaattgtctgttttatttgatattgtttcattatttcttatttttagcattttaaaccagggctcggatccaaaatttttcaaaataaaaacatcaaggccaaaaaataagattttaggatcaaaaataagaacatttcgcaaaattgcttcaatcagttattttacaatttattcaatcaaaaaatgtatcaaatattatatggttcaccccttccccatgatccttttttaaacaatttaggggaaaaaa

SEQ ID NO: 26272 - DNA, 1032 bp, Heterodera glycines
  unsure (1)..(1032): unsure at all n locations
tctagagtccaaaaaaaaaatttaaaaaattntcgaggccaatttttttctccttgggcactttggcatttttagcttttttgcggcctgtcgagatcaccgacgtggagcccagcgcgttcaaagtgttgctgaacttcatttattgggacgacctaagcgaacgtaatggcgacaacgcaattgctttactttacgcaggtgtcaaaaaaaaaattttttttttttgaaaaatttggattttaatttagccaaaaaatacaaaatccccgagttggtcaaagcgtgtgttgaattccccgtttctgagctgcgtgacattttctctgcactcgtacgaacccgtattcttgaagaggaggtggcaaatgttgaaacaaaaattaaaaaaaaattccgaattttttggggctccaatttttagggatgtaaaaccgctgaaaataacatttataaatgtaaaagttatgaattggacaaaaaaggttaaggattttacggttaactttatcccatactcgaaaaaaaaaagttttttttcaattctaggcatttttttaaattttcttgggtttcctttttaaaaaaacgttcaaagctttaattgccgaacaaaaaggtgtataattcacaaaaattaattaaaatgttttacagtaaccgctttaattattgtaatttattttttaaccccccccccccctccgacaggaatttgctgcgcgatgtttgaattacattgaccaaaatgcggactttctgttccgttccaacgctttcttacaaattgacaacaaattgttgtgcgaacttttgggccgcgatcagttgctgatcagacgagaaatcagtgtttggattgcggtaaattttgttgctaattggcattttaaaaaaaaagttattttattaggttttcggcaaaaaatttcataggcaacctaacattaaatttatgtcagaagcacaatcaaataaaaagctttcgtttttttaaagaaaaccaaaaaaaattttttttttttttttttt

SEQ ID NO: 26273 - DNA, 955 bp, Heterodera glycines
aaaaaagtttaaaattgaacaatttccgtagcgaaacccatagaaaattcaaaaaattttccgggcggcgcctatcggcaccggcgggaccccgcccacccctttccacaaagttttttggaaaaaacgcgccgcaaaaaaaggtggtttgaatagcaaaaaaaaaggtcgtcgccggggaaaataggggccgacgtaagaaaaattggtcctggcgcacccccccccctgcgccaagcgtccgacgtatgggggtctgactggcgcaccccttgtgcatgtatggtggtgatgccattgtcaatatatacgattaatggattttcaattacggaaacccgcaattacggggactttcaattacggaaatccgtaatgcgtaatgggggagtgggtcaaaaaatgccgtaattacggaaattcctaatccataatttaaaaaaacatcattatagcgcagcttttgaagcatatgacttcttttttctgtatttttctatgaataaaaatgcaataaaataacaaattaaaataatttgtgatgctttcgtttctaaaaatttttttttaaatttttccagaaaatcattaaaaatttctgtttgaaaattatttaaaaatgcgcaaaatagcaaattttattgttgttttgtgattattagacatgttcaactacaacgggaccattcggttgcaattcggcttttttggtcgggcgaccagcgaatttgtgtacatccgtggcatttcgtggcggatcacggcaatgccgttcatgaagccgggcaaccgccggtggctgtcccttttcctcaattgtgagggccaaggggacgacgaaaatggtgagcaaagaacaatttatgaaattttgagggagaattacgaaaatcattttttaaaaatttgggaaaattcggaatttgaaccccccataaaattttaaatatcgaaa

SEQ ID NO: 26274 - DNA, 1346 bp, Heterodera glycines
  unsure (1)..(1346): unsure at all n locations
ccccctctgtcccacaaaatttttggaaaaagcgcgccacaaaaaaagcgtttttaaagcagaaaaaagtcgtcgtaaatgaagaaaatgataagtgaaaacaaaaaaatgttggaaaaaacaattccggtgaaaaatacaagccatttgaataaatattaaccattttgcattgcatataataaaaattttaaatgtccttgaatttcatgaattttccccactatgtccttgcaaatcggcgatacccgtccttggaaacggagcgtggacgatggcaacactgatttagggtaatactaccgatggtaccacttcagaatgtttccatgtgattacccatttttagacgaaaaatgcaaaatttgaacttacgaaattttgttcgagttcgggtccggggttcgaaattagtcgaaatggatgtcatattggtgatcagcaaccccaaaaacccaagggaacatgttttcacggcttttgaaaacaaaaattttttttttcaaaaaagttgtggtaccatcgggtagtattaccaaatttagtatcattcgaaagctcttggtgagttaagtctaaaaatcaaagaaaaatgtcaaaacgggagccacctaagcacaaggacaactgagtcccattgaatatagacagttctgtaccaaaaaataatgaaagaaattaacaattaaaagtagggttgtacggaccggggagggaattcccggtcctccgaggtctcggcccgttttacgccaaaaaatgatcatacgttttaattatacgccatttaagaaccattaaacgtatttttggtttaccccttgaacccaactctagccttcgaaaaaaatattctataaaattcgaaaaaatgaggcccaaaatttcggaaattggaattccgaccccactcaaattgtttagcattttcttcgtgccaatgccatttcttccgtcagttacgaaattcatttttctgttcgtgcgccgtcaatgccaatggtgccatttgaattggtgaacgaatgcacaaaggaaaagctgacattggccaaggaatatgaatggggcatcggttggataatgaaacgaagcaaaattattggggagacagcggcggttcattggaaagacggaaattgngacaagaattgtcactatgtgttcttttgcctttttagtggcactaattgcattgggtgagcaaataaaaaaaggcatttaattntgtttaaataatacagcgatcaaccgcagaagaagaaaatgaataatnangaatgatngatcgaccgatcatattcatccgtgatcaaatgcattttatgaagaaaaaactctcaatt

SEQ ID NO: 26275 - DNA, 1869 bp, Heterodera glycines
cttttccgccaccactgtgctgcttgcctgctcgcaatactcatggtgcacaatgatctgcaacaaatttggctggaatggacacggaggtgggaaatgggaatttgatcaaaaaatcgaacgaacaccgtataccagacggtatggtattaaattgattacagatggaccagatcaagttggagacggacgacctgtggacggatttgttggcgatgggtgccgggacaccgtcaaatagggaacgccgccaagtaaaaagcagagaaaaagcagcaaatatttacaaatttgggtcaattcaaattaaataatcactaccaaaaatgttaattgatctgtttttgctctgagtttgaatacgcaattaatccgatcatttaaccttcacaattgtacgatagatacctaataattaaagatcggatttttaggtactgaaaatactgaaataggtgaaaaaagtacaaaaaaatggaaaaatccagtgtcattatgcataaaaatgactcattttttaacaatttcgcccgcacaatagcaatttgtcaagaaaataaataataaattttggagatggatttttgagaattttttcatttgttagtgatgttttttttgaaaattttgggattgattcttagggggtatatttttcgttttattgcacttttgctatgaaatttctgggaaaaggctaaacaggtgctaaattcgtaattttcttttgctatttgtgctcccttttccgctccatgccaatgcctacggcggctacgccgcctcgggcgtacagccgccggccccggccgttgccgcccccgtccaagtggcgtccgggccgttgtccgtgggcagtgtttgcagtgagagcaaattgcactagggaattaagcccaattaaataaacaaaaatgccaaaagattgcaacccgacaaacaattgcccggccggaacgcaaggccaacccggcaaaccgggaccgccagggatcccaggtgcccgagacggagcagtacaaagaacacattgcaaattccccccctcccccccccccaggcgtcccgggcaaagacggagtgccgggcttttctgccgaggacgcgcacaacgcgccgttcaaaggatgcactgttagtggattggaagcccctgattaattgaatttttgctcataattttccacagaattgtccgcaagggccgcagggcgtgcccggcgaggcgggcaaaccgggcattcgcggcatgcgcggccccaccggacagccgggaatgccgggaagggtacgaagcggtgcacctatagcatcattgaaaaaatgcaatttgaacaaaaagcgcattcattattttaggacggagtgcccggctttccgggcgaaacgggcgccgaaggggcgttgggtactgtacaaattaatactcattttgattatccaaaaattaaaaggtttgccgggcgcagcgggatcgcccggcgaaaagggcgaggatcaaaagaaggaaatcggactgaagggaccgcgcggaccgacggggattatggtgggcgggaatgcggcataagaataaactctcgataaattttgccagggtcccgagggacctgtcggactacccggcaacgcggcaccgcccggccgcgagggcgtgtacggcctgaccggaccgccaggccccgcgggtgtgccgggcgcggagggcgaatacggcggcccagggtcggccggacagccgggcaaagacgcggaatactggtgagagtagtagcgacggcacaaaatagggatgggattgggatgactgtcaatggcatttcttagcaaatgccccgggcgcgacggggccgccggcggacaacgcgg

SEQ ID NO: 26276 - DNA, 1351 bp, Heterodera glycines
tcttttttgttaaagaaaaattaaaaaaaaattaataagaataaatttaatttttaatgctatttcccaaacatttttagggaagttaagggggagggaaaaaagaaaattgagcggttaaccgatttttgtcataaaataatgaaatttctcggttttttggtcaatctcctaataaaaaaagaaggcttctgtagtccagcgatggcgatagtcgctgtcgggaaaatttagctaattttgacctatttcgaaccgggaatgccatcaaaatcccgctcccgtaaaaaaaaatcacgcaaggaaaaagcacgggatcgagattcccgcaaaaatctcgcgggaagtcccgatcccgccggtctcaagttgttggttatacatccattttgtgccactttttccagagcacatttttagaaaatcaaagtgctcataaaaatgcatctctattccatttaaaattaaattatatttgtaaaatttaatacataaaagttttttggcttgctgtgcttccatttgctgctcgtctaatgcgccgtttcccatttgtaactcctccaatttctgtcgtttttctttttggatttcataatcattgtttttatcggccgttttttgctgcacaattgaccaattagaatttaaaatttccatttcattttcaattttattttcacgtgcctctccaaacattgtagcctctgatgatgatgatggtagtgataataatgatgatgatgatgatgataatgacggaaaatgtttataattggggatgaattgattttgttgcaaattttgcgaatggcacattaatgacgaagtgtccctgtgttaacataataattcagaaactgatttgataaaataacattaaaagcaattttttcaagcacttttctatcttatatactgtaaaatccacaaatttaattatcagtttatatagaaacattaaaaaaccaaagggggaggggtgattaatttttttaaactgttttacattttcagggtcactgaataaattaatagcatcttattaatttttcaaaattttcactcaaaacttttgttttttgggaatatttgttaaatttcaacattttaatcatataaacccgacaaacaaaacatttacattagcatgttaattgcccattcatttgggatcaacattggctggtcatcatcagcggatggatcattgaaattgctgttaattggatcaattaagttgctgctaatgctgctactgcttgatgaacggttctcgcccattttgccttcaattcgtggtccatcactttcattccttttcttattactgtccattccgtcacatttt

SEQ ID NO: 26277 - DNA, 1439 bp, Heterodera glycines
ttggataatgcttatcaaaacaatccttcaaaattagtggtcggcctgacggtgccaataggcgccatcgaggcaactctctaatcagtacttcaatatgggtttgatcagtctatcacaggcgcatgatcaaactcatttaatctgactaattggtaccaaatttattgattggtttctgactatctgatcagggcttgtttgatcatatttatcgattagtggtactaattcaatggtaataattgaaaaaattaaaattaagtttttatgaatcaacattttcagaccagtcgtttcccctccgttgttgccccccgtgaaattttcttaaaaaaattgctaaaattcttcaaaattctaaatttgaaattttttaaaaagatttccggaggaaacgacgcggcgggaacaacgggggggggggaataaagtgcacccgaaaattttatcacaaaaattgatcaaattcacaaaatactttttctccccactgatcagactgaaggacaaggaggacctggagaccgaagcggagaatcagcaacggtttgagctgcaaaagcagcagaacatgttgcgcaccaacctgaacatcaaacgcgcaatgcgcaaatggatttccatggaccgggagacgaagcagcaccagaacggcaacggcacaacgacgctcccggactgggccatgtgatgtggctgtcatgcgcacaacggcaccagtgataaatcgatcgattggaatgatcggatgatacagttcgggaatgatcagtgaaggaagataattgggattgaccaaagctaacggatattgactgaacaaagagagagaaaagagcacgctaattgaactgatcagtttttaccgggagattggaccaataagctgtcatatttacaccaaaatatattggtgtactaactgatcatgaattttcggttatatattattgtctattgaactgatcaaccggcgcccttgttcagtgaaaagtgcagagatcgggcgggaggatgatcaaaaatactcgggaatgaaaatgaaaaaaaaacttttattcttcaatacattcgatgcctaaaaatttctaaaatttgtaactcgacttgggttccgctgatcattgccgatcaatttttatttccgatcaaaccattaaaagttttacaaaattcaaactggaggaaaaaaattttttcttcccaccaagcttatttagttagttttattcccggctgatggtctcgggcttaatctcttcgagccaaaaaatgccaaaatccaatctgctcattctctctttttctaaagaaaagcaaaaatattatgtgaataaattaattatgattattgtcatctactacttctctctttgctttatttaccacattttaatgtacatacacaaaaatgtattttatatttctccgattct

SEQ ID NO: 26278 - DNA, 1437 bp, Heterodera glycines
  unsure (1)..(1437): unsure at all n locations
tgtaacggtgccataaccgctgcaattggaatcggccttttaagcctaaaaaaacaaaattaattaattaattttaatacaatttatttttcgtgtttacaggtttgatgtatcgaacgacggtaatgttgacatcggaattctttccgttggcgttctcacaggagatgcacccgtccagcaacagcagcaccatgtctgatcaacgagcagggggaacacggagcattaagcattttaaattgttgtaagacccccggtaatacgtgggttaaagatgttaattgtctcgaatcaccactaaaacagtcgggggttcattttgtgtcaggtgattttccggaaattggttggacattcatttatttgtcagaatggggctggagcccaaaaaagatcaacggcattgagtctgatcgttggcacaaaaaagggcctagattcttggtctcgaggtcactggtataataatggtcgagcaaattgtcatggactactcgctaaagttcgaaagcagggctgggaaatattcaccgaataatccttagcattaaatcaaagtgcaaaaccccaaaattttctacattttcgaacccgaaatctcgtccagctctgatcagaacaggtccaataaaagtaagtgatcggtttttccaccaaacttcaaccgcataaaaaacacaccctgcatgaacccgcgcttgtcgaactcgtccatgtccttgatctcctctttggtcttccccttcccgaaaaattgttgcgccccatcgattcctcccaacccataaaagttgagctaaataaaaacacaaaaattataataattttcacattatacactgactttagtacaatatgaccaagtgcttaaaaattaaaatatattttaaaattgaattaattaatttactcaaattgtctgtgtccgcaaatttctggcgtaatcacaattctgtgaaacgcgattaaagtgtcaggtctttgcctttcttgctgcttctccttgtcctgtgatttgacttcgaatacgtgaatctgaatatatataattttaggaaatggaaaatttgaaaaattgctcactttattatataaattcaaatatttaattcaaaaatatactatgtatttctttctggcccgtatccataaaaaattatctgtgggggcacccgaaattaatttgcaaaatctcaaaaattttcgttaagtttcaaaaaagttatggccagaaggaactcaaaaacccagtaattcgaactttttttgctctgatttttttgtgcataaataaaaatttttgaaaatttgcaagctaatagcatttttcgaatgctttcgaataataccaagaatgtttaatttggttgagaaagaaaaaagttatggtcgaaaaattcgntcgacgacgtttcggctggacgacgttttgtc

SEQ ID NO: 26279 - DNA, 1138 bp, Heterodera glycines
aaataattcagttaaaacagcttttaattttaattgtctgaaacccataattttatctgtagaaaatagtcccatatgaacaagacataaaaagtgctttgcgcaacaatctcccctctggtgtccttcattttagaaaggcactgaaccgtatacaaaaactctcacattctaaaataactcagttaaaacagcttttaattttaattgttctgaaaccaataattttatctgtagaaaatagtcccatatgaaccaagacataaaaagtgcctttgcgcaacaatctcccctctggtgtccttcattttagaaaggcactgaaccgtatacaaaaactctcacattctaaaataactcagttaaaacagcttttaattttaattgttctgaaaccaataattttatctgtagaaaatagtcccatatgaaccaagacataaaaagtgcctttgcgcaacaatctcccctctggtgtccttcattttagaaaggcactgaaccgtatacaaaaactctcacattctaaaataactcagttaaaacagcttttaattttaattgttctgaaaccaataattttatctgtagaaaatagtcccatatgaacctagacataaaaagtgcttttgcgcaacaatctcccctctggtgtccttcattttaggaaggcactgaaccgtatacaaaaactctcacattctaaaataactcagttaaaacagcttttaattttaattgttctgaaaccaataattttatctgtagaaaatagtcccatatgaaccaagacataaaaagtgcctttgcgcaacaatctcccctctggtgtccttcattttagaaaggcactgaaccgtatacaaaaactctcacattctaaaataactcagttaaaacagcttttaattttaattgttctgaaaccaataattttatctgtagaaaatagtcccatataaaccaagacataaaaagtgcctttgcgcaacaatctcccctctggtgtccttcattttaggaaggcactgaaccgtatacaaaaactctcacattctaaaataactcagttaaaacagcttttaattttaattgttctgaaagctaataattttatctgtagaaaatagtcccttat

SEQ ID NO: 26280 - DNA, 914 bp, Heterodera glycines
ggatagattcacccggcggggattcgattttaaatgaaagcaaaaaaaaaaattattccaataaaaataacttttgccaaagagtttaaacagaagcgacctaactaatgtataaaagatatttccggaacttcatatcattgaagaaatgtgaaatttacattcttaaggatcattgataactttgttggttacgccttttagtgtatatttatttcctagcacagaatcctatttcgttctttaattcacagtcagcttcataaattgaacaagaaagaaacaaacagttcgcttaatcggtccaagttttgaaaagtttgcagaggaggcgccgtcggaatgactcgacccttcggcggtaagaagaaaaagttcgaattggccgttgcaggatttgaacagaagttgctggtcatctcggatttcaaccttcacttgactgaagaaataaataatttgttacttattaaatttaaaggttcttttaacataccctttcagattcaaatatgtacttaattatatacttttttaaaggacaaaggggttttcggggtcgctgatcgcgaaaactaaaaagtttaactctgtttgattcgggttcatgcttcgaaattagtcaaaacgggtgtcatattcgtgataattgacgttagttaaaaatcgtgctctttaatgtatgcagaaaagtatcagttaaacctaataattgccatgccaatacttttacatacaaaaagtaaactgactgaccctccaacttcggggtcattcgctttgcaataaaatttgaaatttgttcgattcagcaccgatttaaaagcagctaaaaacaaattataaatgaaatccaaaatagttatttgttaacccaatgtgattttgtcagccgaggcggggacatccgtaca

SEQ ID NO: 26281 - DNA, 1416 bp, Heterodera glycines
  unsure (1)..(1416): unsure at all n locations
aatgaattttgttaaaaaatggccaactgattntaaaagccaccggtccgatctctagtttttagccaaggtcaaacccattctaaacagattacgctttcgaatgataccaacaatgttggattttgttgacaatgaaaaaagttattatattgaaaaaacatgctggggccgaatcgtgattttaatataacgactcatcactagggctgtgaattttaggttttaactaaattttttgctcaattgttttgaagaaaggagctcaaaaaacgcatttctgcattaaaaattttcgattctgatgtcgttatcgttaactagaaatcactattttggcgacttcgtcactaaaatagttaaaaatcactattttggcgttttgtcactatttcaacatttttggaaaattccttaacaaaaatgcaataaaaactaaaaaatacacccctaagaatcgacctaaaaatttaaaaaaaataccagttggaattggaaaattttcataaaaatttttcccccaaattttttttcttgacaaaatttttggtttaaaaatttcaatatttgctaaaaaaatgtaagaaaggaatgtacctcatttgtaactgcaatcagtgaataaaatattttggcatttttgctcactattttagttaactatttcgagatttttggtcactaaaagtcacagccctactcatcaccatagtaaaaaaaccaaatttggtgggacaagattaaaattccatgtcgaaatgaatcttttggcgttttatcactagggtgaggatggagggttggtttgtcatctattgtaaagaactattgtggttttttttatattcatttacgcaatctcggaaagttcttatacagtatgtaccaaaaatatacgttcaaataatttttttggtacttcgattacttctcatgaataaattgagctgaaatttttaccacacataccctcctcataattatttagactagagttaagccgcgagccctcggggggcagaattcgggggtcgggtctgggggagctcaattgtcgggggtcggggaccccgatcgggtagtgtttggcattttttaacaaggcattttaattaaaatttgaaccttggaattcgctttccgaattatgaaaatttttgggttgttaagggaactttttcaaaaaataaaccaattttttgattttcgagccaatttttaggaaaaaatttggagttttggggggccggcggtgccgattggcgccgccgaaagtttttaggaatttttaataattttattatgaaattgttcaaaattacaaaaattatcaactttttcctccttcgttgtttaattaacttttttaatttttacaacgcccggagtccccaatcccccgaaatagtgtcgggg

SEQ ID NO: 26282 - DNA, 1070 bp, Heterodera glycines
tattactgtgagcagaaaaagagatagccaattttccaaatttttcccaaacaaacgcgccgagaaacaaattccagaacaattagtatcggcgtaattattctgagaatgcggttggaattcctattactgttgagcagaaaaagagatagccaattttccaaatttttcccaaacaaacgcgcagagaaacaaattccagaacaattagtatcggcgtaattattctgagaatgcggttggaattcctattactgttgagcagaaaaagagatagccaattttccaaatttttcccaaacaaacgcgccgagaaacaaattccagaacaattagtatcggcgtaattattctgagaatgcggttggaattcctattactgttgagcagaaaaagagatagccaattttccaaatttttcccaaacaaacgcgccgagaaacaaattccagaacaattagtatcggcgtaattattctgagaatgcggttggaattcctattactgttgagcagaaaaagagatagccaattttccaaatttttcccaaacaaacgcgcagagaaacaaattccagaacaattagtatcggcgtaattattctgagaatgcggttggaattcctattactgttgagcagaaaaagagatagccaattttccaaatttttcccaaacaaacgcgccgagaaacaaattccagaacaattagtatcggcgtaattattctgagaatgcagttggaattcctattactgttgagcagaaaaagagatagccaattttccaaatttttcccaaacaaacgcgcagagaaacaaattccagaacaattagtatcggcgtaattattctgagaatgcggttggaattcctattactgttgagcagaaaaagagatagccaattttccaaatttttcccaaacaaacgcgccgagaaacaaattccagaacaattagtattggcgtaattattctgagaatgcagttggaattcctattactgttgagcagaaaaagagatagccaattttccaaatttttcccaaacaaacgcgccgagaaacaa

SEQ ID NO: 26283 - DNA, 1882 bp, Heterodera glycines
attattaattttagaataataataattaatcaattttaattaaatttagtttataattttattttacagtcccccattcgtacattcaaagcgaaaattagtcaaaataatgttattgaattgtttattgacgcccttccagcaccatgcccttttgataattgaaaataaattgtgcatgatattataatatttaattgagaaagaaaaaatatatttgcgaattcaaaatggaatgttttttttattaattttagaataattattaaattatttataattttatttgtgaatttaaaattaaattattatattgtttagaaataccaatttgataattcttttaattaattaattaattaggaaaattccgttaattgatttctttattgggtactccttccatggaaatttttttattaattattgaataattaatatttatttaaattttttatttgcgaattaaaaataaaaaattataagtattgtttgagaaaaaacaatttaataaaacctattaataaattaggaaaaatccattaattgttttctttattgggtaccattcccccacccttcccttttgataatttatttatttggcgcgcttaaggagtactgttattaatttgagcgaatagaaatacaaatttgatgatcttgagaaaagttctttaacaataaaccaaataaactgcttttaataaaatgaaaagctaaaaagggacggtataaattatgtatcaaaaataacattttattaagaaaaaataaataattttaattattttcgagattttataaaatatcattattagttttacaatttaaaatattaattaatcttttaataattaatttaataataaaaaaatataattttaattatacggtcccccattccttttttcattcaaaccgaaattagtcaaaaatccgttaattgatttgtttattggtcacccttcccgcattcgttccatttgataattgattgtttgttttagccctttttatgggtactggaattaatttgtactgatagaaaattttgataagaaaattcataataaataaatttatttgtttgttaataagaacttcaaaagctaaaggcttacggtggctaaattgtattaaaaataaattaagaaatataaataatttttaattatttccaaatttaaattgaaattattttattattaattttagaataataattaattaattaaacgtttttaataataaatttaattaataatttttttaattatacggcccccatttcttttttccattttaaaatcgaaaattgtgaaaattcgttaattgatttgtttatttgacactgttgcagcactcttccctttcttcattgatttgtttattttttcatctttaagggctactgtaattattttggattaaaataatgatgcaaaaaattattcaaaaatcataaattacatttagataaaaaaaacattcaaaagccaaagggttagaaaaaataaatgtgcatcaaagtataaacattcattgagtaaataaataattttaattatttgcaaattaaaaattatttgtttttttaaataataattaattaattagaacattttttagaatttaataaataaatattatttaattatacggccccccatttctttttcgctttaagtcaaaaattggaaaattccgttaattgatttgtttattttattgcagcccccttcccttctcgccattggaactcgccatttcccttatccctcgctgcaaccctttctcgccactctcggtgccgagcaatttctcgccatatttctcgttgcaatgtagtctcgccacactctcggcccgctgccaatcg

SEQ ID NO: 26284 - DNA, 1766 bp, Heterodera glycines
cctgttcacccaaggatccggaaaggttcgcgctctattcacttatgcgccactttcccggtgaccctgaccatcttaaaatggtaaatggtcagccttgtacctctttcactgatgctgcaataaggcacggtcttcttgaggatgacaaaatctgggataaaacactcgctgaggcagcgttgtcacgatggcctgatcaaatgaggtggctcttcatgagcatcctcgtttatggccagcccagtaatgccgtcgaattgtggaacaagtacaaagaccaaatgtactttcctcaaggcattaccacatcggcacaacgccaagcagcagagcttgaagccctagccgacattgattggcggctgcacagctgctttaacttaagctctgtgcattttggcttgccagacccgccaaactcaattgccaaaaatacaaatgcggcaattaataagtttttctttggcgatgatgatttgaatttgcctccagggcaaccaaatcctcgtccacagccaaatacccctccgccacttaacagcgaccaacagaaggtctttgatgctgttttgttggcaatacagtcaaaccctagggattcgactgtcccccgccgtttcttcatatacggcgatggaggcacaggaaagacattcctgtttggccaaattattaggcgcttgcgaaaggccccatacacctacaaagtgcttgctacggcatccactgggtgtgcagccattttgctgccatatgggaaaacagcccattccacgtttcgtctgggtagagaagtgtcattagacaaactcccaagcattccgctggagagcttctttgcccgtcggattcgtgaggcccaactcatcatcattgatgagatcaccatgcttcacaacacggtgattgaggtcatcgaccgagtgtgcaaagagatggcaattcgccagcacaaggatctcctcttcggaggaaaaacggtcattttcagcggtgacttcaaacagtcgctgccggtcgtgcctcatgaaggcttaaccgctcaggtgacagcctgttttcaaacgtctccgttgtttggtcaattcaccacgatgaaattgaccatcaaccagagactgggccaaggtcagcaagcgtacttgcaaatgtgccgccaaatcgggctcggagaaaccggagagcacttctggattcctccgcagttcctcgttaagagcaaggaagagctgatagattatgtctatcctaacttccaacaactccttggcaatgacaaggagctgctcaatcgtttgattctcgctccgcacattgacacgtgtgatgaagtcaacgagatcatgatggcgaatgtgccaggtcaagtgcgggaatacttgtccacggataagcccctagacgaccgcccactggacatcgatgagatcgagtccgaagtggctgcgttgaaccggcgcacagactcgggcatgcccccgcacagtctccggcttaaagtcggatgcgtcgtcgtccttcttatcaataaaagtgataaggaaggactgatcaatggcacacgcatagttttggaagaacttggcgatgatcgcctcattggtcgtgttatcaatagcaatgctattggcggccaagtgagattctttcttgaaagaacacgaaatgtctatgaagacaaatcgcctggcggcataaaatatgagcgtttgcagttccctaaaaaggcgggcattcgctatgaccattcaaaaaggtcaggg

SEQ ID NO: 26285 - DNA, 1405 bp, Heterodera glycines
  unsure (1)..(1405): unsure at all n locations
tgcagatttttcgaatcaacaaaaaatgaatgggtttntatttcgcctnttgcccctggagagggagggcaatatgagcgtatgattgggacggttaagtaccacttaaaaagngaaataagaaataaactcctcagttntgaggaattatggactttgttttcagaggtggagagaatagtcaatgagagaccaatcacttacacttcccaatctgaagttattcagcccctaagacctattgatctaattttacccaacattggtaacaatagattggaaataaacactagatctgttgagaactcagacaatgattatattttggaaaattcaaacactgctaatgtagtgcaaagataccagaaggcaatgaatatggctgaaaaattttggcaaaattggaaagattcctatttattgggtctaagggaacgtcatcaagggaacaaacacacaccaggaaaagcaccaaaacttggggacgtggtgatcatttctgaaccacaaactccaagaaattgttggaaattggggaaaatagaagaaattatgtcacaacgaactgcaagagtcagaatttcggaaaaatcaattattgaacgtgctattaagcacttatatcccttagaattagccgaaaatgccaataattctgactctggcattagaaagcaggaacacagttctgtgaaacaaattcattataattgggcaaaggaacctcctcaaaataaggcgcttgttaaggaaaattccccaaatcactacagatgggcaaaacaaccaccgaaaacaataaatgatataactaatgtgacatgtatttcagaaatgaacaaagacttcgatgccgtgtctcttgattgtgaagagatggaaagagatctcgaggacgaaaacaaggaggaagaatcgaaggatgagagaaagggcatttcacaaattcctgttgaggaaaggcgccccagggatggcgttggagaaaaaagggttattattaacgctcccatcgcattcgtcggggatgacgaagtggaaccaattggacggacattccaagacaacgggctccgtgccctagttctggtgcactcactaagggacattgcctggtggcatcggttaccagaggtcgtcatcattaatgatgtttgtcagatggtcgtcgtgcggacaacggaatgggccgagcacatcagaccatttttgagccttttgggaagatgggccaaaccggcggtctggattggtagtccatacatgttgtgaggcgtcgcctggctggaccggcacagacagtagaacttgacatcacagacttgtgtttatgggtgctccgcgaatcactcaagggggaggaagtgcgttgtataagaagcgatgcccaacaatcattttctga

SEQ ID NO: 26286 - DNA, 1520 bp, Heterodera glycines
  unsure (1)..(1520): unsure at all n locations
tctcttgctggtatgcacaatgctaactatctgcagataaatcgctatctgcagataaatccatatgcacaatgctaaggattaaaatncgcatgcacaatgacaggttctttcaaaaaanaatccttagcttgagctgcagctaggctacatatgcacaatgctaaggatagggtagcagctacctatctgcagattaaaatcactatcctcatcgagaggaggatagttgcgagaaaaatgtcaattaaaatcaaaaaatgtttaaaaattgaaaaattgtactaaataattttaactactcttctctcttcttcctaagtttttttgtttaaattgtatgatgatttaagttaaacgaaaattcgaaatttacaattttgtaaaaattattttgacattaataataaagcaaaattaaaagtaattttgggcaatatttgccctaactgcaaaaccatcactgatgatatcttcacctattactacacgatcatcgttttccggctgatcatcaacaaattcttcttgatcaaattcgggaatccctttcatgagtgcaatattatgtaaaatggccgcggcaattatgaacatgccaatgttttccaatttaattcttattggtgtttgaagcgaatgaaatcttcgtttccacctgccaaatgtttgttcaataatcacacgcgttttgctgtgggcattgttatactgttgttgtgaattattgatgggattagcaaatggggttaaaagccattttttacagggataaccactatcacctaaaaaatatttgatgatagaagaaaattgaaataattttattacccagcaagacaccacgcaaccgcctgctttcaaaatcttgccaaacacttgagtgccgcaaaataaagctgtcatgagtgctccctggccatttgcaatttatatttaaaaagcgtccattatggtcgacaatggctaaaatcctcatttttatttttattttatttctttttttgccttgggcatttatgctgggccatcctttgcgattgtaataatcccgaccatgccgcacttcagagggcatcaaaatcgggatatgtgtacagtcgatcagaccgataacgttcggcattcctgccaccgcattaaaagcgggaatagagcacaaacgtgcctaaactctttaattatcaaaaaagttacacaaattactgtacattttcgtaatcatcaaaatatatgaaatcgccggcctttcggcataaagctcttgttacacggaaaatggcacgcgagactgatgcttggtgaattcccaaaatgtctccgcaccataattgaaacgacgaagatgccaaatatcccaatgtggccaaaacttggagctctgttggaagagctccactcttgccagttttccgctcgacgtcttcttggacaagttcacaaatatacttaatcactacatattattacatttattaatatttaaattttgccgacttttaatccatttcgattaaatc

SEQ ID NO: 26287 - DNA, 1838 bp, Heterodera glycines
ctcaatgattctcgttttgatcaaaaggcttttcgaaaacgccgaatttcttcatttcaatcgtttttcgtggcatctatgatcaccggctttgaaaaacctttaaatttcagcattcaacaattaaaatggaatttttctctccatcgagccgtttttttgaaccaaatggaagaggtcgagaagaatttggcggatgtgaagaagaaggatgtgcatggcaacacgtcagttttaagataaataacaaaatcgaaataattatttccatttttaagcgcacttcacatcgcttgtatgcttggcaatgaaggtagccaatgtgtactgcgtttacagtattattcgatgtatttttattttacagaaattgcgcgcattttgttggagaagggcgccaaagtgcgggcgaggaacaatgccgaatggaacgcattggacgaagccatcgcgtatggcgacgttgaattaggtgggataatttcacttatcaaaactcaccgaaaaccggaccaccgacaaattgacgcggcatcgacccttccgacacgccatttcattccctcgaagcggcaccaacccttttccgacgcggcattgtcccaaaatggcacggaatttccccgaagcgtcaacgacctgtccctcccccgacgcggaaccgaccctcccgacgtggcatgtcccgaagcggcacgaccatttcagggttttccccatcccctcgtttaatttgagcaggaaaatgcaccaactcacactcactcacccgacgaccaaaccccacagctttaaaaattaaaaaacaaaaaatgacatttttgtttgtaatttttagcatttaataaatcatatataattttattgaattttcagttcaaacggtccacagcatatttcaagcacaaaccaaaatcgcaatgttggacaccgcgcgaaaatttaacgcaaatttgccaggaatgggcgattttagcatcgacataaaatgggtaattagcaattttaatacttaaaaaaaatccaatctcaaacctcaaattttacaggaactgaccacactgttgcgtaatatttttcctttaaatataacataatttttgacacaacctatcttcaagcactgccatctcgtttgcgccctgaagataccatcactgtacacaaaaaaggagaaaagttgcgcgtcaatttttccctcaaggaatttgacatcacaactttcaaatggtaatttcatttgctaattcgtcggggttggagcttcataatttcttttttggaggattgcaaaatgatagttttaaagattaatttgagatcccttggtattgtttaaagaaccttttgtttattaatgtttttcaattcaaaataatttctaggcaacggggcgacatgactttgctgctggacatccacaaggatgagaaagcagtattgttggacaatattgagaaggtgaattttgccaaatttctcaaaattaaccattatttctagaaatattgcgtttttcgaacggaggaagtgttgccgcagcagcttctgacggagaagaagatcaccaaataccatttgaacgccaaccaactggacttcaagagggcaaaaacactgctaaaccatgagaaaacggttaattattttgaaacctaaacttgaacagaaaaattttaaattgagtttcagaaatataaaaattaacaatttttcatccacattctttttgctatttccaatctggctattttagtttctaaggtttcagcagtctggtttgatcaccaaaatataatgacctgaggcgcgtgagaaatgtcaatggaaacgaacag

SEQ ID NO: 26288 - DNA, 1298 bp, Heterodera glycines
  unsure (1)..(1298): unsure at all n locations
cagctgctgctggtggtgtggacaagcgaggacggctcacnaccgaacagtggcgaggccaggcaggagatgaacacgcggacacccttggaggtgggtgacgatctgtgcaagggaaacaaaagagcttgatttaattgaaaaaggagtcaaacgtgggcaggcaggagctacggcatgaataaaggatattgcaagaaattagactggttggaaaactttttactcaaatgggtactctgtaagccgaaaaaatcccaaggtgtctttttttttgttgcttttcgttcatcatttccgatgctatttttcaaaattataggcgcggtgtaccacaaaatgcgcctcgtttagcaatttctcgccacaaaattcaaaaattctgaactctaaaatgttgttttaaccgactgactgactaaccaagttgacattgatggattggcccagcggcacaggcgtcagtgacacaagctcgtggaacagttcgggttgcacattgcacgactcgcgcgccatgtgctcaatgtgttcacggtacagcgcaccaaacttttggatgctgcgcccgtccacgcccaagtcgaacaactgacagaacaaataaacaaacaaaatgagaaaagttcaattaaacacaattggatggagtggacagaaagcaatttcctcgcaccgaagctgggctcagaggccaggctttttcatgaacctgggtttttgccgaaaaaaccaaggcccgggctaactgtaagcaggaaacccccaagtcctgtatacagactttttccgaaatgtcgctctctaataggaagcatatgatttagtgaatattattaatttcacgctattagttatatataaaatggaaatttaaaaaattctaaaaataattcagaaaaaaaaaattgcatttgaactaccacacctgaatgcatccgctcttcatcagcacgtaaagcaaatggcgactgtcgtcaatggctaactggaacacggtgtccttggcgtagaaaatctgcagcaccggcaccaagtagttgagcaaccgcttggaatggttcgttttgcgacagctgccacccgtgccgaaccaacccttgccctaaggcataaatttacgaaattttgacggtttgccattatttttttttatttgtgtaagcatttttaaataaatttggtatagatatctcacgaaatattccaattcgaaaaggttgtcgtcggcgccgaaaaagattcgaccattgcccgagtgcaaaggtcgttgacgatcagtccgtcaagtggcaact

SEQ ID NO: 26289 - DNA, 954 bp, Heterodera glycines
tggaatattttctcagcgcatttgatcgtgaaaatttggaaaaatggctatctctttttctggtctacagtcaagggaattccaaccgcactctcagcataatgacgccgatactaattgttctggaatttttttctcagcgcatttgatcgtgaaaattttggaaaaatggctatctctttttctggtctacagtcaagggaattccaaccgcactctcagcataatgacgccgatactaattgttctggaatttttttctcagcgcatttgatcgtgaaaattttggaaaaatggctatctctttttctggtctacagtcaagggaattccaaccgcactctcagcataatgacgccgatactaattgttctggaatttttttctcagcgcatttgatcgtgaaaattttggaaaaatggctatctctttttctggtctacagtcaagggaattccaaccgcactctcagcataatgacgccgatactaattgttctggaatttttttctcagcgcatttgatcgtgaaaattttggaaaaatggctatctctttttctggtctacagtcaagggaattccaaccgcactctcagcataatgacgccgatactaattgttctggaatttttttctcagcgcatttgatcgtgaaaattttggaaaaatggctatctctttttctggtctacagtcaagggaattccaaccgcactctcagcataatgacgccgatactaattgttctggaatttttttctcagcgcatttgatcgtgaaaattttggaaaaatggctatctctttttctggtctacagtcaagggaattccaaccgcactctcagcataatgacgccgatactaattgttctggaatttttttctcagcgcatttgatcgtgaaaattttagaaaaaatggctatctctttttctggtctacagtcaaggga

SEQ ID NO: 26290 - DNA, 880 bp, Heterodera glycines
gcattctcagaataattacgccgatagtaattgatatgtgcatttgtttctcgccgcattagtttgggaaaaatttggtttattgtctatggcattttttgctcaccagtgataggaataccaaccgcgattctcagaataatttcgctgatcataattgttgtgcaatttctttctctgcgcgttaaattgggaaaaatttggatatattgtctatctcatttagtgctcaacagtaatagcatttcccaccgcattctcagaatacatactccgatgctaatgcttctggtatttgtttctctgcgcgtgttgtctagaaaaatcgtggaaaatcggctcatctctttttgtactcaacagtaataggaattccaaccgcatctctcagagtgattgcgcgcgatactaattgttctggtatttgtttctcgacgcctttgtatgggaaagttttggacaacaggctatctctttttctgctcaacacccccccaggacccccccgggtccaaaaatttttaaggaaaaataatattttggctgaaaattttaggttttccttgctgggctggtaccccccccccccagacctagcctcacccagattttccaagaaatgtcgctatttttcaaaaaatccacaaatttttaatgaaaatctgctaaaaatggctcaaaatcacaaaatttggtcattttttggataaaatctgttaacaaagcgcatttaaaaccgcaaaaattttcccggcggcgcctatcggcaccgtcggaccccctgtcccccaaaaatttttttgggaaaaccgcgccacataaaatacgggtgtgaaaagcaaaaaataaaaaaaaaaaaaggtcgtcgcccggggggagg

SEQ ID NO: 26291 - DNA, 2268 bp, Heterodera glycines
ttgtttatactttgtctggagttgtaaaattcagagaattgccgtaacaaccgtagcggctacaatgtaagtgaccccgaggaattcactgaataaaaataaggcaaaattcagatggatagcgcacagagcgggcattcgaatattcgcaacgggaggcatcgggggagtgcaccgtggaggttgttgaatgcattttgaatcttccaaaataaccattttttaagacagccaagacgtgagcgccgatctgacagaattgggccgaacgccgctgggcgttgtctgtgcgggcgttaagtccatcctggacattgaacgaacgttggaatatttggtagggagcaaaacgacagggaccgagcatcggcagcagaacaattactgatctgacattccattttcaggagacccaatcagtcaatgtggtcgttctggacaaaagtgcggtctttcccggcttttttggtcctcccactgcaattaaaggcccttatcacaccgattcattggataaagtggccgacattttgcgtacgtccattttgtggcatcattatttaattctaccaattttatcagttctgtccttccaaatgggcctcccaaatggcactcttatcgcatgtccactcactgacgatgccgttgacaagcggttagtcgacgaaagaaatgtaattgcggaagcgactaaaatggcactgaaagaggccgaagaagcaggcatcagaggcaaggaggtgacaccgtttgtgctggagagaatccgtcaacgggcgggaaaagccgcaacagaactcagtgagcgaacgcacaaataattacgagaatatgcgtcctttctcctcacttaaacagctttcagatatcgctttactcgaaaacaacgcccgaattgctgcccgcttggctttgctttgctccagcaagacattacccgccggcattgaaaagcagcccttgataacagccggccagcaaaactcgtccagtcaatgcgaaaacggtggcacagtgaaaaaacgccgtcccaaaattgtcagttttgtcatgtctgctcatttccactgctgacaatggtatcatattaaaggtgtgtgccggtgcctctgtcgttgatgtctctgtgtttcttgaccaaagttccgttccgccgcttggcccagccgccgtcggcacttatcttccggcgcggatcattcaaacaagtggtggggtggcgcggaaccatgcggacgcactgagtcggttgggatgcgacgtgacactcatttcggcattgggcacaacgacggaaagaaatagcggcggcggtgaagagtcacggaacgatacagtggatctttatggacgctttttgatggaaaaatgcgatcacattgtttgtctttataatcataaaccgttaagaattgcaaaatttgtttaggattggtcccatgtacgccactgtccgggcacagcgactgccagttcagttgggatttgttcaaagggcacaatcatttcgcaggcattcattgcggtggaaccaattatggagcgcatagatgagaaatatgtatgaattaatgacatgattggtttgtccgaacctttttagattcggtcaatggaggcacacattgccaatgccgactttttgctggtggatgccaatatgaacagcggggcattacggatagcggtcgaattggcacgcttgaacggtgtcaaaggtactcaaactgaaagccaatttagggggggggtatctacgaccaaaagaaaagtgtctcttatcgcctatagtttggttcgaaccgacaaattggaccaaggtgccgaggctgttcgaagcgcttggcaaaaatgctctgcacaaagtgagtgccatatcgccgaacctgaacgaactggaggaagtggtgcgacggttgaacgatgagaaaagcctaatgtttgtacgtgggctaaaaggttgttcggttgggcatttgaactaataatgacaaaacctatctgtcagtttttctgaactcgctttgctattcctcggcaccgaccgcccatttcacgtcgcttattaacgaatggatcgcacggaacgaagtgcccgtcaccatattcccccggtcaatgtcccacctgctggtcacttgtgactcgatgggtgtccttttgttcgtgcattctgcgggctcgtcctcctccccagtggctcatcatttccctgctccatgagaggtcgacctgatcagattgtgtgtgtgtcgggagccggcg

SEQ ID NO: 26292 - DNA, 1192 bp, Heterodera glycines
ttttgatagaaaaagcatcagagagccttatttaacttttaattaacatttggtgcgtttcagagcactttctgaaaaaatacttatgaattaattttgcaaaaaataaataagtaatgaaaaagtcagaattttgaaaaattttaaaaacaacaagcgttggcattttttcaggttaagttagtcctttacaatggagaaggcctgcaaaatttggagagattatatcgattttagtgcgctaggttcgatgaactttttaaatataagcctaaaatttttggcctgtttaaaaagcaattaaaaatttttagattttttattcatctccctttttgatagtgaaagcatcagagagccttatttaacttttaattaacatttggtgcgtttcagagcacgttctaaaaaatatttatgaattaattttgcaaaataataaataattaatgaaaaagtcagaatttcgaaaaattttaaaaacaacaagcgttggcattttttcaggttaagttagtcctttacaatggagaaggcctgcaaaatttggagagattatatcgattttagtgcgctaggttcgatgaaactttttaaaatataagcctaaactttttggcctgtttaaaaaggaattaaaaatttttaaaatatttattcatctcccttttgatagaaaaagcatcagagagccttatttaacttttaattaacatttggtgcgtttcagagcactttctgaaaaaatacttatgaattaattttgcaaaaaataaataagtaatgaaaaagtcagaattttgaaaaattttaaaaacaacaagcgttggcattttttcaggttaagttagtcctttacaatggagaaggcctgcaaaatttggagagattatatcgattttagtgcgctaggttcgatgaaactttttaaaatataagcctaaactttttggcctgtttaaaaagcaattaaaaatttttagattttttattcatctccctttttgatagtgaaagcatctgagtgccttatttaactttcaaataaaatttggtgcgtttcagagcactttctgaaaaatacttatgaattaattatgcaaaaaataaataaataatgaactctcttccttttgaaaaattttcctgcaccgaagcgtactcactttttccgcttcgcttagtcctttac

SEQ ID NO: 26293 - DNA, 1271 bp, Heterodera glycines
tgcaaaatttcttcaaatttggttggttgaaattgcatctgtgatacatttccaaattttttgactcggtaaggcgctttgacaaagacggctttcgttttgcaattagtcggtcaacattcggaaattggtctcgaattttttcggcaatacgtgcaatcattttaaaagaaaaaaaacataaaagccaaaatttattaattttttttagcgcaaaatcaacaacaaaagcgaaattttcgcttttttgcttatttttgacataatttattaatttttaagaaaatttaaatttattcaatattctcgagaaattttggcgaaaaaatgattttttgaaaaatttttcgggttttgggctcaaaaaggctaatttagctgctgggggccgttctaatagaggtttttttgaaaaatgccaaaatatggacataaaatatggaccaaaatgccaaaatatggaaatatggacataaatcgcgaaatatggaaaaatatggaaaatatggatatagaaatccttcctagaagcttcaaaccaagctaaaaacatgtttttcgtgcgtttcaggcctcccacattccaggaaaaaaatatggatttccatataattaccatccctactgatgaattattatcggccgctcattcttaatcaaatcatttcttctgctgctgatcactgtttttgttgttttgtccgtcactcattgtcagaagacggcccatttgtgatgctttgtcccccttcttcgtcttcttcttcccgtggtggcggagacaatggcctaaattaagcgaaaaattcaaatttggataaaaacaaatgcccttttattgctcacccaatgctattagtgccactaaaaagccaaatgaaaacattgttccatttgccccaatgttcatcgttcttctgaagctgaacagccgcggcctccccaattttgcatcgtttcattatccaattgtccgttttctttgctttggccaatgtcagcttttccattgtccattcgttcaccaattcaaatggcacaatttgcattggggcgcatgaacagtaaaatgaatttcgtaactgacggaacaaatggtggtacggagaaatgccgaaacaatttggaaaacaaaaatcagtgatttgccgaaattatggccacacctccttgcaattgttgacccaatcgaggtacggttgttcagttaaaagttcacaacacaatcgcttgggttggccatcttttctcggagtttgcaaccatttgta

SEQ ID NO: 26294 - DNA, 1305 bp, Heterodera glycines
gcatcggctcaccggcgccatcaactcttacatggccaaccactgtgactccacaagaacagcttgttcaatattcgttgagctcgctatcgatttcaacagcctcttcaggcatatattttttcacaaaactcgttgttttcacgaatctttcgtttatatttaataaaaaatttagttcgcgtgtgggaggaagaaatctttcgggcgctccatttcccaattccgctttggaacatgcactcgcaggcggcttctgcactcgctcgtacaaacaatggactggaggctactcatctacattttatggtctttttaatttagtaaaaaaaaaaattgaaaaagagtatttagaagggtctctgtcatcacccggcactctcggacttcatctgtggagtcaatgaaagcatcgtcagacaggtggacgctgcccaatctgctcgccatttcattcacaagcgacaaaagcgatacatcctgcaggacgcgctcattatgcgaattttagcggacgcgtcgtacaacaacaacggtgaaattcatgaccttatgacggccctcggtctacaaattgaaggatacgcaggaaaattaaaagatttcgaaaattttgatgattcgattgttcatgttccatgatgaattttattgaattatttaataaatttattcactttcaatgtatgaagtttagtgtgcctagagcccagagatataattcgaatgcttacaaatagaattcggatcacctaggaaccctaaaacttgttcgaattttgatcagcgccctttgacgaagccttgaatttttttgctattttatgtttatatctgggtctaggattaggaaatgggttatataaaggtcgtattcttactcagtgaccccgaaaaccctaaattagacccgttttccgggtttttatgagctttttagacttttggacatttcgtggttttttactcttttggacatttcgtggcttggacaattcgtggcttggacatttcgtggcttggacatttcgtggcttggacatttcgtggcttggacaattcgtggcttggacatttcgtgggtcagcgcgatttatagttcaaactagagttgctcggtaccggtaccggtactggccggtaattaccggttttttcaaaaatgaaattaccgttaccggtttgtctagtaccggtaccgccggtaaaaatttgcactggtaagaatgggggtctggtcgagaaaagagtaggaaattggtgaagaaggagaaattttgagaaaaaattaaattttatttcatt

SEQ ID NO: 26295 - DNA, 1017 bp, Heterodera glycines
cgccaaccaatattttggtaagtttaactccgtttaattttcaatttaacatttatattttcgcggtcattttctcattgtttcaaaaattttatcaaaatgagagtcaaaattttgccaggtcattgtcacttttagtgaaggttaattaagggttagttacatctaatttgtaaatacttttgcatccctaattaagtgtcactttcctttatattaattcatcgaaagatttataattttataaaatgattatacttaagttgtttgttttcagatccgtgaaaagcagtgcggtgacaaaaatgtttttccgctgaacaaatggctccttcttccacgcaaccacaaagagcatcttccgttttatcttttaatttataattatgaaaggaaggaacgaattatgatttgattaaaaagttaaatggcaaattgagtttttattagcgtcgtcaatttcgtgagctaattatgtctttgttcgtccccggggttaaggcgcaaaagggagctggaatgagcaagtttgaagtgtatgctcttgatcagtcggttagtttctaatcaggcaaaataagttttataaattaatttgccgaaattagtaaatattcaaatataaaaaatagcggtaagacttggactcagcccacccgaaaaaatgacatgaatttgttataaaactgcttaatattgaatattattcacaaaaatgtatgaaaaagtgacgatatatagcgaaaatttttatcaacatttgaaatttttcaaaaaaacgtcatttttgagtgaatttatcaagaaatatgctgttatacatctatttaatactgtatttttagcaataaaatgcaatttggaatagacgcaagctcttacatttttttggagatgagcaaaaagttataaattggaaccttgaaaacggcttgataacaaatgtgcgttactgctatggaaaacggccgacacaaaagtacaaaaaggaaatgcgtttgacaaaaacagaggcag

SEQ ID NO: 26296 - DNA, 1430 bp, Heterodera glycines
tgcaacacagttacagcggcaccgtcttatggcattcaacaggcacaattttttttttaaatttttttcattggctagagaattttcaaaattaatttccttgtccagaagagatcagggggattttttcttaaaatttttttaagtatttaaagcaacattgaaaaactgattataattatgacacttagaattcagattctaaacaaaatttagcgaataacctgaaaatatttgaattgatatttgaattgaaaaactatgtctaattccaattaaattaatttttaatttaattgattattatcactaaattattttcccattttcatgaaaaattgaatttttaaattaaaataaattattttctctttttatttttagtagagtagagcgggaccgggaattttgggcttaaccgggaccgggaccttttcgggttgaaaacccgggaatttttggctgggaaaaccggggaaaaacccgaaaaaacccgggactggtcccggtcccggtcaaaaccgggacctcggtactcagttgtccgtgttttggtcccggtcccgctctactctaattttttctattgaaagcggatttttttctttgtacaaagatacgattattgttgttcatagaattaaattaggtattgaaagagttatgaatagaaaattcaatcatctctatttgtaaagtaatttcatcatagtgatactaaatactaaaagttttgtattagtcactattttggacttttttaactattttggcactttttctcactatttaaaaaaaatgttttttggcttccttttttcaattttccaaaattagtacaccattcgatagagcttcaatagctttacaatttagttcagaggtgatctttagctttggtttttttcggtttcggtttttaaccgaaaccgaccgaccgaccctcttgtccggtctctaatttaaagtaataaaaaatggaatattatttaatttattctatgaaatgtttgtaaattaacaaaatggagcaaacaataataaataaaaacaatacaaaatgataaaataaaaaaaattgataacataaatttaactccaatgcgacacaatcaaatgcaaaaacccttttttcagcgagaaataaaaaaacataaaaattattagcaaagagaaatataaaaaatgatatttattcattattaattttgtggtgaataaaaaatgaaaaaattaaattaatttattaatcttttatttcatataaataaaatgatcatattccaaatatatttttattaattaatgattttattataagaacatttaaaaataatattttacaaatccataaaattcgaaaataaatataaaattaaaccactttttaaaaaagaagaacaaggagcgaaagacagattctttatgta

SEQ ID NO: 26297 - DNA, 1687 bp, Heterodera glycines
tcataaagtgcgattgaattgttaccccaaataaattatataattacttcccgaaaaactaattaatcatttgtcagaaaagtaatccgtgcgccaaaatatgccctagaaaagcgaggagatgaaagtgttgagaagacttgagaagattcaaatgaaatgcataaaaataggctaatgtgcttcgatttaaaaaaaattattttaaaaaaaagtttttgagttaatttattaaacaaagtaaaattagcgaaattgttatgagttaaataatttgacttttgttcctgcacgaataacataacatttttaaagaaaaattacaaatgaaatcaaatttaaataattaattacaaaaataattatactaaaagattttgattttcttctatccccatgtcattagtccatcgccgccggcattgcccgacaatgggccgcccccgcaaatggcactttccgagcacgacacggcaagacggccggcaacgcgcggctgcaacgcgtcctccaccttcagcgtcatttggccacccgcgccgtccaatttggccttgctctgaaacgggagaaaacaaaacaatgaatgcggcataaatgtggatggttaattcgggaattttgacatgaatgcggcataaatgtggatggttaattcgggaattttgactcaagaaattctcggaataacactcattttaatgtattcaagcggttatctctcgtggatttgtcaaatctataggaaaatggcacagtgagagatttacagattaattttgatccaatgaaaatgaaggcggatatttaagttctaaatctgtcggctttctactgaatatcttcagaattttcaaaatgtctcagggattaaatcaaaacgaaaaaagtcgaagtttaaataaaatggcactcgataaacaatgaaattatgagaaaattttcgataaatttacctccttcgccaattgccactggccattttcatctcttctgtgtaaagacaaaattttgtaacaaaaaattgaattaaattaaaatgccacctaaaagtgttcaattgccaatgtttgcttgcacaattattgccctttaactaaaaaaaattatttaatttgtttaattaatttttaaaaaacttaattaatattttgcttacaataacatttttggctcccggctcttcgaaaaccagtttttctgtctgctgtccatcgggaagcttaaaaacatagacaaatttaaaatttacgtttaaataaaatttaattgaatgatttgggatttaatttataattttacgttgttatattaaaagtagtgattcataattatcattttaataaacaataattaaaattttaaaaaatatcgtagcaaaatttcaattttttttgcgcctttcacctcaatgctaatcataaatggcgttttggtattcgagacgacatttgccaaaatttcgcaataaggtgccgcatgtgagaattttatgccgtacatattgaacaaaacaatggaagaaattgaaaaaaagaaaatggcaccgaacatttcaatcccaatttttaaaatctaaatatacctatttaaaatagagaaaatagagtataaataaagaacaattttgtaaatttcaatcaagtgaagggcaatttttttgaaaattattaaaaatattcattaa

SEQ ID NO: 26298 - DNA, 1517 bp, Heterodera glycines
  unsure (1)..(1517): unsure at all n locations
gggaatatttattaaattaaaattaaaattgcgtaaaaatgggaaaataaaaaacaaatggacaaataatgnnaattntaatatgagagtaaacannncaataataaattttctttttaattactaaaaaaatattgaaaatcataattttttaaattaaaataaaataagttttgtttaatgaaaatataaagtaaataaaaaataaaaattgtttttgcgttaaaaagagttcgctttatttgagcaaaacttaatttgatgcttaccatttccactcaaacgaattgacaacgtttccattaattcgttaaccctttgcttttctcctccaaccaattctggcagtctctgatgaatctgaacagaaaaaagaaaggaggcaaaatagacgattaataagcctaatttgaatgtgataaaagtcaaattaaattttattgctattcgagagtctcgggtttcgggtcggcttttgacgcgtgaaaagatttttcgtaccgtgtagagtctcggaaacccagtctcaatcctcctttgatacttttcgagtaccctagagctcgagtcattatcatactatctctctctcgctctctatctctctctcactctctatatttctctctgtctcattctttctcttcttctagcgttctctatctttctctcgctctctctctcctcccctcccctttctcactctctcatactatctctttctctctcccctctctctctcacgtatatttttctctgtctctgtttctctcacctgtcttctcatttgatctgcttcttctaagctggccaatccaatcattctcaatctgtatgcaaatacgttctccccctccagacgtttcatatggaataattccgctagtttcggctttgaatttggcacttcccaactgatcaattggtgaaggcgatgtaaatgcagtttctcaatttcttcgtcaaattttagaagcctgaaaaggttttttggcattttgactttatttatattaaaacaaataggaagtgatcgccgttttgtcaccatttttggccattaatttgacaaaatcaaaaatatataaagacccgtgatcaaaagacttaagccatagaccgatccaccgatcacttccaccgtttatatggctactgatcggccattttcccctctcccccccccccttttgacggggtcaacccgccgatcagtccctcccagatttgatcattgatcgatcctccaatcagtctaccgcccaccatttatccccaaaccctctttttgccctaccatttttgctcttccgccgtttgagtgccgtcgtcttgccacgtggctctgatctgatcaatccgatcgcacatggcatccctccgaaatttgccatatttttccaacatttgccacccctttttcagcccattttccatccccgtgtttggcattttgtcagcagtttttaacaccaatttcaaatgcttgcaaaatgttaggtattggcaaatgtctg

SEQ ID NO: 26299 - DNA, 1738 bp, Heterodera glycines
ttattttctttttaataaaattaaaattgtggtgtagtggaaaatgggcacgggaaagatgggccgtgatcactgatcagcagcaggcgaattattcaggccaaaacaatgaatggccaaactgcacaaaattattcacatttcgccaactggtcacttcgccaactcagccaaaaacggacatttcgccaacattcatttcgccaaataacctaaaaacatttctctcgttatgaaatatgcacacaacaaaaaaccattcagtaataattagggctggcaaaaatatgtacaaaaattggtcagaatatgtatacataaatatgtaagaaaaataccaaaatatgtaaataaaaaatttttaaatggttatttttttggatcttcgtaaatggtgaaataggcacaaaataccataaaataagacttattgattcggcaccgaaagctattaactcaaggcaattctttcgtacatgactagagatcggaattttgcgaaaatacggaagtagttagtgtctataaatccgccggattacggtagcctcccatacctatgggagggggtgcaggccaactgagcgccagccatgtgagcgccgccggctgagcgcgggccatctgagcgccaaaattttcagtaccgaaaccaaaacctattgcgcgacttttttttttgcaacccaaacctattgaaggggtgcgcgacttttttttttgtaaaattttttttctgaaaattatttttttattatttttattttaaataataattttttattcgaaaaattctgcgaaaacctaggcggactcgaactttcgctctgccaacgaacccaacacactaccactctgccatgcgaccacttgtttaaatttaacgcgaaaggttttcgtttcaataaactatggcgttatgtatatatatatattgtggcgttttgtcttgttttgcatattttcaaagttttttcaccggactacagtacccctcgcagtgatgacgtcatcatctttgcagcatatagtggacatttatcctttttctggcaactggtctcgtggcagagtgatattgtgttgggtttggtggcagaccaaaagttcgagtccactagcctgcggattatttattgcgatttttcaccggactaccgtacctctcgcagtggcgacgtcacaatctttgcagcatatagtggacaattatcctttttctggcaactggtctcgtggcagagtggtagtgtgttgggttggtggcagagcaaaagttcgagtccgcttgcctgtggctaatttattgcgaatttcagcaggactacagtacccctcgcagtgatgacgtcatcatctttgcagcatatagtggacaattatcctttttctggcaactggtctcgtggcagagtgatattgtgttgggtttggtggcagaccaaaagttcgaggccgcttgcctgcagctaatttattgcgaatttcagcaggactacagtacccctcgcagtgatgacgtcatcatctttgcagcatatagtggacaattatcctttttctggcaactggtctcgtggcagagtgatagtgtggttgggtttggtggcaggccaaaagttcgaggccgcttgcctgcggctaatttattgcgattttccctggactacagtacccctctcaagtgttgacgtcatcatctttgcagcatatagtggacaattatcctttttctggc

SEQ ID NO: 26300 - DNA, 1335 bp, Heterodera glycines
ttttttgctaattgagcagaagcgtacccatctttgcagggatactccccggtaaaggactaacttacactgaaatgagcgccgagctagctggctcaaaaaaattttcgaaaatctgagtctttcgtttttatttattttttgcaaaattaattcttaaatattttttcagaaagggttctgaaacgcaccaaattttatttacatgttagtttaggcactctgatgctttttctatcaaaaagggagatgaataaaatttttaaaaatttttaattcctttttaaacaggccaaaaagtttaggcttaacttttttttcagaaactgatcagaagcgcaccaaactttgcagggatactgaaaggaagagaaataacctattttaaatattatctagtcagttcatttaaataatttttatccaaaaaatttttttttgggttttcggggcagtccccctgaaccgatgcgcccagatttatggggagaccgaatccttccggaatagcttcactatagcctgtactttaattctgcgttggatttttgctccccataattgtttgagtaccccaaacggacacttgaaaaaatcgatttatttttgttttcggggcagtccccccgaaccgatgcgcccagatttatggggagaccgaatccttcgggaatagcttccctatagcctgtactttaattctgcgttggatttttgctccccataattgtttgagtaccccaaacggacacttgaaaaaatcgatttttttgttttcgggcagtccccccgaaccgatgcgcccagatttatggggagaccgaatccttcgggaatagcttccctatagcctgtactttaattctgcgttggatttttgctccccataattgtttgagtaccccaaacggacacttgaaaaaatcgatttttttgttttcggggcagttttcccagaatgtgctctaaagcgcaccaaattttatttacaacttaattttagcactctgatgctttagtatcaaaaaggaagatggagaaaaaaatttttaaaaaatttttccttatattttggttatatcgttttgcttttggtggggtgcttggaacagtggaatcatgcgcacccgtccgatctggcaagttaagcaacgattgctgactagccaaaaggttcggtgccgtgatgaaacgaaccagcactgcttaccccgcggcacccggcacggtcccccgaaggaatggatttaattaaattctctccttcggggatttttttccattaggtcgtccgatagcgttcaattgctctagtcaatttttaaaaatttttgt

SEQ ID NO: 26301 - DNA, 2094 bp, Heterodera glycines
ttgtaaactaataaaatttaaacaaatatttttctctcatccaggcaggggactcattggcattgctttaagcatggcttttcctttttcagtcacttctcgcgcaccaaaagcaggcgaacagcaggggcgcgagtacaagtttgagcgcaaggaggacattctgcaacgcattcgtgatcgccaaatgatcgaatggggcgaatataatggtaaaaaaaattatgaaattgcttattttaatatcattcgacatccctaaatgttctctattagcccctaaaatttcgttaaatttaaaaaaaagttatggaccaataatgttcgaaaacaaggttttcgagtttttctggcaaataacttttttgaaacgcaataaaaatttttgaaattttgcagactcatagagaattcttcatgttatcgaatggatatgaagaattaaaaaaatttggttattcttgaacaaacttatgaataatttttcaacacaattttttccatttgatgatttttttcggtaacgtactaaccccaaaaaattgaaaaaaaattttctttcaggtgctttgtatgggacaacagcagagtccgtccgtgaggtggtccgatcgggacgcgtttgtgtgttggactgtagcgcgcgagcattagaaactctttacaattcagagtaagggcacagtcttcatcatttaatcacaaataccaggctcatgtcatattcgtaagaagtgtttcagagaaaatgccatagaattcatggaatttaaaaaataacaattttttcactccaattctcctaataagatttttttaagaatttaagactgattaaaaggctcaaccttcaatttatcaaaaaagaattttgttaaatttgacttaagaaaaattatcactaaaaatttaaaaaaaaaattttaaatttccaatttaaaaattaaaaaaaaaacacaaacacaaaaaataaataaattttaaattagacacttataaaaactgattaaattaaaaattatgaaaattatcaaatttaaaactgtcatgaataggatctgttttttctttatcaatactttatcaacaataataatcagatttatgccatttgttgtgcttgtggcggcaccgccctttgaagaattggtgcagctgagtcggctgcatgggaagccgcgcgaggaggacgaactgcgccgaatctgtgatcagtctgatcagttgttccacagtgattatgccaaatgctttgatctggtgctggtcaaccggaaccgggacatttcattgcggaggtacggtaaattgggcgaaatgataaaaaaaaaatagaagaaaatggtagctacggtaattaggcataacaatacaaaagaaaccaagtttgaatgatggtaagggcagcaatttaaaaaaattgagatatgatacctaattcaattacaataaacaacacaataggagctacggtaattaggcctaccaagacaacaatgcaactttgagagatggtgaaggcaccaataaaaataaataaaattgttgaatcatagtttaattatgtcattttttattgaaaaatatttatatttattggacacaatttcaattgacatttctgtaaatctagttttgtgaaaagttacagcattatggatatggtaaaataaaattaatcaattcgaacatacagtatctgctgtccttcgttcgctattaatcgtatccatcaaaggttgttggacgcgttggaagcactgaaaaccgaaccacaatgggtgccgttggaatggcttcagggtagtgccaatgtgaagtcgaaaagctagccaaaatcgtgacccaactcgaatatgatctttccaaagggtgcagcactacgttctcccccgaccccattttataaaaaaatattacacacattttttatactgactttttggaaacggtggggggggggggggctagctgctcgccttttcaagcatttgatatatttatgcactttatacaaataactagagatgggatttttaggtgctaaaaatcccaaaataggtgctaaaaaagtgcaaaaatagatgctaaaaa

SEQ ID NO: 26302 - DNA, 1080 bp, Heterodera glycines
  unsure (1)..(1080): unsure at all n locations
ttgaaagagaatagaaagaccaggnttcgatgaagtttgttaagccanaaaaaatccaaacattaaaaaatctataaaaaattaaaatgagaattcatgcgagatnttctggaaataagcttaattgggcctagttaagctgtaaaaaaaatntggggcgattgnaaagagaatagaaagaaccaggttcgatgaagttttggtaagccaaaaaaaatgcaaacatttaaaaatctataaaaaatttaaaaatgagaattcatgcgagattttctggaaataagcttaatagggcctagttaagctgtaaaaaaaatttggggcgatttgaaagagaatagaaatagccaggttcgatgaagttttggtaagccaaaaaaaaatccaaacatttaaaaatctataaaaaatttaaaaatgagaattcatgcgagattttctggaaataagcttaatagggcctagttaagctgtaaaaaaaatttggggcgatttgaaagagaatagaaagaaccaggttcgatgaagttttgttaagccaaaaaaaatccaaacatttaaaaatctataaaaaatttaaaaatgagaattcatgcgagattttctggaaataagcttaatagggcctagttaagctgtaaaaaaaatttggggcgatttgaaagagaatagaaagaaccaggttcgatgaagttttggtaagccaaaaaaaatccaaacatttaaaaatctataaaaaatttaaaaatgagaattcatgcgagattttctggaaataagcttaatagggcctagttaagctgtaaaaaaaatttggggcgatttgaaagagaatagaaagaaccaggttcgatgaagttttggtaagccaaaaaaaatccaaacatttaaaaatctataaaaaatttaaaaatgagaattcatgcgagattttctggaaataagcttaattgggcctagttaagctgtaaaaaaaatttggggcgatttgaaagagaatagaaagaaccaggttcgatgaagttttgttaagccaaagaaagtccaaaacatttaaaaatctataaaaaatttaaaaat

SEQ ID NO: 26303 - DNA, 885 bp, Heterodera glycines
ctcgaactgcttgaagtgggcggaggagacattgctctttttggccgacaattctaaacatggaaaagggaattaaattggtttgaattggttgcaattgagtggacacctcaaaagcaaaagaagaaatggctggttgtgaaacagaaacattcagcaaatgatcaaagtccatcacttccaatgactccgacttatgcatgactacgcattcttgcgaatttgaccgtactaagggagccgctgaaagaaaaaaaactctgtactgcttggaaagatgtcataaagttcaacgcactttcaaaatggtgtcctttttgttttccgttcgtttgactcttttgctgttggccaatttgacttggaattgcctttcgctgtttagcgcccgccactaagggaactcgtccaccgttttcagttgacgattgctcgactaacacaaaagcctcgccacttttcagagactttatttggccaattgtaggggattctgtgcaaaagtgagtagcgcatgtgaatttccaagccgaagacaatcgggtcgcaatgtcaacgccaattcctggatttttaacatctcattgacattaattgcaattaataaaattatgtattcacctcggatttttcttaggtctgaaaagccattgacgtcgagcggaaacaatttgagattgcataatgctttccgaagaacaaaagcgtgatttttattaccactgtcctttaatattttgtctctccattcggtgagtgctctttcatagaacattttctcagaaaactcgagtcgaactttagctcgtttaagcttctcagccattggttaaatgttagaactaaaaattgggtactttttcactttacccccacaaaaaaaac

SEQ ID NO: 26304 - DNA, 1716 bp, Heterodera glycines
  unsure (1)..(1716): unsure at all n locations
aaagtgtttgatgggatgccatgaaatgatcagtaaaataaaaaaatcaaagcgaagaccaaacacaaaaaaaaaacaaaataaaatataaaaatccctgactaaaaggcaatgagtgagcttacagacaagcaatgacattctcttttaaaagcggtcatcatctcggatgaagccatcattgatggcgacctaaaaaatcagattacgtattacgagtaattaaatccaaaatcattttgcacctgattttaaggcaacttcctctgtcattcgcactttgtcttcacaaatcgttgactttggcaaacttttgtgatcgatgcgccgctgtaagagtttcgttcaaacagtcgagaagacgctggaatgatatttttttgatttttttttttttgctaatcttggccataatttgtcataccctgtcctcgggcgatagttcgaagttgaccgaatgggagagaacgcgcgtcaaataatccatgagacgaaagcgcaacttcaccgtcatctacgaacacaacaattcttattgaaaattagaaatggctaatagtggtaaattcattgattcaagaatactattttttttactgttaggtgtaaagacctgtaaatcgctgaaagatccacggaacccaaaccaattgtcgagttcaagcagttcgtatggttcttcgggctccgattttgtaaaactgcgcatgtattcgggcaattgttctgccagttccggttccaaactgctgagtgcactaaatttcctatattttcaaataattaaatcgtccctcattactggtcatttgcgactttaccttgagctcagtgaagacggtgttgccatggcggaattggccgcaggaaaagagtcgaatgagtcatcactgctgctcgtggcactggactctataaaaatataatttgaaaaggaaagagtcatttagggaataattaccgccaatctcctcgttctcttcccgtttctttctctgcctactgtctgtcgacgtctgccactgttctctcttctccaatgagtgtccgctgtcattccaatcgctttttgtgtctgtggcgttctgtgccctcccgtccgtctgccgacacttttcactctcctccccccgttgtctttttccaagctgtttctttttgttttgctcttccaaattctgctccattaagtttctttgctccaattgtttgcgatgtcttcgtcgaagttctctctccaaatttcgttgttctttccggtgctttcgaagaattttatcgcgaaacaatttcctttgttgccggagagaaccgtttggatccactaaataaggaaatcaattcaaaaatcaaaaaagaaaaacaaaaaaatttaccaagttcaaaatatttcacgcatttgaggtccattcggacaggccctgcaaacaacagaatgtgtagcgatgtgacagcagtcacagttcggaccatgtgttgctggtgcgtatcaccgaccaattccttgagaataaaaatttctttaaaaattttcaggcggccgccgccaggtcctttctttcccagatttaattcgaaaaaacatgctgcaaaagtgttgtaaaaaggcgaatcacctgatanataaggtactgaagcataggctcggatcccttctggctaaaacttcattgagcttcgcagatcgtttggatgggtggncagtttgacgcctga

SEQ ID NO: 26305 - DNA, 2076 bp, Heterodera glycines
  unsure (1)..(2076): unsure at all n locations
aaaattattattttaaaggaaaaaaaatttttttaattccctattttcccggggtacccggattcccggccccggtttaaaaactggtacccgaaccggtacctggcttttcaatacccagtaatacctgggcccggtttttgcccaaatacccgggcccagcctatcctagtttatacccaagcacacatgaattcagatcgtgctgggtcgtttcgtaaaaactgctaaatttacagaatttttaagaaaaatcagtcatgattcagaaagtaatgttttttttaaacatttttggttagaagtttctgaaaatttaatgaaatattcctaaaattttcatatttatagcgcaagtcgagagctatcgtgggatacaacgattattttttatgttgtatttaagaaaagttattactgatttttctcaaaaattctgtaaatttggcaaggtttttacgaggtcggatttacaaatatgtatgaaaaacgcattattcttctcaggcggaacttatgtataccttccgaaaatttttttttgcaccattcacagattttcttaacaaatctgaatgcgcgatataaccagcagagaccagaaatagaccaataaataaacaattagtctttacacttaatctcaggattaaaattcatttaaaaaatcgaaaattttccacattgaaagcggccccgacgctttcacacatcgggcggcccctggttgatagcaatgaaaatatacaatattagcggcaattattaagaggtcaacgaaaggcaatcaaagaatggcattatttaatgatggaaagtgaggtcaacgaaaggcaataaaagaatggcattatttaatgatggaaagtgaggtcaacgaaaggcaatcaaagaatggcattatttaaagttggaaaatgtcattatttcttcattttaaattctgaatacatttggaatttagtgttggacaaattataaattttttaactaccattttaatgttaacatcgcttgtttatcataaaataacttttagccgttcagctgtactttttttttgtaaatataattttgcgttaaaaaccaaaaacgtactttttcaattttgtgattaacttttctgctttaaatttcgtgatggttttaagtcctaaatttttctcgtcttcacttgttttcactcacttctggttctttatgtccgtattttttgggtccatacggatttttaaggactacggattttcggattttagtcgctaagtccgtatcgatgtcaagtccgtaaacctgatcctgatccgtattttcgcaaaatcacgctctctactgaaatctcagccaattgtatgcaaaaattatatttcaatcaatcattaaaactatttgttgtatgtactaaaaaaagcaaatatacaaaaatggccaattatgaacctgtgagataaaaactttcaaaaattttgtcataaattcaatcaatttaaattttctctctctctctctctctgtgagaaaaccttatcggatagattttgcacacaaataaaattatgaaaaattattctttcattttttaggtcattgttttgccgaagtgattttttgccttctcccactaatatttaaaagtgaaccatcgccagcaaattgttcatttaatcatttcatataccggtactcagattattcaatgtgcaaatattagatttatgttcaatttttcgaatattttgaaaatttcctattttccattagtgagcctaaaaaaattgttgggtgttagttgaatgaaattcaattttatttttccagcgatttatcatattttaaaattactcgccagggatagtactgaattccgatttttccgacattttttggggccgtaattcttatttccgaaaaatttttcagacctcggaataatgcaatgacagagaattacttattcttaacttagccccaaatgaattaaattttaaaatcttgatatttttcgatagcccgaagtgttttctattataatgaaaaatttcgaaaaaatcagttaagtttcaaaaanagttatga

SEQ ID NO: 26306 - DNA, 1952 bp, Heterodera glycines
  unsure (1)..(1952): unsure at all n locations
ttttcaaaactttttcatttatttttcttgatttttntaataattttgnaacatatatgttcacaatgatntaattaatttgatttttatgctttaaattcaccaaatggattttcatttttatttataactgaaatataaaatcaaaaatgaatttgttggttgttgtttttaaatatttttgtacattatttttaatactctaatttatgctttttctacctctttttcttgtgtttgttttttaaattaataaattttaattattttatgggttaggaatttgagagatatagtttttcacagctttgaattttcaaattcgactcaatctcaaaggtacataatcctgctcttcttattgatgattgtcccaataaacatttatttattttttatttttattaaaaaatatcattgtgaattcattcatttatttattttatttttattttaaatccataatttcttcatccatcatttaaagccttcttaaacacctgcaaacaattgttcttgctaatgcaaaattaaaagaataattcaaagaattgaaaaaaggaaaattaaccacttttaaaatggttgcggttttggcgggactaagaaagctaatttgttagcagattttgttcgtaaatgcttaatgcccatttttggtgctctaaaaaatcatttaatttattaaaagataaatttttaaagtttattaattaagaaaaaaaggaaaaaagataaattttcaggaataatgaaagaaaaagcacaaaataaatatgccttaaatattttccttgaagaaatgattttaagtttttcgatttttttggtttttttcggtttttaaccgaaaccgaccgaccgaataatcaaaaaaccgaacaatcgatcgacttttatgaaaaatcaaaaaaacccaatggcgaattggagtaacataacctattagtaacaatattttagtgctttttgtgctgttttgtcattttgaggaattttttaaaatttatcttgctattttcaaaaaaattattaacaaaaatgcaataaaaatgaaaaatacaccccctgagaatcgagccgaaaaatttcagaaaaatacacccctaagaaagaaaacattatcaaaaattcatctccaaaatctattttatgaaacgccccagcacggtaccatcaatttacattagaattgtttaattgtcttgtttttcatgttttaaatgatcaattatttactaaatttattttattttttgttatgttttaatactctttaatgaagaaaggttttaacctaaatatgcctttttgagctgagtaaatttttttccaaaatagtgcaaatgttcaaattcttttttctaaacacacttttatttttattttatgcaaatgttatagaaatttcaaactttattatttctgcccgggattcgggattgggataggattaccggaatttaaatgccggttttgtcggggtcccgatcccgaccttttccaaaaaaagccgccatagggattgtaaatgcgattattaaatttttggagttttttcccgaataaggacaaagacaaatttattaaatttggcggtcaatttttgagagaatattttcgtttctttggggtcaatttcttgaaattttttctgatcatttcttaggggtgagttttcgattttgttaaggaatttttcgaaattataaaataggcacattaagcacaaaaatcccgaattttgcacaaataatcattataaaagtaatcgttgactccccaaactaagcggaaaatgcttttttccatccttatctgtacgtatcaattgcacaaaattttaggcatttgcctaaaaaattccctactactaattaatgattcgttgatttgcattattggcattttatttttaattttaaatttattcatattttcccgcataattt

SEQ ID NO: 26307 - DNA, 1805 bp, Heterodera glycines
ggggcgcaaatgtgcggggcgcaaatgtagggggcgcaaatgtaggggcgcaaatgtaggggcgccaatgtagggggcaaaatgtgtggggcgcaaatgtaagggcgcaaatgtaggggcgccaaagtagggggcgccaaaaaagtggtgggcgcaaatgtaggggcgcaaatgtagcagctccgtgaaaatgactataataaaatgatatttattattaattgtgcaattttaaacaatttagcacatcacatatactgaatggcttccattggtattaggaaaggtaattaatttattaaagaaaaggcaattaaaataattcgaaaaaattgtcaaatttattttgcttcatatgaacaagattcaatcgtgactggaaaatgcgtcgtcatacaaataattgaaagtaatgttctgtgtattaaatattgtagtataaagtaaaattcataaggacatcattctgaattccaaaccccggacccgaattcatccaaattttcgaaattagcctttttggttaaaaatatttttaaatacacggaaataaactgaaagctatacatacttgaataagtgataacttacgcagttttttgaacaaaaatgctaaacgataaattggacttgcgactttttgttcgaattcgggtccggggtttgaaattggccgaaatggataccggattcgcgaaaaatgaccacgaaaatttaaagaacatgttttaggacattaaaaatttcactgacacattttatattgacgcatttaccactgacgcattttccaggagctgtttcaattgcttttgattggaattgatgagcaacgaaaaaaaaacatcttcttaaagttgtttcataggcagttggcccgctttgtcttcaattaacaaccaaataatttccggggactaattaggcaaataaattctttttgtggttttcctaggacggctataactttctgattggcccctacaccggctaccgtcctgacaccaatccgtccgtgtccaacgcgttcgccaccgccgcgttccgctttgggcatacgctgatcagcccacagctggagcgactggataaagcactccggccaacgcccgaggggcccctcccattgcacgaggcgttctttgcacccgagcgtctgcttgccgaagggggcgttgacccgttgctccggggcctgttcggcacaccgctgaagatgccaatgagtgatcaggtgatagatagaccacagaccgcatgagcaatgcctgttgaataaaatgcgattttaggcttttgaatcgcgtttttaaatatccttattttaaagccaaattcgtatttatggcagtgatttgcttattgggaagttttcagtggaagctctttgatagtaccacttttttaagagaaagatatcaataatttaatttttcaattaaggttttttaaacatttatttatactgtatttttaataaattcttttttttttgcaaatttttatttttaaaattgtattagccgaatgcatattaattttcagctattgaataaagaactgactgagaagctgtttcaccgtgcccacaatgtgtccctggacttagctgccctgaatatccaacggggccgtgaccatggcattccagggtaattcttggcgaaagcaagcggcaattaattgggtcttgtgccaagttatcttgaatatcgtcgcttttgcaatttgactgtgccgtccgactgggatcagttggctgttgatgtgccaaattccaaagtttttccgcaattttcaatatg

SEQ ID NO: 26308 - DNA, 1031 bp, Heterodera glycines
attttccaatttttcccaacaaacgcgccgagaaacaaattccagaacaattagtatcggcgtaattattctgagaatgcggttggaattcctattactgttgagcagaaaaagagatagccaattttccaaatttttcccaaacaaacgcgccgagaaacaaattccagaacaattagtatcggcgtaattattctgagaatgcggttggaattcctattactgttgagcagaaaaagagatagccaattttccaaatttttcccaaacaaacgcgccgagaaacaaattccagaacaattagtatcggcgtaattattctgagaatgcggttggaattcctattactgttgagcagaaaaagagatagccaattttccaaatttttcccaaacaaacgcgccgagaaacaaattccagaacaattagtatcggcgtaattattctgagaatgcggttggaattcctattactgttgagcagaaaaagagatagccaattttccaaatttttcccaaacaaacgcgccgagaaacaaattccagaacaattagtatcggcgtaattattctgagaatgcggttggaattcctattactgttgagcagaaaaagagatagccaattttccaaatttttcccaaacaaacgcgccgagaaacaaattccagaacaattagtatcggcgtaattattctgagaatgcggttggaattcctattactgttgagcagaaaaagagatagccaattttccaaatttttcccaaacaaacgcgccgagaaacaaattccagaacaattagtatcggcgtaattattctgagaatgcggttggaattcctattactgttgagcagaaaaagagatagccaattttccaaatttttcccaaacaaacgcgccgagaaacaaattccagaacaattagtatcggcgtaatattctgagaatgcggttggaattcctattactgttgagcagaaaagagatagccaattttcccaatttttcccaaacaacgcgccgagaa

SEQ ID NO: 26309 - DNA, 1405 bp, Heterodera glycines
caattaaaaaaaacttgaaaacgattttttcaatttttttccaaaaatcgctttaaaaaattcaaaaaaaactttttctcgagatttataaaaagttttcaaagatttttttttgaaaaaatttctcggggggggggggcatagtgcatactaatttgtaagctgcgctgggattttattgagttgaaatctttctgacaatgactttttttctttataatttgttgaaatttgtgtaaataagttaaatacatatatttttttttcttcctttgtcaggttttcttgcacgcaatggtccgcgatgcccacgggcgaaaaatgagcaaatcgctgggcaatgtcatcgacccattagacgtgatccacggcattacgcttgagcaactgaacaagaagttggaggacggcaatttggacccgaagtaaaaaaagaaagaaaaatcgcaatagtgtctttgctcatcctccgcagggagttggaaacggcaaagcttggccaagcaagcgactacccccagggcatcccggagtgtggcacggacgcactgcgattcgcgttgatggcctacaccacgtaacaatggcactttgccataattgaaaaatgcattcgtttagccagggccgtgacattaatttggacgttctccgcgtgcagggctaccgcttcttctgcaacaaactttggcagggcacgcgcttcgttctcagtcggcttgggcccgactttattcccagcgatacgtttgaggtaaaaacggacaaagtgttggaaaaacaaatgccaacttttcccaatattctaattaatgccaattcttaaaataagtccaatttctgggttcaccaaagaagttggtctaattgtaagataactgatttttgtgttattttttggcaataaaacatgtctaaatggaataaaagacaaaaaagccgattagggcatccactcgttgattatttattttattgcaaaatgtttttgtttgttttaagccttccactttggcacttaatttggccgaccggtggcttctctcccgactgtcccattgtgtttctgaatgcgatgtcggcttccgcacttacaacttccggcagctgacttccgccattcaccacttttggatccacgaattctgcgacatttatttggagtcggtgaagagtattattgtcgttaacaatgccaacaaaaagggggcggacgcaattgcggaagagcgaagcaaaaacggcaccgatgaagtgacaacgcaaaaggtaattacacaaacaattcattagattattatctatggtacactacatttccaagagcaggtcatcccacctctaaaatttaaaaaaactttcagtaaagtctaagaattttttaaagatattaaaagaaaaaaat

SEQ ID NO: 26310 - DNA, 1355 bp, Heterodera glycines
ggtgccgatggctcctccgggggaaaattttaagaatttatatgaatttattagaccttagccaaatttttcagaaattttcctcttttagatgaaaataaggcattacccccaaatcagaacatttcgtagaaataaagaacataaagaaacctttgtattaatcagaaaaaaaaattaattaaatgaaaacgtcaaccggtgttgaactcataacaaagaattctattagtgctgaagtactacgtataaattttttgcttatatccctcgaatataccattcttagcggtgtatttcacccccgcgcccccgcgggggccaaggtcatgggcggggcggaggttgcgggggtctgagtcacgggggcgggggtgaggggggcgtggttcgaaccctactttgaacccaataaaaaattcaattaaaatattatagtaaatatgtctaaatgaataaatttagagattttatcacaaagagatgaaattattgagtcgttaaaacttctcttaaatgaatgtgaaatatatgaacgagcggggaagcctttgagggaaaaactatggggcgggccggctttgaaccggcgtctctggctttccggaccagtgttctaccagctgaactaccgaccctgccctctccagctccccactttgctcgatcatgtaggatcaattgttgcctcaattgatccattaatcttcctctcggggaagcttcttcttctctatctcaaatgctataatgtgtaagcttggttgatattttttacatcgcaatttttcgttataattacttcaagattttttcacgtatgagtagtaacacatacgccatctctgtaggttgacgttaattagaagtgacaggtagcgaaaagggggtgtcaattagtggctaattggtcaggggaggggggggggggcgctaattggtcagtggtcaagaggggagcgctactgccggtcatgtaattaattaattggagggagggggacccaaacctattggaggtttttaaatttacatgtaatttttttggtaaagaaatattttgactgatttaaaatgtgacagctttttgattgattgtaaatgtgacagatggggcataaaaattttttgattggtcatcgatgaagtgttgacgaatattcaaaaaatccgtcacaaataattaaaaataaaatgtcaattcccttttggtctatgtggggtcaattaatcgatggtatagcactaggggagggggtcatcacagtgggcaatggtttatgcgacggcgtcgcgttcctattgggaaccggccactttggcgcaggccattttggcgcaagactctatatcat

SEQ ID NO: 26311 - DNA, 2005 bp, Heterodera glycines
acatgttaattcccgggcatgatttacgtgttaatacactgtcatgattcacgtgttaattcacggtcatgtgcgtttaatttacagtcattattcagtgtcaatttacgggttaaatcacgtatcaattcacgctcataattcaagtgtcaattcagggtcatgatttacttgtaaattcacgggcatgatttacgtgttaatacacggtcatgatttacgttttacttcacgggcatgatttacgtgttaatacacagtcattattcacgtgtcaatttaggggttaattcacgtgacaattcacagtcatgatttacgtgttaattcaaaatcatgatttatgtgttaatttacggtaatgattcaaatgttaattcccgggcatgatttacgtgttaatacacggtcgggattcacgtgttaattcacggtcatgtacgtttaatttacagtcattattcacgtgtcaatttacggcttaaagcacgtgtcaattcagctcattattcacatttcaatttacgggttaaatcacgtgtcaattcagggtcatgatttacttgtaaattcacgatcatgatttacgtgttactttacgggcatgatttacgtgttaatacacattcatgattcacgtgttaattcacggtcatgatttacatgttaattcccgggcatgatttacgtgttaatacacggtcatgattcacgtgttaattcacggtcatgtgcgtttaatttacagtcattattcagtgtcaatttacgggttaaatcacgtgtcaattcacggtcatgatttacgtgttaatttacggtcatgtaagtttaacttacagtcattattcacgtgtcaatttaggggttaattcacgtgacaattcacagtcatgatttacgtgttaattcaaaatcatgatttatgtgttaatttacggtaatgattcacatgttaattcccgggcatgtacgtttaatttacagtcattattcacgtgtcaatttacggcttaaagcacgtgtcaattcacggtcatgatttacttgtaaattcacgatcatgattcacgtgttaattcacgggcatgatttacgtgttaattcaaaatcatgatttacgtgttaatttacggtcatgatttacatgttaattcccgggcatgatttacgtgttaatacacggtcatgattcacgtgttaattcacggtcatgtgcgtttaatttacagtcattattcagtgtcaatttacgggttaaatcacgtatcaattcacgctcataattcaagtgtcaattcagggtcatgatttacttgtaaattcacgggcatgatttacgtgttaatacacggtcatgatttacgttttacttcacgggcatgatttacgtgttaatacacagtcattattcacgtgtcaatttaggggttaattcacgtgacaattcacagtcatgatttacgtgttaattcaaaatcatgatttatgtgttaatttacggtaatgattcaaatgttaattcccgggcatgatttacgtgttaatacacggtcgggattcacgtgttaattcacggtcatgtacgtttaatttacagtcattattcacgtgtcaatttacggcttaaagcacgtgtcaattcagctcattattcacatgtcaatttacgggttaaatcacgtgtcaattcagggtcatgatttacttgtaaattcacgatcatgatttacgtgctactttacgggcatgatttacgtgttaatacacattcatgattcacgtgttaattaacggtcatgatttacatgttaattcccgggcatgatttacgtgttaatacacggtcatgattcacgtgttaattcacggtcatgtaagtttaacttacagtcattattcacgtgtcaatttaggggttaattcacgtgacaattcacagtcatgatttacgtgttaattcaacgggcaatgatttacgtgttaatacacggtcatgattcac

SEQ ID NO: 26312 - DNA, 1434 bp, Heterodera glycines
taaatgctgggcgatgtggaggtgcaggacactggcgcaacaattgatggcacaatatggccaagtgacagaaatgtggatttgtcgttcaccttccgaagcaatgtggagccgttcacggcataaaggtgaaatgcctgatgaacaaattgagcgaggcggcatttagtgattatgcccgctcaattctcccggcagaagtgacggattttgattttgccacaacaacacagaaactcgaaaagttattcgccaagccccaatccgtgttcaatgataggtatgaatgcctaagaaattacggcatcggcattcatcagacggtccaaatccgttagaaataaacgagacattgacttgccattacaaattagggacggaaataatgggaatgaagggcagaatccagagaatggacctgaccctgatggaaataacgaaattagggaacagccgaatgaggtgaaccaggaagatgaccagcttcaccgcagcccaacgggtgtttttaattctatccatatttttttcatcgaatttatatatgcttttttattattttttaaatatcattctttgaaatatcagtttatcctttgtttgttgttaaatttagcttttcatagagtgcaaatttattttaaaaatcttttaaagatagatttaaatttttttattttactttttggtttaaaatgacaatttacgcgcgcgtgctgaagacgcccatacgcattctttcacagttcctcgggtggatgaagtcgttgtttatgttctattttcatctgaagaataaataattttacttatttttaaaaattacccaaataaatattttagtttatttaaccagcttttatcttttatctaaaaaatcattaaaccttctcttgaatttttgtgctttttgaagagttgtgattgcgaaatgcataaataatcagatttttaaacatttatcggattttttattgccttaagattttttaatgtattttttagttttttcttattattttttgtttattttataaatttttatttttatgccataatttttttcagcattcactatggaattaatttttaatatttttgttagcatcttttttttcttttattgatgtttacaactcccatggcattgagttgttcaatggctcctttcactgctccgaaaatgagtatttgttttttactcatagcaataaatatgtttgttatttattatttttgacctttattaattaattaatgcgtaattatattttaattagtttcatattcattaattatgttaaatatctcgctccgctgtgttttattcgtttgaatttaattttcattttatggaataaaaaagataataatttctaatggtatttatcaatcgtttttttttgattaattaaaattttgtttatatcaata

SEQ ID NO: 26313 - DNA, 1881 bp, Heterodera glycines
aaataaaatttttatgtattaaaaaaaatttattaatttttgcaattggaatgcccttatttagtgttgtttttagtgggattctgtttccatggcaatgaaaatgattccctaggattaagttattccttctttatttaccaaaataaatttggtttttgttgggcggacaaagatagtaggtatcccaacacatttcaaagtggattattgtcagttttgtatagcattggaagtaaacctttgcatattttgaataaggtctttttgcttttttcataattaatttatgattaggtatatgatttttagaatgtacggaatggtcatatcaaaagaatcgccgatgaaggcgaaataaaaacttacaacggaatttattaatatttcatctattattagacattcaatcctccgttatcgacttggtcggaatcaatgtcaggtgggacattgaacaatgctcacattcattataatcattaatattttatgcccaactttcttctcttggcctcttgaccctatgaaaaatcttggaattaaattaccttattttgagatgactgtcaataccctgcccaactctttcactctgctatttcagattgtacccaaaaggggggatttatttaatgacctttcaaattggcagccgttttctgaatttttcgttcaagcgatttccgctcaagttccttcattgaaagattctttgttgagggaattttctgcatttaaattgaacacgcgaataaattagaagtaaaatcgttctaaaagaatttaaactgttaggtaatcaaggtcatttcgtttagctgattgcttctcgcttctcgaggcttgatcagaaaagcgtcagttgaaaatttaaactttattattacttttaaaacttttggcataatgtcttttttctttttgttgtttccttttttccagagccataaccgaggtaacagccgtttttgaccaagtttttcaaatttagaaaaaatgcattttgataacgatggtgatgtaattgaagatgattacggagaaaatattgatgaatatgattcgcagcagaatttgggtacacaatcaaaccctcaattaattggtgaaataatgtccactaaaatggcaaatcaaccgccaatgtttatctccggctgggaagaggatgagcaaggcattgagcaaaaagttgtgttgtttcttaattgatctcgctctctgagaatctttttaaaggatatgagtgacccgattgagcagtttctttccgcggcggaggagggcaatttgcatttgatggaacttttgttgagtgaaaggcctgatcttttgatggttattgcattttttaatatctgtatattttaaaggtctagtttgttttaaggcacgtgatcgcgataattacacagcattgcatcgggctgcttacagtgacaaatccgaaacgtgcaaatggttgctaagcaaagtttagtctatctcgccctctccatattattttgtttgtccaatttccttttcaggtgctgacccggaagcaaagacaagcgaaggttggacgccattgcattccgctgcaaattggggaaatttcgaagtaatcgccacacttctgagttggggtgttgacgtgaaccgtcggactgagataagtttatcattcctactttactttatttcaaattcgataatttttgttgattattttaaggcaaaattgtgcctctccatttggcaattaattcgatggcggatgacccgcacaagcagtacatgagcgtcaagtaccttttggagatgccaggtttttcctatcagttttcggttctttgatcaaaattcctctgcacaccaattttcatgtcaattgat

SEQ ID NO: 26314 - DNA, 1486 bp, Heterodera glycines
atgtaagtgtcgaatgacaccataataatttgcttctcaagggttcacaagacctccccgtaaccaaaatttcaaggcaataggataataagataaaattttcaaaaaaaaaaaattttccctggcgcgccaatcggcattcgccgccctcctcccttatttttcttgaaaaatttttaatttttcaatttcatactgtatttttccttttaattagccctccaaatcttttttttattgaaattgcaaattcaattttaatttgccaattcaaggacggcgatctccaccaattgctgctccatgacgagcaaatttcgccccgtgccaatttgcccccgttgctcgtccgtctcgcggactaccgacgccatgctgaccaattggactatgtgggcgtttcgtttggcctcacgttggcgctgctcaaattttggaaacggcttggctttgtgcccgtttatttgcgccaaaatacgaacgatttgacgggcgaacacagctgcgtgatggtgccgcaaagttgcagggggaggaggaggtgaacatggcgaagatgacggaaacggcaggatggacggggaacggagtgagtcagtgttcatacacagacagaaatttggttgggcacccaaattcaaggagtcggctttccccaacgggcatttatcccacaaaaaataaattttttatttttacaactttctaagaaatttttttttgaaattaaattggtaataattttaaaaatattgaaaattttcgttggaaattttacatgggaataaaattcaaattttaaaagtttctgattttttttctaaaattttttaagaaatcatttttagaaaagataatgcaatttgtattttgagaaatatcctttcgtaaaattccattttgcttccctcctccaaataaattccaatagggcatcatcatggcatgccggtgaatgctgccgcttctggcgccactttgaactcggacggcacttggctgtccgccttctttgtggagttccgtcgccgcttcgtctcgttgcttggcacttcgttcagcgcgttcagcccccacttacgttcagattgatgttcatggacagcgccagcatcatcggctgctccgtgcagcagcggcaggacgaacagcaggccgaaaatggtgagcgtcaaccgggagcaggacaaaatgtcgccgccgtaacgtcgccgggacataacgtcgccgcaaaaaagaattttcaaaattttaagaaaattgaaaagtattttagattttttgaaaatctaagtgttaataaaaactaaatttagctgaatttccggaaagaaacccaaaaagcttgaaatttttttttatttccttgaattttcttaataaaaattttttttttgaatttttttcttattaagctagctaactaaatttatgacaatttttctagatttttttctaaaataaaaaaaaaatgttgcggcgacgt

SEQ ID NO: 26315 - DNA, 1116 bp, Heterodera glycines
tatatctaatctcaacctaaatttgtacaaaaaatcgatagtggttcatatggtatcaccttatacaattttttttttcaattttagtcttaaaatcttaaaaacataaatgtcataccatctgaactattagcaaaaaatcaaaaattttgaattttccactttattaacgagctcggttttgattggtcaaaatatcattttgcaaagcatttattcaaaaagcattccctgtcaggtacatcgatcactccgtcatcacatttcttcattcaaatcagccaattttcgacagaagaggcaccaatttgtctatggattcctaaagttcagcggatttgggatgtttttgtcgatggaatttggcccatttttgcgccaaacattcgtcacattaatttttgtgatgttcaacaactgtactgtttgcgtgaccgcacgtcgcccacaattctcactgatctcaatcaattgaattccatctgtcccggtcatccattgtcctacgatatgtttggtgccaataatgatgggccaaatgcgactgctggccaaatgttgtccaaatggttgcaaacgccgagcagcgatggccaaccgaagcgattgtttccccaatattttgaccttggttgggtcgacagtttcaaagaggtgaagttcggtcacatacattcatacatggaaaatgggcgggggtaagggccggatccgaagcagatggtttccctcctccgtatcggtcctcccccaccccgctccacaaaaattaaaaaaaaatttccaaacaaatttactagagtgccacgggaccaggaatttttgccaaaaccgggaccgggacttgccgggacctgagaagccgggaccgggacctcgacatttgtcgtttattaggtaaatggagctgaattgtaagtcataaatggacgggggggggggtcagaaattgcctttaccaaataagaaatatcccccatcagaggccaaaattgaaaaaaaggctcaacattttttttaaccttttttttttgcgtggcgcgctttttccaaaaaatttgcggaaggggggcgggggggggggggtccggcggtgcgaatagacgccgccggaaa

SEQ ID NO: 26316 - DNA, 2303 bp, Heterodera glycines
  unsure (1)..(2303): unsure at all n locations
atgtcaaaagtaaaatctgatcacgtattcgtgatccgttgcccaaatagcccctaatgacatgtttttggaagatttttgtgaaaaaaattttccactcaaaaattctggtcacccccctttggtcccgaaaccaaaaatcacttttatttttataacaattcgcaaaaaagagataaaaatgtaaaataaaattgatattatagagaaaaaaattgcggatttttgtagtactttacttttcccgaatagcttttcagaaggcagctacgaatttttttctgaaaaatcgaaaatttccagaaattctggaataacttttttcatattgatgttagaaaacctaaataaatcccataaaattctcccgattttttgctatttttaaagctttaattcacttaaattgaccggtcctccattgagttatgaattttcaaattttaacccaaaatcctgagggtcaaaaaattgccaaatatttttgaatttttaaaaaattctaaaatttcctaaactgaaaattaacatcagattcgtgctcagcacatcaaaataccccagaaaaatatttttgacccccattttcaacccaaaaaaaattttcgaaaatttctatggggcctagctcgaaaatttttgaaaatttccggccatatggcacaccattcgatagagcttaaaaaactctacaattttgccctaaggcgttttttcgataaaaccaacccctaaacgagtatgggcccgggactcaaatgtcccgctcaggccaaaaaatttttctatttccggaaaaaaatcgaaattttttcaaaaatatcaccaatcgatagagctcgaaaaactatgttttggaagtggtcttcgtttctctgggaaaaatcgttaaaaaatcctaaaattcaaaaacccgaaaaccgttttttaggcctaactcgaaaatttttgaaaattttcgaaatttttaaatttggaaaaatcgggctttcaaaactctacaataagtctgctggtaactccccgcccagatcaaaccctaatgagttattcaaccgggactgaactggacaaagttggtactgaaaaagttcacgaacctacagcctttcctattgcagatagaggcctggaattttttttgttttttagaaaacacttcaacttagccccctcacagcagacattttttgattcgagtttcagaaaaaaagttaggggccctaaaatgcacgaaaaaatgagaaatcagccgctgggactcagttggccgcgctgaatttttctctatagttttcccggatgctcctcaaaaagttgtaagacccttccactactttcagggcgctcccggccttcggccgggagaaaatggttttagcaacgaaactccttgtcaatataacatatatagtaactagcgggtgtttgcatgcgagggtggcgcttgggaaagcgctgcgcgcttcttgagcttcgctacctagattagctctggttttggagatttggaatttttaaaaaagctcagacgggcgtttcgcgcccgtttttcaaattttgttggactaagacgggcgctttgcgcccgtttttaaattttgttgggacttctcgtccncttcnattaaaaganntacaactntnattannagaaatacaaaactcattataatattnacaaatttcattaacatatacaaaattnattataanatntacaaatttcataataaatacaaaaataataaaatatntacaaattttattaananctacaaaanttataaaanacatacaaaactnattataacanctacaaattttatcaaaatctacaaaattcattataatatctacaaatttcatcaataantacaaaactnataaaacatntacaaaatttattataacacttacaaatttnattaacaatnacaaaantaattacaatacatataaattttatcaanacctacaaaaattattataanacatacaaaattaataaaatatttacaaaattnattaaaaaanatacaacactnattanaanaattacaacantnattanaanaattacaacaatcattacaatatntacaacaatcattacaacacntacaacacatattataatanctacaaatttcatcaacacttacaaaacttattaaaaatatacaacatatacataaaattctatcaattaaaaaaataattaatttaaacttataaaatttatttatcaaaaaaaaattaaataaaaaggaattttttatttattaactcaacaaaatatt

SEQ ID NO: 26317 - DNA, 1526 bp, Heterodera glycines
  unsure (1)..(1526): unsure at all n locations
tgcgggggtcagagtcgcggaggcgggggtgagaaatttctcgcccccggggacgggggcgggggtggcattttaagcgtccaaatagcatttttgagactgaaaaataaaatgttttggggcctactacatttgatagggtattcaacggtttcggattttatgggtacactcgtgaaatgccatgggaggcgcgggtaagcaaagaacactcaccatgggataatcggcaattgcatgacaaattctaattttttaaacttagcaaaagccctaaaacgaacccaaaatctggcacggaccccctaaaaatggacaaaatgttattctgataaattcaatactcagcacaccttgcacaaattaaaacaaaaagaaaattcaattttttttttcaaatttgtgcctcaaaattttagtttgatgattttccattccatttctgtgcgttttagacccgaaaatcagaattttcacttttagtcgaaaaaagaaaaattctatttttgaaattcaaatttggcacaaatggagaaacagcaatagcaaacagaatttttatgcattcaattcagtacaaatataatggtaagtgatacaaacaatgcgtgtgttctgacatggttatatgagacaacaaatgaatgaatatccatcacaaatacatcaataaatacactcggccaatcattcattgtgtgatccgtcgtccgttctttccatccttccgccgtttgccatgcgattgtgacgacttctcgtttccgggcctgaaaattcaaaaaaatgataattaaaaataaattgagtccaataaattctgaatttttcaattttctccctcccccacaacacagcaaactgaaacagaaccaaaaattacactcgtcctccctgctgccccccgtcccacacctcaacaaaacccacctctcctcctccatcagcgcctggtccaacgcatgcgctccgcttcacgtcgcataaagattcgcacatggagtccaaggtgcagcggatggtggcagcccatcgtggtacgcgtgattcggctcagtcggccccagcaaagtgaacagcgctcggctcgtctcgatttggcggtctgtgggaaaaaaaattggggaaaattattttcggttttaaattttttttaatctaaacttacgtttcctgcccttgctctggccgccttgcgcagctgcgcttgacgcttttccgccttggccgcgcgcgcccgtgccgcgtacattgcgttggccattcgctgaaaatggggggnggggggggaattagcacaatgaaaatgcacataacaaaacaattaattacctaaataaactgacgatttaagtggcggtggaggaggacgaataattaagtggatggaatgaatgaacggaatgaacgtggaaaagcaaaatgtgtgagccttaaatagcaaattttgttagtcggaagagtcaaatttttcggataattcatatataaaagcacaaaaatttcatttggtgcattatttcatc

SEQ ID NO: 26318 - DNA, 1607 bp, Heterodera glycines
  unsure (1)..(1607): unsure at all n locations
cgacagtaaaaagtaataagtttctttagtggtgtaaaatcgtaaaatgttctccaaaacaacaaaatgaagttaaatcagtattgaataaataatttttaaaatcaaaaatacttaccaggaaaaaaaataagtaaatcttggagatgaattttttgagaaaatttttcattcttcttaggggtatatttttgaaaatttaaggggccgattcttaagactgtatttttctgaaattttctaggtaaaagacgtaaaaacagtatcactagtaacaatgatttagtaatacataatggtatgttaatttaaaagaaatgtagtaatactgacaagcaatataatttgttttaataagaattatttgtttttttgttttactgtcggaaaatcctttgctgtcgaaaagtccgggagccatgaaagggttgtaaattatatggattaacaaattttttctgcacatatgcaattgttggataagggaccacaccgattattgattatattttccctttcactccctctcttattgtctctctcccgccccttgaccagccccatanatatgtctccctttccctcactcgaggcattctcccattcattccaccatttcatttatttattatttattcctgctgtcctcccatatttattgtataataaataattatttatttattgacaacatttggttttgtcatagaccaaacattttattgttgtagtaaatacacaacaatttggcgcagtcagcaaaggacctgctcaaaatcttcgggtaaaaaaggcatcaaattttgttttcaggacacaaagccgagacggcaaaataatttcaccgaaaagccggattggctgtgaattgtttttaagcctaattggcaaattcttcaaaaagcagtcaaagaaactgctagacaccaaaagccgggtcggctctccgaattcgtctaaagccgggtcggctcagcaaaaatcgacaaaagccaggttggctcgtcaatttcgtcaaaaaaactgtgatcaaaagtgttatgagcagcaaatgggtgagtgaatgacgaccgatcgattgatagggaggcgcagtgattttggaaaaaagttttttggatgcgcagccgaggaattgagaataaggactcggagtcctgttaaaataggattttatttcatgaatcatattcggatcaatctcgtaatccggtagtggtccgggtctgggtgatttaaaaaccaactctctttgatcaagtaaccaaattcaatatcacacctattttagcacgattttttcctcttcgtcatttttcgcagtttttttggaaatttacaaaaacctagcccttcaaaaaacaaaaagtttccttttcagaatcccactttttctatttggcctttgaaaatacggtgtgctccgaatatgttacggagaaattttggaacgctttgcgcagtttgacagtgccggttgtgctgtgcagggaaagtggtgcgcgagtcgggcattccggacgatttgtacatcgcagcggacgattttgacaatgccacggcattggccgaccatctgaaggcattgcaaaaggacaaggaccgat

SEQ ID NO: 26319 - DNA, 1125 bp, Heterodera glycines
  unsure (1)..(1125): unsure at all n locations
gacttcaaatttttttcnccagttttgatgggtttaaaattagtagttggtttcagaatttttccctctacaaaaaaaaatttataatagaatttttattattaattcgaaatctttaatttattggacaaatcccaagacttaaaattgggagaagcatgggactgtagctgaggacccaaaatggggccccattggggaattaaacatgatttctgaaaagtccctgaaatgtcgattttttctttccatagcttcttgtaaagctcgagctgttctttccaatggtcttatccctgtctcgatccctgccgaactcaaaaagttatgaagtgaaatgtgaaatattgttttcgccacaattgggagaagcatggggctgtggctggggacccaaaatggggccccattggggaattaaatatgatttctgaaaaagtccctgaaatgtcgattttttctttccatagcttcttgtagagctcgagctgctctttccaatggtcttatcccggtctcgatccgtgcagaactcaaaaagttatgaagtgaaatgtgaaatatgtttgcaccacaagggattttttctgaaacccatcggaaccaaaaatctagggtttggtataagcgttttagaaattgcggagaaaaaagcttcgatattgagaaaccaagtcaagtccagaaaagaatattttaaaacgaattcgttttggtttggcattatgataccgaataacattcggaaattatggaaacaaaattggagaaattcgaataattttttgacttcaaatttttcccagttttgattgggttttcaaatagtagtttggttcagaattttcccctctacaaaaaaaatttataatagaatattttattattaattcgaaatcgttaatttatttgacaaatccaagacttaaaattgggagaagcatggggctgtggctgaggacccaaaatggggccccattggggaattaaacatgatttctgaaaaagtcactgaaatgtcgattttttctttccatatcttcttgtanagctcgagctgttctttccaatggtcttatcccggtctcgatccctgccgaaactcaaaaagtatgaagtgaaatg

SEQ ID NO: 26320 - DNA, 1198 bp, Heterodera glycines
  unsure (1)..(1198): unsure at all n locations
ttaggcaaaatgtaaatgtgaccgtactgtttcggccttacatagcatctacaaatccatgggnttggaaatttattcttaaaaaagngnacaaacactataacagcacaataagtcacgtgatcacgcgcgcaaatctacaatgaccatgtctctcaaaaagctagttgttagcgcatcgacagcaacagcggcaacaatgtcgttccggcattgccatcgactttgtcggagccatgtcgccggattcacaacggtatggctcttcttgcttcaccgtctcctcctgtttagcgcgcttcgtacgctccagcacgacatggacgagctccaggctgaaggcgttaacgctcacttcccccatttttgcgtaccccccccccgcttacgggtagtaggaggcgtgcgtgccgcccccgaactcgatcatgcacggcatgtacgggtgcttcagctttagcccgtgtttggcgaagaagtattgtcgaacctggacagaaggccgcaccatgactgcttctacacactcaccgacttacggtaagctccagatagccaccgcaggcgaacgtccggttcgcgttttgcacgctgaggtcgtgacagtggagcgcaatgttacgctccgccggtttcagatgcgcggtatgaagtcggcagtgttgttgcaggtgcgacaccatacgctgtcgcgcgtggacactgtggaagaggagttgaagctccttcattgaacagtcgttgaacgcgcacaggtagttgagcagcggcattcgaacaggctacaaacagtggtgggggggggggtagaaaattagctggcctccacttacctcctcttcctctcccccgccgagcagttttgcgccttcgcttccaccgccaccgcccgctccgtccgtcacgtcgctgtgctcactggagcgctgctccacccctttaacagtgtcggaggagtcatccacaacggttgccgtcgcggacgagggggagtctgtggcgacgggggtgtcttcaatgtcctcatcctcctcctcctcctccccatcatcggattcgatgaacagcagtgcgccgtggccgccgctgccctcttcagcaccgtccttctcggaggagggggcttctttttccagtctaaactcggcggtggtaggtgtggtgacagtagctgtgtcactgtggaccaactttgctg

SEQ ID NO: 26321 - DNA, 1926 bp, Heterodera glycines
  unsure (1)..(1926): unsure at all n locations
tcaaatcgcgcacagtgtccgcacgttttacacgaactgggtactttttctggttatattcaatgaaaatgtcaaactcaactaatgtcttgtaatgatattcataacaaacgtaaataactgcgccttctttaatttcatattgttccattgtataccattgttcaaaaaacatgtcataacttccaggagattgacgactctttaattttatatcatctatgttaatgtccaactcccttttcagcatttgcatggccttcttctccaaatcttctacgtagtcgctttttctgacccaaattgggtaatttttctcgttaaaatgcacaaaaatttcatattcatcaaatgttatgataatgacttggtctttttcaatgccataatctttcaaagttttactgtcttcaagcgttggaccaaagcgaccgccgagtctcagcatttgttgttggttgggcaaaataccaatctcttggatatttccgattttcatcttcaaatcgcgcacagtgtccgcacgttttacacgaactgggtactttttctggttatattcaatgaaaatgtcaaactcaactaatgtcttgtaatgatattcataacaaacgtaaataactgcgccttctttaatttcatattgttccattgtataccattgttcaaaaaacatgtcataacttccaggagattgacgactctttaattttatatcatctatgttaatgtccaactcccttttcagcatttgcatggccttcttctccaaatcttctacgtagtcgctttttctgacccaaattgggtaatttttctcgttaaaatgcacaaaaatttcatattcatcaaatgttatgctaatgacttggtctttttcaatgccataaactttcaaagttttactgtcttcaagcgttgaaccaaagcgaccgccgagtctcagcatttgtcttttgggctcaattttatttctcagctcttgtctgttgggatcaattttaatctcttctgcgaacttcttcttcaaatcggccacagtatcctctcccttcaccattacggtgggcccacatgaccagacaaaatcactgatctcaatcactgagctaatttcaaattcatcatcagcaacggatgagcgcatcatcagccgcataagcattgttagtccagcagaaatgcctaagccaaaatgattcattgggggtaattagaaagaatgggaatatggagggaagggtattacgatgaatgaatgaatgaatctgaggaccgttgcttcaccactgtcaagggacagccttttatggggcagagttttagtcacttattgaattacaaattaagtgatcactttcatttggcaaaatattgtctaatattgattagaaattattaaatgatcactctgatttggcaaaatattgtcaattattgaattagaaattaagtgatcactttcatttggcattattatagtgaattattgaattagaacttacagaaaatttcttttaaaaaatgtttttaattatttttcaaaaacaatttaacaaaatttgtgactttatcatcatttaagaattttttatgaatttttaaaataaaaagccgaaaatttacactaaaaatcgaccatgctcctctacaaggcgcgaattcccggcacggtccgctcaactcttcttttaactatttgcaacatttctgaacttgactctcagggttctgacaaaaatatttggcattttatgaaacattttcaataaatttctaaaaataaaaatggcatttattgagaaattcaaaataaataatattccatgccgctagcattgatcaaagtataaaagcttaattagtgccaaagtttggtttcaattgacaattctcttcgccnttgtgctgtgactgctgcttctg

SEQ ID NO: 26322 - DNA, 1137 bp, Heterodera glycines
aaatgcaatttatggggtcaaatcggaaattgagagaaaaccgggcaaaaaggggagggggggggggaatgaccctttctgttgttgctttgtaatgttaaatatttttaattaggcaattaattgtctcaattcgctgtttaactttattttatttatttttgggcttaccacgaagaaacagcggggagagcgttgttggtcaacagaatgagaagctgaagcaagaccaatttgctgctgcttctggtgcggtttgtggtggcgattggtcgctgactttgagagtaccgcacggaaacggcgacgaacggcgaaaactctggcatttcgaagaagcaaaaagggactgaaagtggccgaattaattcgaaacagaaagcgaaatattaaaaattgaggacgtaataattcataaatgggagaaaaaaagaggggaataaattaatttttgaaaagagagcaaaggaagaattagaaattgagaaaatggtgattaaaggagttttgaaacttagccatccctgaaatgttaagcgattattggaaaaggacaaatgatcactgatcagtcacttggaaaaggacaaattcggcagaacgaagcaaatgggacgaagagattggagaaggaaaaggaagagaaagagaaggaataaaaggaggaaatggaagagaaagggcgagggaagaaaggaattgaaaggggaggacgtcgccggaggggcaaaggcaaagtgcccataaaaaggggctgtgggtgggaatttgggagggatcggacgattcttccgtcgatgcccaacacaactcggaaaggtaataaagtgggaaaagttgttggacgcactgctgttgatgggggaacaaagcagaagaggggggaataaattggaactgaagaaaaacatgacgaaaaacaacggaaaccaaaaatatgggaaaataaaataaaatttaaaatggaaaagtaataaagggggcctactttgatcataaatttgagggcacaacgaatgccaaagtgatggctgaaagaatgaattaattggatgaaatgacgggccgcggatggtcagtttcgcctcacctccgtccccccccccaccgcctcccccgtcgcccatcgtattcaaa

SEQ ID NO: 26323 - DNA, 1125 bp, Heterodera glycines
  unsure (1)..(1125): unsure at all n locations
gcataagacgcngatactatgtttctggatttttttctcagcgcatttgatcgtgataattttggaaaaatggctatctctttttctggtctacagtcaagggaatttcagcgcattttgatcaaattaatggctttagtcaaggggatccgcactctcagcataatgacgccgatactaattgttctggaatttttttctcagcgcatttgatcgtgaaaattttggaaaaatggctatctctttttctggtctacagtcaagggaattccaaccgcactctcagcataatgacgccgatactaattgttctggaatttttttctcagcgcatttgatcgtgaaaattttggaaaaatggctatctctttttctggtctacagtcaagggaattccaaccgcactctcagcataatgacgccgatactaattgttctggaatttttttctcagcgcatttgatcgtgaaaattttggaaaaatggctatctctttttctggtctacagtcaagggaattccaaccgcactctcagcataatgacgccgatactaattgttctggaatttttttctcagcgcatttgatcgtgaaaattttggaaaaatggctatctctttttctggtctacagtcaagggaattccaaccgcactctcagcataatgacgccgatactaattgttctggaatttttttctcagcgcatttgatcgtgaaaattttggaaaaatggctatctctttttctggtctacagtcaagggaattccaaccgcactctcagcataatgacgccgatactaattgttctggaatttttttctcagcgcatttgatcgtgaaaattttggaaaaatggctatctctttttctggtctacagtcaagggaattccaaccgcactctcagcataatgacgccgatactaattgttctggaatttttttctcagcgcatttgatcgtgaaaattttggaaaaatggctatctctttttctggtctacagtcaagggaattccaaccgcactctcagcataatgacgccgatactaattgttctggaatttttttctcagcgcatttgatcgtgaaaatttttggaaaatggctatctctttttct

SEQ ID NO: 26324 - DNA, 1613 bp, Heterodera glycines
  unsure (1)..(1613): unsure at all n locations
gacggatacgcatgattccactgttccaagcaccccacgaaaagtgacaaaatacnncaaaatataaggaaacattttaaaattttttattcttnagccttattcataatataagcctaagaggaccttattaacatgtaaataaaattaggtgcgtttaagagcactttctgaaaaaatattcatgaattaattttgcaaaaattggaaaagtacgcaaaattgcaatgtttaaaatttttaaagaaacattatgggacagttaaataattatatgaataagcattcttctcagctgttaccctgcaaaatctggtgcatttctgatcactactcgaaaaatgagtaaattaattttcactaaaaagttaagcctaaactttttggcctgtttaaaaaggaattaaaaatttttaaaaattttaatcatcttcctttttgatagaaaaagcatcagagagccttattaacatgtaaataaaatttatcagattcagatcgccatgaaggagtaatctgatcatgttggtccaaaagatttatttgtaaagcatcaaaagttagcttacaaattagaggaaatttttctgctttttttctctatataaatagatttttggttaaatttaagaaaaatttgaaaaattttcttaataaacttagttaaaaaataaaatttttccttggagatttctacaaaaaggcctaattttcatcaaaaaatttgctcaaaatcgtaaacttagtcattttttggaaaaggtacgcagcaaaaaaagcggattgtgttttggtttctttaaaatatcttttaggaatttttccagcgattaaattccgtttttctaaataaatttaaattaaaaaaatcattagaaaaaaattttttaatcaaggatcacggagtttttggggtgccgtgatctcggattttttttaaagccccgtgatcacggctcacggatttccgtgattggaaattcaatcacggccagccctggttgggatttgggatataccataaaataggacaattaaaggaaaataaaattttatcttcaattcacagagttgaaaaaagagatgggcacaaataaaacaggaacagtgaaaaacaaaaaaatttaatacaaatcgtcatcgaactagaaggtcaccggctagcgctccgcttttttgacgaatttggggtgcacaatgagttgggccattgtttcgtcgtctttggctgtgcatttgtactccccgtggtcttcaatgagtacattgatgatcagcaggcgacgacggcatccagcccgttcctgtaaaacaagaagcatcaataaaatacacaatagaaaaacaaaatgaaatttggcataaaaacaaattttagataatgtaaaaaaatataaaattaaaaaatatattgttaaaaaaatggttttgtttctgacttttctaatatattttttaaatttctgataggcatttgaattgaagaatttgagctagttttggtttgaattttggaaatatccatacttagggatttttgggcttaaaggaatccccaaataggtaatttaaactcctactcaatttttgaaaatgatctttcataacacaaa

SEQ ID NO: 26325 - DNA, 1709 bp, Heterodera glycines
  unsure (1)..(1709): unsure at all n locations
aaaatctcaaaaaataatcaaaattagctttaataatttttgagatttgttcggttttctaaattgtaaaacaaactcaataacaaaatatccctctgagaaaaaaattcgtaaattttcaaattattgttattttgccttctctattgtaaacgttaattatgctatttgccccaggctctgatctgtcactgcgctgctcaattgcccaccaccatggcacaagtgagccgttccatatgcagtggaggacaaaccgaggcatcattctgaaccaaatccaacattccaacgaaatccccggatattcgggcagatacaggcgagtttcgagattatggaagcaatttttggcttttttataattaaacagtttcaaaaataaaagaataattgaatgagtgaaaattggtcaatttacattaatttataaagaaaatttgaatatttattttttaatttacggtaaacagacatttttttcacttatttcttctttctttttgatttggtgccaccaacattttaatggacttactggggaaaatacaaaattttaattgtactaaaaattcccccagtgccaatttggtcattctttgttttgtgacttttttttgtctcagaataatccaactaaaacattgtaaatgttttttaaatattttatggaccgaaggacttcaactatgactccaaaaggtacaaattttgcgggcaaatcctcgggagtccccccccccggtttctcgtanaaagccaattcaagtaataaaatataccaaaaattttaaattaaaaatgcttacctaattttgggttgtcttatctttttgtttcttttgcagttactccaatgataaccctggcgaattccatttgcacattcgaaatgtgtcgttggatgacgacggacaattccaatgccaacttctgaagccgggtggcaaattttttcgtgcaaatgcttttgtcaccgttttaggtccattcattttttttcttgcttaaaatttcaaaaaattcgtttccacagtgcctccgtccggcgttcgcttccaacattaccagtccggctcgaccatcgcggtcaacgaaggcattccgttgaacatcacttgcgtgaccgaccgatcgaagccggaggcaaaattagaaaaaatcaaatatttaataattttgaaattacaagttctgctgttaaattattattagtcttttatttacccattttataattaatatttgtttaaaatttttttgtgtaaaggtgattatgaatttgttcgtgaacggcaaaaagacgacggagcatgtgtatggacggcaggaatgggaaaacggcaccgtgtacacttatgccagcctggcattcagaccggggtaaaaaagaaaaaatggaattattaaaaataaaaataaggcaggaataaaaaagaaaattggaattaaaaattaaacaagataagggtaaaaaagaataaattaaaaatatcagggtaaaagcgtatgaaaattaattttcagaaaaattcaccataaaaaagtgatttcctgcgaagcgcagcacccggaaacgaacacaaacttacgcgactcgatcactttggatgttttctgtgagtttggcctaattgttatgatgatcggataattggtgattgcaaatanatgaactacaaatgtattttgagggttgcggtataatt

SEQ ID NO: 26326 - DNA, 1544 bp, Heterodera glycines
  unsure (1)..(1544): unsure at all n locations
gatcagtgcgtctgctgccggcacggcgcttaaggcgggccaaaacgtgacacttttgtgcacgnccgaggggggaatccgccgccgcagctgacatggtccaaccaaaacggacgcatccacgaggaggacgactacagctacgacacgggcactcaggtgggagaaaaggacaaactgacgagtaaatgcaaaaaagcattctattaattagtgatgcatgtccaaaacaattaaaaaattaaaagggaaattatagtaaataaaactgaaaatttcaaaaacccaaaaaaatgcaaacaaaaaatccggtgctagttgcaaagtcgtgtcttttgaattttattaaaaatcaaagggggaaggaaccctctgaatttttttgtaaaataatttgtgtaatgaaaacttgcccctggagtttttggagttcctgatcacctttctggcatcgaacacctaattactttgacttcctaacttcaatttgaaccaaaaaaaactcataaaatgagaggtctgaattttcgacttttgttcaattcgagttagggattagaaatttgtcaaaatggaagtcagattcgcggtctgtagggcccggattttagttgctaaaaaccccgaaataagtacctaagtagtcgctaaaaaactgccaaaataattgctaaaaaacaaaaaaatgccaaaatacttgctaaaatagttgccaaaaatggaacataattgctcaaaaatgtgaaaatttcccaaaatcatgatggtaaatttttggggaaaattgttggtccggcagtgccgataggcgcctccagggaaaatttgaaaattgagtgaacatttgtgccaattttcagttaaacatgccgaaaatttcaaaattgtttatttattttttcataacttttttgttgaaaagcataaatagttgaaaaaaatattttttttaaatttcacaaaccaacatagttgttaaaaagtttcatatacgaaaatagttgaaaataattgctaaaaattcgctcaaaatcgaaaattggttgaagaaaatctgttttttttgtgcttatcctcagcaactacatccttttgaaatttcatcaacaaatttcacaaatattcaattaatttacgtttcgaaacatttcatatatttgagcataagcaaattcattaaaaaaaaattcaaaaggaaattttttataattataaattataaattttaaataaaaaatataaaataatgattaaatttaaatttaattgattgctcagaattatatggaaaatttgtagtttgtaaagacttgttgatttccttttttaggcaaatgcctaaaattttgcgcacttgatacgcaaagataaacacgaaaaacgcgttttccgcttggtttggggtgtctacgatgacttttataatgcctatttttgcctatttcgtggtttttgtgcctaaagtgcctattttaggctttttgaaaaaatccataagaaaaatgcaataaaaacgaaaaacacacccctaagaaatgacccta

SEQ ID NO: 26327 - DNA, 1001 bp, Heterodera glycines
tttttaccactatttttctctcactcatcgtctgctcgtctctcctttattataagctattttccaaaagccaacgcccttttctccctcttttctattagtcatttctcattggtgttgacgatccaacattcagtgtacaaatttgttaaacctctcaacattttaaatcaaaatcctaataaaaatttcgttgaatttcttcgcctcttatttgtgcaaaattttcgaaaaagtaatttactatttaaaattaaaaaattcagaagcaaattcaagaattttttttatttttaaatgcattttttaccacatgaattatgattaaatttttgcgtttcgaattcattttggaattaagaaaaataaaaattgataatcatttgatcatttttagcgcactttaagcaccgccgttaggcagcgcagttccaaaatttattccatgccacagatattatgggcaggacacgccaagtacctcaaacttgggtaattaaaccgaagaaataagtgcagtggggaagaatgacgcccaaaatgaaggaaatattcgatgctgtgcgaactctttgtgacccctctctgactctgccaatgcagcagtttacaatttttaccactatttttctctcactcatcgtctgctcgtctctcctttattataggctatttttccaaagccaacaacgcccttttctccctcttttctattagtcatttctcattggtgttgacgatccaacattcagtgtacaaatttgttaaacctctcaacattttaaatcaaaatcctaataaaaatttcgttgaatttcttcgcctcttatttgtgcaaaattttcgaaaaagtaatttactatttaaaattaaaaaattcagaagcaaattcaagaattttttttatttttaaatgcattttttaccacatgaattatgattaaatttttgcgtttcgaaagcattttggaattaagaaaaataaaaattgataatcattt

SEQ ID NO: 26328 - DNA, 789 bp, Heterodera glycines
ccccccccgaaacccaaaaaagtaaaaattttcagtaaattttttgaaattttaagcaattttcttcacaaaattgtattaaaatacacccctaaaaatcgcttggtagaaacgtttcaatttttaatttaaaatattttgtctttttaaaataataaaaattaaattcaaaatgcttcggaaagtaaaggaaaaagtgaagaaatctatgggcaaaagaaattttttgattttaattttagttcatcttttatgtcatacactggtggaaaaagtctttactcaagccgatcaaatttgaaaaaattaaaatttcgactagaaaatttaattgattattttttgtttatgtgtttttatttacccctatttatgtgctttttatgcaccacataattattttgatccactcattcattctgaacatgagtcgtttgatcactctttactcaaaaaaaagggcggaaaaaagtctttactcagaacatgaaaaaccaccttaaaattcatttaaaaacctgtaattcatgctagcttatcttttgatactgatcaaaaaagtctcttacatcaacttgatcagatcactctttcatggtgaccaggaaagtcaaaaatggcttgaaattggggaaattttagaaaaaaattcctagggggttaggaaaatttttctggaaattttgaataggctcattggatagagcacaaaattcactacagattgtccttttggatggttaaggctacgatttatactcgctgagataggggttggggtccaaaatt

SEQ ID NO: 26329 - DNA, 1814 bp, Heterodera glycines
  unsure (1)..(1814): unsure at all n locations
attgtttttttgcggcactgtcttatgctgtttgatacaaaccatttttccctcctttttgcttgcctcagcattcagccgggcgccccgctcaccgaatttcaccggctaatcagcagcaaatttttctccccccttatctgccaatttcagctccttccgttgtgcgcttttcatttggtatgtattctccatatttggaggtatttattctttagggggatggaaggggtacggtaggggagtgaacgaattactgtaaaagatatttgactaatttaattaattattaaacccttaaggtgattttccgccaccgccggcttactgcacccgcctccgccgtacgctgaaattgcccgtgggtggaccgacggatgggggacatttcacagggccgacctcgggggctggacaaactaggtaatatattaatttacttattaacttattaatacctagtcaaccccaaaacccgttctaaaattttttaatttttctattttgactaattatgaaaattaattattatttttttaaattgggattttcaaccaaattgtataattattatacctcaaaaaattgacagggaattgattttttcaggtatttgctaatatgcataagtgaaagaaaaatttttttgaaaatttgtcgaaaaatgtttttaggatacagggggaggggagagagaaaaatatttttatgttgagttaataaaaaagtttaaaaatgacttataatatttttgataaggaatattaagagccttataaataatatatttaaacacatattcataattatattttattgaaagcatgtatgaaggatgaggcgaagagggtaaggaaggaggagacggatgagggaaagtgagatggactatggaggaggaggagagagagatgaggcgaggagggtaaggaaggaggggacgaatgatggaaaccgtgccaaaatgcagcaaaagcgccagtcaaagcaaatttgcaaacttggccaaagcaacgcatccatggcagagagttcacattgattttgctggtcctttcttcggaaaagattacttgatcattatagacgcctattcaaaatactcagaagtttttgagatggcaaccaaatcgacggcagccacaaacaacaaacttcggtatttgtttagtcgtcacggattacctgaaattttggtatccgacaatggaactcaatttaccagcaatgaattttcaaaattcatttccaacaatggcatttctcacctcttctctgcgccatataacccaatgtcaaatggccaagcggaaagatttgtagacacgtttaagaggtcattccgaagcatctgtgctctctcacccgtccactcactgtctctaattattctcttacgcatctgtactctctcacccgcccacaaactgctctctcccatcctgcactctctcatctcatctctgactgctctcttgcacatctatactctctcacccgcccacagactgctctctcccagcctgcactctctcatctcatctctgactgctctcttccatcctgcactctttcatttcatctctaactgttctcttctgtccctgaactctcatcctcccactgactatctctaactgttctctccctctctcacgtacccgtactcccaaataaaatgaccttttctattattagatttccggaacaatggttgtttgtcggcctaatggttcagantgttatcggattatgcttttttgtaaattttcggggctcattcttcatttgtacaattaacaacaataataaaa

SEQ ID NO: 26330 - DNA, 1330 bp, Heterodera glycines
gctagctggctcaaaaaaaattttcgaaaatctgagtctttcgtttttatttattttttgcaaaattaattctagaatattttttcagaaagggttctgaaacgcaccaaatgttatttacatgttagtttaggcactctgatgctttttctatcaaaaagggagatgaataaaatttataaaaatttttaattcctttttaaacaggccaaaaagtttaggcttaacttttttttcagaaactgatcagaagcgcaccaaactttgcagggatactgaaaggaagagaaataacctattttaaatattatctagtcagttcatttaaataatttttatccaaaaaatttttttttgggttttcggggcagtccccctgaaccgatgcgcccagatttatggggagaccgaatccttccggaatagcttcactatagcctgtactttaattctgcgttggatttttgctccccataattgtttgagtaccccaaacggacacttgaaaaaatcgatttatttttgttttcggggcagtccccccgaaccgatgcgcccagatttatggggagaccgaatccttcgggaatagcttccctatagcctgtactttaattctgcgttggatttttgctccccataattgtttgagtaccccaaacggacacttgaaaaaatcgatttttttgttttcggggcagtccccccgaaccgatgcgcccagatttatggggagaccgaatccttcgggaatagcttccctatagcctgtactttaattctgcgttggatttttgctccccataattgtttgagtaccccaaacggacacttgaaaaaatcgatttttttgttttcggggcagtccccccgagccgatgcgcccagatttatggggagaccgaatccttcgggaatagcttccctatagcctgtactttaattctgcgttggatttttgctccccataattgtttgagtaccccaaacggacacttgaaaaaatcgatttttttgttttcggggcagtccccccgaaccgatgcgcccagatttatggggagaccgaatccttcgggagtagcttccctatagcctgtactttaattctgcgttggatttttgctccccataaatgtttgagtaccccaaacggacacttgaaaaaatcgatttttttgtttcataaatatttttttcagaaagtgctctaaagcgcaccaaattttatttacaacttaattttagcacgctgatgctttagtatcaaaaaggaagatggagacaaggggggttaaaaaatttttccttatattttggttatatcgtt

SEQ ID NO: 26331 - DNA, 1378 bp, Heterodera glycines
  unsure (1)..(1378): unsure at all n locations
gtcctgattggagtgcaaatcgtnggcacctcagaaaagctcaatactttcccatttctcgtcccagccgttgagcttcactttgtatcttcccgattgtagcttcactttcttcccaccgaccacttggattgccaggtggtcactcccgacccttctcggtgcccagctgcttgatcagagccgcatccccataatcgccatggctggctgggtcgagaagaagattggtattgcattctgtcatgccatcctccgatgccaccaccaccgggcacaccattaaataggccgggagttgctggcccacggtggtgaatgctctctgctctccgtcgagcaaaggtgggtcctcccctttagcccccatcccgtccttgctggactcggtgggagggggagtgcgcacgtgcttcgcttcaatttcccgaatgatcatcgtccgattttgttgtgcatcttccgttctcgagtggctagggggttcgttccttctctcccccttccagcatatcagccagtggtgatccatttgttcgcacgtccggcaggctgtttttcgtgtacactgctgcgcggtgtgatcggatcccaggcatttgagacaacggcgttgctcgatcagtctcctccttttggcttgtgctgacccatatttgcaacaccggcttggttggtgtcccgtttgtccacacaacgagcacccttgtcggggttgtcctccctgtccctcctgtgcttgggaatgcgctcccatcggtcgggagtaactcccgagcggcacacgattcggattcgctggtcgagtgggtggcatcgcgacttcggtcctggtgtgtgcttcgttcgacgttcgtttctccgggggctgatctctgatcataaatgcccgctggaatccttgtcctgttcgggcgttccgtccgcctcgttcgggctccgatcgctgctcatgtcgtcgttcgggtcctttcattgctgccaacgcggattcggcggccctcatgcacttgacttgcactcccaccgctttccgaaactctcgcactgtccattttgctcccatcgtactctcccggatcctcaattctgtgaggatgtggaccgggagtttggcctccaacaacgggccgaacgactcgtcgtccacgttcgctcccagttgttcgagctggcacactcctctctcgaattcatcgatcactgccgtcaagctcgacacgttgtcctttgctggctgcaagtgtagaagctgagctcggatcgctctttgcaagtcgttcgtgtccccaaatcgttccttcagcagctgcaccacaaccggataattccatccgacggtgggtacaaaatgtcggcggtgtaagcgcactgcttc

SEQ ID NO: 26332 - DNA, 1873 bp, Heterodera glycines
ataggccagaaaatactgctcactttgcagggttatggaaagaattcttagccaaaatatttacaactttctcctaaaaaacaataaaatttcggaataccaatttggttttgttagaaataggtctacgacaagtcaactaataacagttgtggaagattggtacgaggcaattataaatggaaaaaatgttgactgtatttatattgattttcaaaaagcatttgactcagtgccccataatttacttttatacaaattggaaaaaataggtataaggggcaaacttttgatgcggataaagggctttttgagtaataggacttttcgagttaaaattggggattctttatcctcaagtaaaaaagttacctctggcgtcccccagggctctgtcctgggccctttattatttttgatttatattaacgatcttcctgatgctttgccatcaggagtgaaaataaaattatatgctgatgatgttaaattatatatttgttataaagcaagagccgacacggaaattatgcataaagcattgcataatttattcgaatgggcaaataaatggcaaataaaagtttcaattcaaaaaacttttgtattatatttgggttcaaaaaacccaaaagaaacatataaatttgatggaaatacaataaatgctgtggatacaactagggatttaggagtaatcattgataacaaattacaattttccgatcatattaaccaaataacaaggaatgcgtatttacgtatgcgttccttgtttcgaataattaaatccaaatcgtctaagatttggattacgttatataaaacttatattaggcctttattggaatacgctccggaggtttggaatccgtctcttcaaaaaaatattaaaaaaatcgaaaagtgtcaaaaatatttcaccaaaagggtattttttaaatgcagccttccgccaattccataccaaaatcgattagaatacctgcaactgccaacacttgagaataggcgaaagctatttgatctgttcatggcacataaaattgtttatggccgaacagatctgaaactattttctatttttaatccatcagcacgctttaacatccccttttatagatttaacacaaaatacaaactgggcaaaaaattcattccctttgctgggagggtaacaaaattgtggaatcaactagataaagaactaataaaaacaaattctttatttgaacatttttggactaaaatacctgccccgaaaccgaatattctccaatttcccaaaaaaatggtatccaccagttaattgactctcaaatgagttttgtcaagactacagtggaagcattgaaacaactccagacctcttttacctccgaccaaatgccaatttttaataccctaattaccactttgtccactcaaattgacctgcttaatggatcgatttcccaactccgctccactgctctctccactgaaggcatgccaatttcagcggaggaattggaaagacagagaagtgtcgtcattattggcatgccagagcacaacgacagttcaccagcaaagcgggcagagatggaccggtcaaaaatcaattgcttattcgattcgctggggatcgaatgcggtaccattgcctatcgcatgggtcgttcctttaacccagcccaaaaaagtcctcgcccattgaaaattctcttgccttcccgtggcttccaaaaacaggctctcgctgcatggccaaaaaacaaaacaccattcgggctgctgattcgtctctgcaccatgtccgtctccgtgaatcgctgaacaaaggacaattggaggaacgcccgcgcctgcatttggcaaggggttgaaaaac

SEQ ID NO: 26333 - DNA, 1260 bp, Heterodera glycines
aaattttgaggtcaaaagtgattagaagaggtgcaacagtgattagaagagtgatcagaagaggtccacctgtgattaaaagaggtacaacagtgattagaagaggtgcaacttgattaagaaaagtaaaacagtgattagaagaggtacaactgtgattggatgaggtacaacagtgattagaagaggtacaacaatgattagaagaggtacaatagtgataaaaaagaggtacaacagtgattaataaattcattaaattaaaatgaaaatattttttaacaaatttaatttaaaaaatacatgaaattctatcaattaaaaaaataattcatttaaacttataaaatttattcattaaaaaaaattaatttaaatataattttttatttattaactcaaaaaatattttaaatgaataaaaattgaaaaacacgaaaaaaatggtagaaaaataatgtacaccgcccggcttcgaacttcgcccccccccccctcaaaatgatgcctcagaatccccaatcacacagggattctgaggccttaacgatgtcaaaagtaaaatctgatcacgtattcgtgatcagcgtcataaaatagccctaatgacatgtttttgaaagatttttggttaaaaaaatttttcactcaaaaatcctggtcacccccctttggacccgaagcacaaaatcacttttatttttatatctttttttaaagaagtgataaaaataccaaataaattttataaaatagagcaaaaaattgcggatttttatattattttacttttccaaaatatcttttcagaaccgagttatgaattttttactgaaaattcgaatttttccagaacttctggaataactttttttagtttcatgatagaaaatctaaataaaacccataaaattctcctgattttttgctatttttaaagctttgttgtatgaaaattgacttaccctgaggttagttatgaattttcaaaatttaccccaaaatcccgagggtcaaaaaaaatgaaaaaaatttcgaatttttaaaaaattctaaaaattatgaaacgaaaaacaaaggtcatattcgtaatcagcatttcaaaataccacagaaaaaaatttttcacccccattttcaacccaaaaaaaattttcaaaaatttctagggggcctagctcgaaaatttttgaaaattttcgaacatgtagtacaccattcgatagcattttaaaagctctacaattttctctaaggcaa

SEQ ID NO: 26334 - DNA, 1039 bp, Heterodera glycines
cctaccgggaattggacaccaacttttgtcttctattgtagcggttgaataaagcactaatagtgtgtttgaaaccgcacgaaaaatagttattgcaaaaaatggctatctctgaaagtcactattaaatccctaccgggaattggacaccaacttttgtcttctgttgtagcgctgaataaagcactaatagtgtgtttgaaaacgcacgaaaaatagttattgacaaaaaatggctatctctgaaagtcacgattaaatccctaccgggaattggtcaccaacttttgtcttctgttgtagcgctgaataaagcactaatagtgtgtttgaaaacgcacgaaaaatagttattgacaaaaaatggctatctctgaaagtcactattaaatccctaccgggaattggacaccaacttttgtcttctgttgtagcgtgaataaagcactaatagtgtgtttgaaaacgcacgaaaaatagttattgaaaaaatggctatctctgaaagtagtgtgtttgaaaacgcacgaaaaatagttattgacaaaaaatggctatctctgaaagtcacgattaaatccctaccgggaattggacacaacttttgtcttctgttgtagcgctgaataaaacactaatagtgtgtttgaaaacgcacgaaaaatagttcttgacaaaaaatggctatctctgaaagtcacgattaaatccctaccgtgaattggtcaccaacttttgtcttctgttgtagcgctgaataaagcactaatagtgtgtttgaaaacgcacgaaaaatagttattgacaaaaaatggctatctctgaaagtcactattaaatccctaccgggaattggacaccaacttttgtcttctgttgtagcgtgaataaagcactaatagtgtgtttgaaaacgcacgaaaaatagttattgacaaaaaatggctatctctgaaagtcacgattaaatccctaccgggaattggacaccaacttttgtcttctattgtagcggtgaataaagcactaatagtgtgtt

SEQ ID NO: 26335 - DNA, 1711 bp, Heterodera glycines
cccacataaaattgtttgttaccactattttttggtcttactatgattttagtagaaaaacaatttctatattttggcattaatataacttctagcggaatttgaatccagttatctgcgcccatgtttcatctacaaggtccatatcttgtacatccggtccaatttgatgcggaaagaatcactggtttatgctatcataactctcatcatcatatacattaaaatcaacatcaattgcttttatctcattcctttcaatttttataatattataaatagtcccactttcctcttttgggttttgtgagtataactcagaattcgaagaactaaaatattcaaacttttccacttttggtactgaagttatactgcctaagcatggatactgatttagtttttcatttggataaaccaatgcaaaatatggccatttgtcctccttatccagccgtacagccaaagcacacttacccattctctgaaaaataatcatccttagctgatcatctctatttttatcctttttttgttttatttgatattcatcgctttctggtttaatcattacccaggcaagagcatcagtacatctcaaacctattccagaactagaaggacagtcaatattattaatcagttctgttggattcttttcatcacttttttcagtttctctcagttcatgtattttttcattatcagattttattgccaaagctgccattgtttttctaatcatttctctacaatgatttatttctgcaattctttttatttccttttcattagcactttggcttgtcgaagcaatattttgatttatatttttatttgtttcgctttttccttgcccgtttccttccataagccttttatcacagaccgcaaggtctgtgtactccatgcttttgaactgccgaagcaaaccaaatttttgattctgatcccctttttatttcaattccccctttttattttacttgcttttgtttggtgtttatttttgtctaatttgattaatagaagaaaagaaattcactttgtccgcccacagaagtcaaatgtccgttcgatcagtcagctttgtccgttcactttgaatccgccgaagcgtttgatcaccactgatgtcgttcttcacctgtaattctccaaaatgatttgttgaaatccaaaacaaaacaatgttcctaaacgccttcaattgtaccaagagtgtataatttaaccggcatttacacatcagatcaattaaatactaattattttccaaaattttaggggccataaaagtgcattagtgtttaacaattaattaaaagcataacgcagtttatttggttaatcaaatgaaaagcatattgtttgttaagcaaagctgaatgtttggccctcgtaatacaatttccactcatactcacagttttcacacaatgcgaaatgtgtcgcacttttgggccgccgaagcgttgaacacagttgatggtccgcaccacactcaaatctcaatttcactcaggtgtcgccgattctctgaaattgggaaattgccaaattattaataattgccctattttatttatgcatgcgtaagtaccaacatttcccatttgtcttgcacaataactgataattggaattttcccccttttttagaactaaaactcattcgttatgaatttttgatcattaattgatttttttt

SEQ ID NO: 26336 - DNA, 1288 bp, Heterodera glycines
gagctcggattttacaaaataattaattttatctatgattttttataagtactaaattttttccaaaattttaagaaattagtcgggcgtaaaaaaacacacaggatgttgtatagctcaaagagctttcgaatgagctattgaatgtatggagaagtcatgtttttagttatttacgattttttgaaatttaattacaagcccttaagggtcatatgagacgggggtctggggttcgagcccgcttggctgtgtttattaaatttttaaacttatttttcgaagaaaccacaaaacttattgccaaaaatggtaaatttctcaaaaattcatccctcaaattttttttcttaacaaaattatgtcactattcgtcattatattggacttttcgccattattttggcatttttttagcatttttactatttgtttttttttggaaaaaatggtttgataaataaaaattccatttatccccagggggggggggtaaatgggacggggtgattatttttcaaacccctaagaaagggggggggaataattggggacggcgggattaatggagacagggggataaaaagagaaaatacggtatacggtatttttcaaaagctttaaaaaataaaataagagaaaaataattcctctctcaacataaaattaaaaatgtaagaaaatatttctcaaaataaaaaaatgtttagtgaaaaaaaacaataattgaaaagatcttctcggtgataatgacatggttttatttgaataaataaatgttaaatagaaataaaaacactttcgttgttggtctcatcaattttacataaaaattcattaataagaaattattttttcattagagcatgaaataactagccttttttataaaatttgtctatctggataatgaaaataattttaaaaattgaaaaaattaagaataaaaaattaaattatgaaattccaaactctgtaatgaataagaataaatattcttacaataatatttattttaaattaatgaatatatatatagaaattatatttcgtgcacaaataaaaataatatattagaattcacggaataattatatagatttaaaatttaatcaaaattttcatccttattttttgtttgtgagaatgttgaaaaaatatacattcaattaaacaggcttaatttattgttaaacaaatttttaattttttatgaaattcgaaatggttgacaagagacttgttcgacaatgagctgcagtacaatttatagaacaacaacgccgct

SEQ ID NO: 26337 - DNA, 1480 bp, Heterodera glycines
tttttcatattcgcccaaaatcccgagggccaaaaaattgccaaaaaataaagaatttttaaaaaattccaaaaattatgaaacttaaaatagacatcatattcgtactcagcaccttattttaccccagaaaaatatttttcacccccattttcgtccgaaaaaaaatttccgaaaatttctagggggcctagctcgaaaatttttgaaaattttacatcatgtagtacaccgttcgatagagcttaaaaagctctacaattttgctctaaggcattttttggctaaaaccgacccctgacgagttatgggcccgggactcaaatgtcccgcttaggccaaaaattttttctatttccggaaaaaaatcgaaattttttcaaaaaaaataccattcgatagagctcgaaaaactatgttttggaagtggtcttcgttttcccgggaaaattcgttaaaaaatcataaaattcaaaaacccgaaaaccgttttttaggcctaacttgaaaaattttgaaaattttcgaaattttaaaacttggttggatagcctttcaaatactacacatttttgctcagaaacaatttttcggtcaaagcaacccctggcgagttattcgcctggtactgaagtgtacattttgagcacacttcagttagccaagcgtgcaggccagggggtggctctaataaaaaaataaaaaataccagcatgtagaggacagtggggggagtgccctcacagcgggcactttttgattcgggttttagaaaaaaagttaggggccctaaactgcaagaaaaagtgaaaaatcggtccccgggactcagtcgtccgcgctgaatttttctctatagttttcccggatgctcctcaaaaagttgtaagacccttccactactttcagggcgctcccggccttcggccgggagaaaatggttttagcaacgaaactccttgtcaatataacgtatatattaactagcgggtgcgtgaaccgtcgactatttagctgggaaaaagcgcttcgcgctttcggagcttcgctacctaggctgtgaagcgattcaaattgatcgaatggttggagaaattttttgaatttaaaaaaaattattaggggtttttagtccacatcgaggctcaagacgggcgcttcgcgcccttcgcgtcctcgaacgggcgcttcgcgcccgtttctaatttttgttgtgcttttcggccgcttcgcggccgttttttaaattgtgttgagtcggacgggcgcttcgcgcccgatatttatgggttgtggagtaattgttcgatccgaagcaatttgggattgcaaaagtgattagaagaggtacacatttgatgaagaggtacaaatgtgatttaaagaggtacaaaagtgatttaaagaggtacaaaaatgataaaagaggtacaaaagtgattagaagaggtacaaaagtgattataagaggtacaacagt

SEQ ID NO: 26338 - DNA, 986 bp, Heterodera glycines
ccatcatttcggcaagtcctccgatcttcgtcccagtcctgtgcccgtttgccttaaaaatggaggggaaattgtgtacataattcaacaaaagaatgaagttgtttgtgcccaccgtcggtgcccatttggtcagtgcttgcgccattggtcagcaaatgtcgtgccacttcagtcttcccgttcttcaccgcgtgcatcagcgcgttgtatccgtcggcgtccgtgtgttggacttcagcgccatgatcgatgagataagtcactgaaaatgaagagaaaatcaggtagttaggtaggtatataaatcgatcttctaatttttttcaacccaccaacgttcaggcgtccctcactgctcgcgcccatcaaaggtgtcgtgccatcgattgcttgctggttgacttcagctgcccattcctcgaccagcagacggcacatctccaaactaccagtctcggcagctaggatcagtgcgaaaacgcttcctgaaacgggaacaacaaatattggacaaaaaaattcagaaattttacaaaaatccaccggtgttgtccaagcgtccaacggttgcaccgcgggtgagcaagtagcgcgcaaagtccaccttaacaaatgggaaatatttcgagacacatttttttcctacccttccagaggccgcagcgatcatcaacatggtggttccattttggccacccggcatgtcaatgctggttccgctctcgacatgcattctcgctgaaaaaatgatgtggtcagagtgtcaaacacacaacggcgatcaatttggacgccatgccattacccatgatctccacaaagtcgacgaactgctcccggttgaatgactcgatcagaatggaaatctcgcgcactgcgtcttcgtttcccaggccgatggacatgatgagttggcgaacacgttgctccaaatcaacggcttcatcaccaccaccagcggcagcagcagcagcaggaggagg

SEQ ID NO: 26339 - DNA, 1479 bp, Heterodera glycines
tttttgtctttaaaacaaaatttgatcctttttctccccaaaagatgtagaccagttcttttgtttgtgactgcgccaattgttgtgtatttgctacaacaataaaaatgtttggtttttaaccaaaacaaatgttgtccaataaataaataaataatttattaaacaaataaatgaggaggaggacagcaggaaataaataataataaaataaaataatgaaatggtggaatgaatgggagaatgcccggagtgagggaaagggagacatatttatggggctggtcaaggggcggggcgagagacaataagagagggagtgaaagggaaaatataatcaatagggttgttcccttatccaacacatttcattcgttctccctaaatttttctcattttgttgctgcacttttctgctgttggtcgattgtgccatcactctttggttattttttggccatgtcaaaaaacgacgacgccccaacaaaaaagaaatgtaaaaattcaacaaaaaattttaaatatttcttcaatttttcagctttatctgcgccgattgttggcttttggtgtttgattttcttacgccttcccaatttggccccgaaattgcattgatcaaccgctgctttgacatttacgtggacgaacatttcaagacacgcaaatggaaattgggcgaaattcgaatttgctacaaaattgaagaaaatggcactaagcaaatgcatattcacaatgccgatgcaaatccattgccaatccccaaaatccgtttccgaacaaaatcatcggattcagacacatcaaaagcatgtaaagattgattaatttgcaatttttcgtcttaatttctgcttttcagttacatcgatcaaaatgtcatcgcatttctccgccgttttcaccgttgtattttcgccgtttgtttaacggatttgttcattttcacgggcaatgttagccttttggacaacatttggccaatgttccgcaattctatgtgtgcgatgattttgaataccatcgcttttcgtcgtttgcgtcaattggccccgtcacttctcaacgattgttcattcaattgaaccacaaaaatggaccgacggtaagaaaggatttaaaaaattgcaagttttcatttacccaattttcttatgtttcagttggatttgtggcgacgtgtggatggacattctcccatcttttgaccatgctcaactcggactcaaaatggcattgctttccgaccgtttcgatgttttggtggacaaacatttcgatggaaaaagcgaattgacaatttggagacgtatcaaaataagcgaaactgtctgtggcgatcgatggcaaatttgtgggatttccattgccggaccattcgctgccaaacaaaatccgttttcgtttccttcagattcagtaaatcaaaaactatacagaaaccaattaatatggttggtcatcttcttcattgtt

SEQ ID NO: 26340 - DNA, 1912 bp, Heterodera glycines
cgcgtactgaaacggctgggtcgcttttgcggcctcaaatgcacgttctgcacgcccatacactttgctctccagcgcactgatgcgctttttctcaggccattccgccgtataaacatcaaatttcttgaaaaatcgtcgaactgcgtcggtgccctcagacccattcaaatctgggattttttccaacaccaaatgaaattctagacgtgcaaaacatccaaattttggctggggttaggtgcattttgtcggggctgatgacgctgctgttcaaaaacaggctgcgcgtagctcggagccggtggaatgcgttcgttcgcataagggaaagacggtggaagcgattcaacatgctgaatgtattggcggtggatgacgctgtgttgaggcgctaacggcggtcggttcaacaatggacgctgctccacaaattcgcggttattcgaagcgcggacatttgtttgacccctaatttcgctgctaatatgtcgattttgcattcggttttctccaaaatgctggtgtcggttcgggctgactctctcaactccaaagttttgcagtccccctctttcatgaccaaaattttcaaaaatttcgaagtcacgcaaacctccacgcatttgctgtccaaattccatttgtgcgtcgccgccgtgctccaaattttgtccaatttccaccgattcgtttccgttttgttgccccaaatttggtgcgtctccgttttgagtgccattgtcgttgcgaatgttgcgtccgatgctcacgttcagaagtcggttgcgcagctcggtctccgtcatttgtggctgtaaaatcaatccatgattgctgtggtgtgtcaaatttggaaagatcggagagtttctatcaatttgaaacaatggcgggtcaattcggtgatttaagaagcttctgtgatggctttcagatgattcttcaagggggttttgctattggagaatggcgccgtcattgttcaacacaattccctcagattaattatggattttaaatgataaattcatacataaaacaaaatcgtacaagaaatcttggaatttttttttaaacgacattggtcgtctgccccacaagaaaggcgcggatcaaataaaaatttaattggaaaatttaattttaaattcttgatttttttattttcttttttttttacataaatgatttttatttaaattaattttatcaccaattattaatctttttgattaattaataaaaacataataaattatttttgttttttccttttatacacaatttaataatacttgaaataatttatttactatattaatgctgcatataaaatgataaacaattacatagtaatgtggaaaaaattttttcatctatacatattctcaatccgttcaaattcattgaaatccctaactctctggcatcaattagttttttaagaaattttgcaagtgtatgaattaataattttcattatttgtttttattggttttctttttttgtaaattatatgttaaataatatttttattaaaaagtttgtgctgaatcatataaaaaatattgaatatgaaatttgggttttccatgttgttaactttaattctttttgtttgaaatataaatgtttttattacattctaattatttagaattgaatttatttatgtgtgatttttaaattattagttgttttatataaaatatttctgcataagattaaattaaattaaatattttaattttcattaattagccttatattcaagcccccgataatttcaatgattatataacgattttttgtcattttatttattaagccaattatgattatttaatcataaacataagaaatgagaaaattacattggtaaaactattttaaattgcaaaattaaaa

SEQ ID NO: 26341 - DNA, 1474 bp, Heterodera glycines
  unsure (1)..(1474): unsure at all n locations
gcttgcatnggcctgcannggtccctgaaataaaataatagtttatattttttggttatgttcggaaaggaggatgtattatttattagggaattaaaggggtcaaaacagagctatggaactatgtggctttgtttgaaaggcaagattgcgaggaaaggaagtggcaacaggaaagaggaataggaattacgcgatttgttgggagtgcaaagtgtgaggattaaagtgaaatgtaaaaataaaatggagataggtcgagtaggaatttaaatgcagtaaaaatggcctttttatctgaaaaatttgacaaggataggagcgagggtttgattttccgtcatgatttccagttgcgggaaattcgtttgttctttatgttaatattaattcactgtgcactaactcaattagtaccgaggatgttgttgtatatgtgaatacatatttggtgaagttgggagttgtcgaatgtgactaggttattccagatattagggaattctttacctttctacataacatgccatggatttttgattaaagatgttgggtcggaaaatgcgtgtaggttgtttaaaggactgttagagggagtgtttttaatttgcgacacggtaggcaaatgggaagggaccaagtagcgcttagagagagagagtaaaaatacaaatgataaaattaaggcgagtcaaaaatggagctattgaaaagcttgagctgctcgggtgtgactcccaatttgtgacagttggaggagaggatggaacaggctttgggtcggactttaaagcatccgtgagatttggttgcttatcagcagagccagagcacacgagctgttctttgatttgagatggtgtagcggtgattggttgttggatttggtcagagaatgtaagagtattaaatgaagggtggagtgaggacatcaattcgggttgccatggttaccaacccagtattaagttcctcagaaagtttaaagattgcctcatttgttgcattgagcctacgattgaggtagcgaaggttgctgtttgaggcatcttcaaggccagaaacttcactcaatacattttcgaggtcactaacttttgcttggacggagggatttctacctgagaagaggcgacggtcaatcgcaacaatatcttcgtaaggtgaattctctaaaggattggccatgataggggaaatggaaagtatcggagagggaactgaacttgcgcaccgtagagggaaagaaataaaataaaagttaattgtatataatcactggatatcgcacaataaccaggatttaacttgctttgctgtatttaattgggggtgattccggggcagatataaatggttcaatgcaccaaatatattaaatgagaattgaatgttagaaccaaaagaaacaaatatttaattgtcttaaatcactggatactgtacttcgtaacctaggggtttacttggttta

SEQ ID NO: 26342 - DNA, 2073 bp, Heterodera glycines
  unsure (1)..(2073): unsure at all n locations
atccggtgctcgactgctcgacctgtgctgcagtggaccctggcaaacgaccaaccgcgtcacaggcgtgaaccacagtggctaaagcaaggtggaaccaagcctggtgccgacgctggaactgccgcaggatcaggactgtgtacgaacncaacaatgcattacattttacacatttattacattgcattacgcttttgaatttgacggggtggggaattggccaaaaattaattggaaagcattctcataaagcattttacatgccattattcttggtgttttcttttgatgctattgatttatcaaattttcttggagccgacaatttgcccgaaatttagcatgaaatgtggtcaaaacgtcgtcgacagttggcacgtcaacaaagtgccacttcttcactgacttcttcaaatttttcggcggacaagaaacagcagtcacaacagtagtgatgaatgtgcattgaccattttagccgtaataaaacattttttgcgatgcatgctgttctgatttaaatggttgggctgtgcgagacgccataatttagtgtcgaattgagttacgagacatctatttcttcaataagttttgacttgtaaatttaatattgtctaaaatgaaccgacgatatgcatacttccctttttggaactcaaatgcgagaacattgggacaaacattctcgcacagccctaattaacaccaaattgaaaggctgttctcaaaaataaatgtgtaccatcccttaaggtgtttgtgatcgtcctcccaccatctgtcatcatcaatattcgaaacaccaaaaaaaaaattaaacatttttgcttcaccaaagccttcggacactttcggcgacgaattattgttttatgtgttgcgtaaccgagcgagagaactgatgagactgttcacaatacacaaacacataaatattcctcatttgtttttttttgatattttcaatttgcttttaaacaggtcgaacacctcacttatcacaggttttctttcaaaattcaatcctcagagtttgttcactcggtgctgcctttatggcttcttcatcgacactcatagaccaccgccgtcttctcattgttttaattggttgttatattgtgcatggcgcaccgtttgccgatcggagtgactcgcaaccagcagagaaagcgcggtgagtttttcgggataacacatgtttttcgggttccttttgagtcccttccttaaatgtggtactctgtaagtcttctaatttatggtactgtgaaatttggagtgatgggccccttttgtacggttaccgcacatcaattgtcgatttattactgaaattcgtgcatattgatggtagaatcagccatttgttggtttacggatgggctagaccatgtaatttgcataacttataggataaaaccgctcatttgtcgttgtgtttgttcaatgagtttctattcggcaaacggtgatctgaccactaatcctccctccactttttattttcttttctttttgtccaggcctcgttttctttgtttgttttctctgcgggtaatattgcacttttgaaaagatctcagtttaaagttggaaaaaattcaatttattttgtgaactaaacagttaacgcaataaaattaaaaacaaattcattcgtgtaactatggaaacttttttgtctaagaaagtcgcaacaaatatttttttgtgtctgaatttgcatttttatgtccactttaaggtttctttttatttctaaacattatgaagaagtttgactatctcgtcattggcggcggttccggtggcatcgcatcggcacgccgtgccgcggaattcaaagtgaaagtcggactcatcgagtcggagcgccttggtggcacatgcgtaagtgaaatcatatcaatttcaatcactttctcattaattttgtaggtcaaccttggatgtgttcccaagaaagtgatgtacaacaccgccatacatgccgagtttctgcgggaccatgctgactacggcatcgactcaatgaacgtaaaattcaattggaggtagagtata

SEQ ID NO: 26343 - DNA, 1105 bp, Heterodera glycines
  unsure (1)..(1105): unsure at all n locations
aaaaaaaaaataacattccgggtgcgaaaaatggggtttgaaaaattttttggggaaaaaaagactttacaaaaaataatacccctgggagaagggagtgggaaacatgatttcaaaaattttcaattttttctagtctaatctactcaaaacggttcagaattcaataaaaataacattcacggtgcgaaaaatggggtttgaaaagtttattgggaaaaaaagactttacaaaataatacccctgggagaagggagtgggaaacatgatttcaaaattttcaattttttctagtctaatctactcaaaacggttcagaattcaataaaaataacattcacggtgcgaaaaatggggtttgaaaagtttattttgaaaaaagactttacaaaataatacccctgggagaagggagtgggaaacatgatttcaaaattttcaattttttatagtctaatctactcaaaacggttcagaattcaataaaaataacattcacggtgcgaaaaatggggtttgaaaagtttattggggaaaaaaagactttacaaaataatacccctgggagaagggagtgggaaacatgatttcaaaattttcaattttttctagtctaatctactcaaaacggttcagaattcaataaaaataacattcacggtgcgaaaaatggggtttgaaaagtttattggggaaaaaaagactttacaaaataatacccctgggagaagggagtgggaaacatgatttcaaaattttcaattttttctagtctaatctactcaaaacggttcagaattcaataaaaataacattcacggtgcgaaaaatggggtatgaaaagtttattggggaaaaaaagactttacaaaataatacccctgggagaagggagtgggaaacatgatttcaaaattttcaattttttctagtctaatctactcaaaacggttcagaattcaataaaaataacattcacggtgcgaaaaaatggggtttgaaaagtttattttgaaaaaagactttacaaataatacccctgngagaagggagtgggaaacatgatttcaaatttttcattttttctagtctaatctactcaaa

SEQ ID NO: 26344 - DNA, 1727 bp, Heterodera glycines
aattaaaaaccaaaattatgctcaaatttcgtgattttatatgcatatttttgtcagccttaattattattattttttattatattattaaatttatttaaataagatattttaagtaaatttgttatgtttcattgttattcgttggccatgctatcactgataacgctgctgttaagtgtcggtgccggtgctttttggccctattcgggtggccaacccgtggacgtaaataaattttaaaaattttgaaaatttgtctatttaaccaattttattaaaaaaaaatcatcttcttggtttttaaaaattggaattcctttttgtaaggcctcaactgctgtgagtgcaccgtcgggtgcacattcgggtgcggtgtcctccagttaccatgacttgagcctggtcatcaacggatgcgtttaccatgtgtgtgggttttttaggcgcttagagttgagggccacaaaatttgaatcgagagtgcgttgagagagggagagagagagaaagaaagaaagaatgaaagaaagaggagagagaggtagagatagagagagagaaagaaagagaaatgaaagaaagaggagagagagagagagaaagaaagaaagaggagatagtgatagagagagggggcgagggtaagaagatacagaagagaatggatacagtaagcacatggtctcactatatcctaatcttgtacatgatgcgcctaaagtgggggcctgagaattttaagaggggtgtggctggctgctaggtacctgaaattcttgaaatttttctccacattttccattttcaagaatggcatgatcaccgagaacgggggacaggcacgcaaagcaaccgctgaggaggaggccaaggtcaagcagtattttgcatcgtcccaacgctcccaggaacagttccagcaggccatggccgaggcagggacaaaaatttttttttgttgaaaaaactcggtttataggcctaaattttccaaaaaatttccagaatatgcgacgcatgttcactgcaccgtttggcgcctggcaattccccccattcccgcaacaattcccattctcgtccatgccaatgatcgagacgccgtgcttttgtgaaagctgccgaaatggcgcgtcaatggtgctgtcagctggtggcggattagggcacagagggctaatctccttccccatccctgccatttccgggatcaatcaactccatttcgtttctctcctcactaaaaaattttcaaactttcaatttgaaatttatgacaaaaaaatcatagaaaagtttttataaaaaaattttaaaaaaatttgaaaattttatgataaagtttccaaagaaagaatcgctcaagatttacaaacaaaatttttttaatttatagctttgaaaattaaaaaaaaattctgggggcggatcagatgattaattaattgtctatggcaaaataaacaacttaatatgattatctctagtcactatatggacaataacttaattcataccgagtctctcgagaaattaggaaggaaagctcaatttttggcttgtagccagtcctgggatctcggcttttcgggtcccgattctattaaaaagcataagtcccgacttttatgatccgatcaattttgctcgtcccgctttttcccaaaaagctcgaccccatcccaacccaatatgccatattcagaatcacaaagtgcagtcgt

SEQ ID NO: 26345 - DNA, 1082 bp, Heterodera glycines
cgcatgtctaaatttgaaagaaatggaaatcagcatggtcggctcattagtgtcgattagcaaatcaccaacccgcagcagattcgtggccagtcatttctcttccgtttgttggcggatttaaactgcaaacggaagattatgccaaatggggtggtgccttcggtcggctgaactcacttcgctccttgggccaaagcactggcatcccaatggattaggccagaatcggaggaagagaagaaattattggcgaagatgggatggaatttgatctgtcgcaggagaaaaccgacaagttcgttacggctcattctgattttacccgactgatcggatgttgagagactttgaaggcgacgggtaactgccgattgacctgacgaatgtcaacaaaggacatgacgccgtcttgggaaccaaacgcaatctgacggaggggtgggggacgaagtgacacgaaaatgcaatgaaaaacggaacacaatacaagttgatcaacgttggtcggtcacttaccaagtttggttgggccgggtgtgtggccaacgcggtgattgaattgttcaaagttgtgacggaacgcgaaaggaccggctgatggccgaactcagccgcagcggcagcgcccaggcccgtatccagaaaacaatttcgaagagggcacctgaagagccaggccaaaaatttttttagtgttattttcaaaatcttcagcgattcttacaagggaacctcgcgagctgtcactcaaaaagtgggtatacatttggtaccattggatagagcaggatcgacttctattgtgaatttttaattttaccggtgtgtgacgaaaaattaagttatgaagcatcgaaaatcgaaatttgggccaaagggcccatttccagctctttttattaattttcaaacctttaaaattgactgatttttgcttatttccactaaagaaaaaatatcacatctttttttagtctaaaagtgatttttaaaattattaattatattatatattgtaagccgggactcgggtctcggctaccgattgggattggatgggagaggctcctccccattgg

SEQ ID NO: 26346 - DNA, 1304 bp, Heterodera glycines
tagcatcggggtttacgagatagaaaattgtcctaaaaagagatagccatttttctgagaattaattcacaatttccgcagctcttagggtaatggaaaaaattttgaagaggctctccggaacggattagcatcggggttacgagatagaaaattgtcctaaaaagagatagccatttttctgagaattaattcacaatttccgcagctcttagggtaatggaaaaaattttgaagaggctctccggaacggattagcatcggggttacgagatagaaaattgtcctaaaaagagatagccatttttctgagaattaattcacaatttccgcagctcttagggtaatggaaaaaattttgaagaggctctccggaacggattagcatcggggttacgagatagaaaattgtcctaaaaagagatagccatttttctgagaattaattcacaatttccgcagctcttagggtaatggaaaaaattttgaagaggctctccggaacggattagcatcggggttacgagatagaaaattgtcctaaaaagagatagccatttttctgagaattaattcacaatttctgcagctcttagggtaatggaaaaaattttgaagaggctctccggaacggattagcatcggggttacgagatagaaaattgtcctaaaaagagatagccatttttctgagaattaattcacaatttctgcagctcttagggtaatggaaaaaattttgaagaggctctccggaacggattagcatcggggttacgagatagaaaattgtcctaaaaagagatagccatttttctgagaattaattcacaatttcatcacctcttgcggtaatggaaaaaattttgaagaggctatgcggaacggattaacatcggggttccgagataagcatccccataagagtgtctaaggggatgggatttgtccccataagagcgtttatggtgatgggacccatccccatgagagtttttaagaggatggcatccgtccccattagaattaaattttcatgaaattttttgtcacttataccgtttagcgtagactcaatagaaccaaccatataagaggtttttaggtgaatggcattgtgaccattataaagtctacaaagatggctttgctttgtcgagtgagttttaaatggggtgagagacatttccgttgtcatcaaattttcaagaaattttttgtcaattacaccatttagcgtagactcaatagaaccaagcattctaggtgtctttaggtcgatcgcaacgatacgcgtctaaaaa

SEQ ID NO: 26347 - DNA, 2165 bp, Heterodera glycines
cagcggcagaatcaacatcacgaagatgttggagaggagaggggaagcaactccaaaggaagcggaaacgatcctacagcaacaacaaatgccaacagtggcacagtgccatcagcaaaatagaccaaagcagcaacatggtggagcagtaattgcagcaataaggacgacgacaatgacaacaacaataacatttccactgcacattgctgttgaaaatgttcgttttgtttacaacgggaacaaatttacgtgatttattaataaaaaaaactaccaaaaataccaatttagagttggaaaaacttttgtaattcgatcgctctgtcagatccaatcaacaatgatcgagtttctattgttgagcggcggcaaaattaacaaattgaacgcatggaagagctcaccgctgcataagaccgccgaaaatatccattcaagactatttaaaagggtgaaaaacggtcaagtttacactagcgccataattagcgtaatttgccataaaaaatgaatgggcaatgattcgatgcactaaaagcaaagggccaatttaggcactcagaccatccctctgctcgttctgctcggcttcgacacggagatgaaggaggacgggtgccacatttggcgcctccgccacttcagcaaacgtaacacccaaacagtgtcttctgtcggtgttttactgtccctcgccttatttcccagcaacttattgcaacgtgtgcctgaacatgctagtgggttggggcggtaagcagggtttagcctgctcattgtgcaaatacaccgtccacgagcgatgtgtgcgttctgcggccaacaattgcatccacacgtacaacccgtcaaagagggcggcggacaacaacggggagagtttggtgcaggaccaccggtggatggagtccaattggtgggggggggggggggaaatggccaaatccaactccgaaaatgcctttccgcttaaagtggcggaaagtgtgccaaatgcaaggccaacgtgagcattttccaaggcagacactgccgttggtgcaaaaacctggtaacatttggaggtctttccctgttgggagtgttgcgttcagcttcactccaaatgcattccgtcgtggcccgcggcgtgtgactttggccaattcgctcatcacatcgttcgtcgccatttcctcgctttgtccgtcattgctctgtccgtcccttcagttgcctcccgtgcacatcatcccgactttcatggaccgttcctgctccatctcgaccaatttccgccccgtcgcccactcggcccacccccaacaaaattcagccgcactgttcggccacaaatagtgacagttccctcggagggggccttttgcaggtgttggagaaccgtaaccatgctatccaatgcaaaagcattccaagttaaaagtcattccgttgccgccgaacagccgttgccggccattgctggtgctaatcaacccaaagtcgggcggacgacagggcgaacgcatcttccgcaagtttcagtatttgctgaacccgagacaggtgcgagaagggatcagtcgcaaagttaattacaaattttttaccgcaggtgtacaatctttgcaaggacgggcccgagccggggtaagtggccaatgaaagggaattggaagggaaggggaaagaaatgattggttggtcaaagtcggcattggcaggctgaacctgttcaagtcactgaagcagtacaacatcctcgtctgtggcggtttgtggtggccaatgcacaagggcaaaacactctttgctgccttcaggcgatggcaccgtcggatgggttttggaatcgatgggtaaggcactgattaacaaaaagcacacgcatccatcgattcgccttgccacctcgaaaattgccagacaaaattgcctatggcgacggtcgtccgccggtggccgttcttccgcttggcactggcaatgatttggcgcggtgtctgaaatggggcggaggatatgagaacgaacctttgcagacgattttgcagagcatcgaacggtcgactcaggtgaaaaggaaagggaagagaaggaaaagccaaggaaagaaagcgaaggcggcaaaacaaaggggcgatagaagaaagcattttcagagcaaagacaagggcaattag

SEQ ID NO: 26348 - DNA, 959 bp, Heterodera glycines
gtatgatttataaaaactatttttttatggtctgtaaacgacataagtaagtaccttcaaattatactcaaattattgtgttcgagaaacaaatgggacaattaattactcattcgcattgtgtgtcattgtttagcaaaaagtctcaattccctcccccgcccattttttgcttattaattctccaatttcaatggttttagccttctcttccgtcgttttgtgctttctttctttccgtctctctctccgttaagtgcaatttgttcctccttttctgagcaacttgaaattcgtctgctgaccaaattcagttgtataaataagagaagttttcctctcgaaatgaattttaattttggttttgaatttggttacctatgtttttagacggggtaaacttaactcatccaagtccaatttattcatactcaactcatccatgcacaagccacgagcataccgcacaatgtaagaaatgcaatgatgacgagcccgcatcgtgctgtggatgtgttgggtatgaatggattgggcagggccatgactcaaggaatgtgcaatggaatacgatttagtcggggtcgtttttttgtaattcaccactcactgtattttgaaatgatgcttttcgtctcttatctttacacttttttatacatttttacattgctataagccttgactttgagtaaccaacctcaaattgattttcccgcaaaaggacttgcttcgtttaaacttttaaagtgcagtgaaagaaaagagcgatcaaaatcagcggaaatggaaacattttgctactcggaattagtagataataataagtattcatcaaacattttttgttgatacatttttaggattattcgaaaaagggtaatccttcggaaatggtgtcgcgacgggaaaaagagataaaaattttcttttaactttttctagggtagaaaaatgca

SEQ ID NO: 26349 - DNA, 1472 bp, Heterodera glycines
tgtgagttctaaaaatggaaaaaatgatacttatggagtttaaagtgtatttttcacattgattgaaaatatctataaatatacttataaattaaataccctataaatatatatacctatattttaaaagacctttatattcatgttctatttttgctgaaaaaggcatttttaatggcacttttttttcatttcaacgatttacaatgttaatgatgcctaattcttttgttttgtttatctttatgatgaaaaaaaactggattttataagtatatttatagggaatttaatacgcatgtgaaaaatactattttaactccataaatgccgaaaaagtatataatatttatttattaaatatttctttaggataaattatttattttcaaatttaggtatttgtctgtccatcatcaaaaaattatcaattttttttaaatttttttgtgctcaactcggaaaaacccaaccttcttttcgaccagcttaaagaaaatgatgtataaaagaactgtagtacaaataataaggcacagtatcaaaaaaatcctttttgtattaatatgcatttctgctaaaacagttaatttaaacaaaaataagaaaaagcgcaaaatatgtacataatatgaaaaaaaaatccagaaataagtatgaaaaatataaaaaattattgcggaagaatttgttttaatataatttttttaagtcagctgaattattattgatcgtttcaattttttaattaagaaatcagaaaaatcaaatgccaacaaatatgattttaaagaaaatctatggaataaaaaaagataggatatattagtactgtctatcagcattatttgccctgtaaagtttgggttgtgtctgatgatgcacgatgggggaaacacaaatcagtggggaaaatggtcactcccccggggttggggaagtgtcgtgtggagtgggatgcggaaaacaaattaaaatattaaaaaaaaaattaattaaaattaaccaattaaaagcattcaattcaaaaaatgtcacaaaaaaaacaatgatgattttttgagtacttaccaagaaaacctatataattctttcagaaagctttggattttaaatttaaaaaattttaaactttttttatattatcaagtctttgcctggagtatcctttgaataggaaaacactagataggtagtacccgttaaaagcaggtcctcaaaaaccaggaaaagaagatatggtcccaagacggatctgggccttaggatgaaggctcaaaatttgttcttaggttagttttaggtaacaagatatacatacataaattaaaattttttatttaaaatctaggtcttggccgggtatggttatattttgccagaaagaattagctttttttggattgtagaatttattatttcttcattaaaagacacattttaatcgattgagcacataactgtgatgtttg

SEQ ID NO: 26350 - DNA, 1058 bp, Heterodera glycines
agttggcattcgcccatttaccgcagtgtccgtgctctcccttctctccgggttgtccgggctcgcccgcaccgccggggttgcctggctcgccgggctgtccggcatcgccgggtggaccttgtccgccagggtgtccgggctctccaggttggccaggttggccaggtccgccgggtttgccgggatagccaggcgggccgggcggtcccaccttgacgggtccgggcctaaatatgcattaattaactaaatatacctcccctcctctcctacttgagttctcctggtgcgcctggctgtccgggtgctccggcgtcgccgggctttccgtccggacccgctggaccgggcggaccgcgtgggccctttttgccgggatagccgggtgccccgggctctcccgctgcgccaggttggccgggtgggccctgggggccgggatgtccgttctcggccggagcacatgtttgacatctgtcatatttaggcattttgtgaatggatgaaccaccgcttctcaatggcatgcttaccctgtgccgctcggtttcggacgcggcggagcctgtgccggcgcgccaggctgtccaggtccgccgggctgtccgtcgccgccgggatttccatctgggccgggagggcctaagacgagggagggcattagttactgtccagaaaatgccatgacaggctcactgaccgggcggaccacgcggggattcgccacagccgcagcacgcgtcagcattacgcgccacgcggtggcgagtcgccgcatgcattccctgcaatttgtaaatttaattactttttgaattcacattaattgccccctaattggttgacctgagtgcgcgtcacttcgcgccaaatattgccggaacgcattttgcagaagtcaacttcggccatcatttgtgagttgatgtgctgcacgtaactatacacctgcgcaagagtggacacgtttttttatagttttaagtgattctatccggatgtaattaacgcataattatgtaattagctgcagtttggcaattaaggaaaggaat

SEQ ID NO: 26351 - DNA, 2189 bp, Heterodera glycines
agagagagagagagggagggaaatagtgaggctgagatgagaagggaaggaataattatgcagagatagtgagaaaatgaagagaggaaggatagaaagggaggagagagagagagagagagatgagaaagcgtgagaggaggaggaagtgagagagagagagagagagaggcgagagagagagaaagggtggaggggtgagaaagaaagagaaacaaattaagcatgaaaatagtgtgtatgcgtcaaatttcaaatttatttgtgtgcataaggcacaataattgcttttggttgcgtgctttttttgggcgccgcccgcgcccggcggcgcttttgcgttcactttcactttttttgcgctccgccgagcgccggcgccgccgctctctttgtgttgttctttggttttttgcgttgcgtttgttcaattttctgctgctttccttttgcccgcgaaaaatttactctcaatttttgttttgtcattgaaaaatgacggcgaaaaattgaaaagtgaaaatgggcgaaatgattagagagaaaaatgggaggaacggacgcggacggacggaacggacgaggcggggcgggaggccaacgaggcacacacacacacacacaaaatcacaacacatttgggacgaagaaattgcaaaaaaaaaaaagaaaaaaatatggggacgtttaaaaattttgtagaaataaaaaaaaaataataatttgtttgaatttaattataaagtgaaaggaatggttagagagagagaggaaattgattttgggatgaatttatgaaaaatgggaatgttatggagttaaagaattttattttatgaaattttgaaatagaaatttaaaaattttcaaattaaggtacggtaagaagagaatgaaaaataaaaattttcgaattaaggtacggtaagaagagaatgaaaaaagttttttaaattattattttatatggggaatttgtaaaaaaattgtagaaattttcaagattttgtgaaaacattaaattgaaaaaataagcaaaaaaaatatatttttttaataaaaattgaattaaaagtagcaaattataaatttaataatgacttgggttttggggtaggcagtctaattttttttccccgattcaatcacaaggtacaaaagtgtgctgcactaactgtggagaaaaaaattgataaatgataaaacgttaaaatcaaactaattaaattaaaacaaaaaatcgtagaaaaattaaatgaaagttcagcaaaaatcttaaaaattacatgaccaattgaaaaaaaaccctttgaggagccatgaaaactcttgaaatttttggaaaattttcccagtataaagaattatttttaaggacgtccttggataaaagaacaaatcctaagtttcaccttttttatagtatgaaaaagcttggattaatttaaattgaacgaaaatgtaaaaatttataaaatatttaatttaaaaaaagttttgaaattaaattttcctccgtattttttaaaatgccttattagcagcatacagttttatttctgtgggatttggcctgcgactgatgactgactgctgctggtgaacaaataatgggaggccattctcaaatcagcacacaaatttatccccaattattttttaaataaaaaaacgaacaaaaaaattttctgccaaaaatgctcaataattaattatttgtgagtgtttatgtttaatgaaaaaaagtaattaataaatttccaaaaataaataattttttgttggggatttttattttggggctgattttagcttttgtttgcttaaattttaaatttaaatagaaaataaaagataaaaataaatatttgaattttaattgaggtttaaaattaataattattaatttaaattaaaaaaataaaataatcatttttaaatttcttgaatcgacttttactatattttaaagcaatttataataaaaattgcaatttggaattaatcataggaacaaggacacaaaactaactaactgttgacgataatcggattaaatatataatattttaaaaaataatttccaatttttttttcttcataattaggtccattgattatttccattgattatgttttatttcctttatagttatcttcttctttttcattttcgaagaaagcttcag

SEQ ID NO: 26352 - DNA, 2108 bp, Heterodera glycines
  unsure (1)..(2108): unsure at all n locations
agaaatgagaaagttatgggggctcaaaaacccgtaaagtcttatgccagttttgttatttttattaattcccncaactttgcatttggatctgctctatccaatggtatatcttttaagacgttctccgacttacagctgggaatgttaaatcncaatnccatgcgcactttgattccccttttccctttattagctcaaaagcgaaaatctagcagtttttggtgaaaatcctntaacaaattacacccaaactttctaattcaccgacggcgcctatcggcatcgccagatctcccttgtctccaaaagttttggaaaaagtgcgctattgtcggcgatttacatgacttatccccttcataaaattaggtgatgatcccccccncccggttcaccccaaaacacagccgcagaaacacagcagagacataacacatcctggaaaaaattaaaaaattttcatgaaaaaatcttaaaaaattattcttagaaaattcaagggaaaaaaataaaaaacttccagcgatttttttgaaaattttttttaaaattttttcccggctgttatgtctcggctgtgtttcggcgactgtgttttgtcatttgtcctgttccatatccccccccccctccagactcgttcgtaatctaccagaacccctcccccttttaacgtatgattcagttcacaaattaaggcgaggctatcgcaatcccgtacttttgttgcaccccctcggcggttggacaaaggacgatgacgtgccattgaaggcatgttttgggggcaatttattttttaattgtttttgtttgaggttcgaattgcgcaacacgaagcagtgttgaaggagaatgttttggacgctgattgggtaggatttgggcagtattatatattttttaagtcttataaattgctcaaaatttcccattttttgtgaactcagaatcagccggttattggcccggttgttatttcgcacctttagactgttttggccatttttccttctccgatgctttacgcagggcccactgaggtgcaatggcacgcccgagcaagattggcatgtggcgtgaacgcttacattgtcggacgcgatccggcaggcatacaaaatccacgtactggcgattatttgtacgaaccaagccatggcgcaaaagttagtcaaggaaagattgtggcgccaccggcaccgctggatccctccccttccccatagttttaaataaacacccgcaaaaaagtggcctaaaaaggaaaaggcgtctttcccccgtaaatttaggcttctacccctcccccttttttaccactattaacttatgtgtcgaccaacatcgtcaatttttattgcattactattccttaaaggttctctcaatgactaccggtttggtcggcctggagataatcccatttcgtgtcgcagcttacgattcttttgcgggagccatggcattttacgacccaaaccggcacgataatttcatgtttatcagtggaactatgatgagaaagttagcgagggaaggacgacagccaccggagggatttatgcccccaaaggcgtgggaagtatgacgaagaaacttttggtgtttcataacgaattatttgctaaacaggtactttcgaattactatcgtactcaaaatggaaatgagcataacgacgccccaacggaagacgcgcggaagaacggcagcacggggaaataaaggaaggaaatcattaattttatttattcgccagttcaaatcccgccattttgtaaattgttcaatgtcaaacgctttgattccccatttaattctctgttcatcttttaaacatccaagtttcgcaatgtaatgtacataaatgtcagctctgaaaattttgctttgtcagtcctgtacattcaggttacccgcacttttgcgtcccggacatttgcggcccgacatttgcgtcctggacatttgcggcccgtttcttaagggccattttcggacatttgcggcttcgtgtaacatattcattatccaattttttagaatcgaaattcaaaaaaaaacgataaaccaactgtacataattatttccctattatcca

SEQ ID NO: 26353 - DNA, 1330 bp, Heterodera glycines
caccttcataacaagtttgataaagtccaaatgcaaaacaaattatttcacttcatttgaataatttaataatatcaaaaactgtcatatgttgatcaatcaaaattcacgtccccccgcccatcagaaatttgaatttcccctcatctgtcacttcgctgaccaatcaaattccccctccccctcggctgtcactttttaaatcaatcaaattttatgtcaaaaaaagtacaagacaatttgaaaccgttcaataggtttgggtccccccaattaattaattaattgacaccccaccccacaccctacggctgaccaattagtgccctcttgactgctgaccaattagtaccccccccccaattagtgactaattgacacccctccccccgccacctgtcacttctaattagtgtcaatctacagaggtcccgggtgtgttactactactatcggtcactagaaatcactattttggcgtatcgtcagtcatcatttattaattttgattcacgtttaggtgcgtcggctgcgccataaactcagcaacgaacacaagggagtgactgtggacaccgtggagcgttaccagggtttccagcgtcgggtgatcattgtcagcactgttcggaacaacgaaaaggaggacattggctttttgatgtcggacaaggttgtttaatccagttctaaaaacttggtgttaatttcaacgcttagcgtttcaacacaataatcactcgtgcggaagagcttttgatcatcgtcggaaatgccaaagtgatgatgagggactcgtcttggaaggagttcgttttgaaatatcatttttcctaccaaaatgaattaatttttttatccttttacaggatgatcgactattgccgcaaaaacggtgccacagttgacatgccatcggaagcggagcttttcctacactgactgatgggggcccaaagaccgaaccgacgggcggggatatggacgattatcgctttttaattttaaagaatgtattccttttcttcaccgctttatatcaaattttctctcattggtattttttgaagaatgcataaacaaaatcgtccccattttataatacataattaccaattaatcaattgactgcctggcaatcatcaagaattggtgtcccgacgaaaaaaaatgttaaaattttggcaggtattttttctaggcttaaaaaatgcgccgatcacgaatctgagctcagattttgaaaatcattgatttttatctaagatttttcgtcaactacttgatttttttcaattttttaaattatttttaaaaaaattttagcaat

SEQ ID NO: 26354 - DNA, 1272 bp, Heterodera glycines
accaacacaacaaaacacgacatacaaattttgaattccccagaagagcctaatgaaactcttttgcatgtactgcttttttctcattatcttcttgcatttcctgtgtttttgcttttttggttcgttttaattcggtggcttaaaagtcacggtcacctctcgcccagcgaggccgagacagtaatggaagagatgaaaaatatcccccgacacccaccaatattttttgcagcaaaatgatgcaagattagagaaaactgacactgaactctctcttcagtatgacaaaatcgataatgactcatgctgatggagcattctcaaagctactcattctttttcatcattcattttacaaaaatgtctccaaatgaatgttctgaccgtccctttcaacaacccgacaatgtacaacagccgcatcgacaaccagatgaagacgccgagttgcgcgcacaaattgaagacgcggaagaggatttgctcttgaattggtggcgtgaagatccgacaattgtaagcttgtttttcaatttagcatttttaatttcttcacgtttcagattcgttttctttttggacatggacgagcccctgccatagaagccgcgcttcttcaacgcgccgaacgtgaggcagaaattttgcgcgaatatgccgagaatcaacaacaatgagaaggggccattcagatatcatgtcgtatgttatttttcttattttttttttttattatgatgataaaaaattttacaatgcagaactgcggaggagaatggaaatggatgatggggggggggactaaaactcgcgcacccttgaccgatttacttcaaattttacgagccgtcaactcacacccccttaagctgaacggcgaaagaattttgcctctagcaccattttgagcggtagattcccgacgccccgccccctcgcgcaccccaagacttgcgcagcaaaactcgcgcaccccttgtccgattgacttcaaattttacgggcagtcaacccaccaccccataaactgaacggcgaaagaatttcgcctctagcaccattttgagcggtacattcccgacgccccgccccttcgcgcaccccaagacttgcgcagcaaaactctcgcaccccttgattgatttacttcaaattttacgagccgtcagttcaccacgccctaagctgaatgaggggggtccgcgccgacggacggcggaatgatggggggggggtccgtcgaagagaggggtcccgccgccctggtgg

SEQ ID NO: 26355 - DNA, 757 bp, Heterodera glycines
tctgtcactgtcgaaatcagccactgtcgggaatgtcggaaaacagcaaaataaatgaaaatagttcactgtcgaaatcagtcactgtcgaacgaaatcggtcagtgtcgaattcagccactgtcgaaatttcctggcacgttcaatcaaattgccctctaaagtcttggagtaaaaactcgcaatattttaaccactaaagaatcaaatagatttgtttttctcgccttacgcaaccatttcgaaatatttcgccggcgtttgtggcaattcgacactagaaaagtgattttgttggttttagaaccttagcgtccaagtaatgaggtacaattaaatcctaatttatgattaaaattccgcatagagttcaataaataattttcattgggagaccgaaattttttgattgtacaccgtaaccctttaaagtccaatggcccaaataggacgataatccttggcaaaattagcctttcagtatttacgaaccttttctgctgctaatggctacctttaaatcttcagcaaggagaacactgtgctgcgggcgggcgtcgcaccccagcgcgttttcgtcattccgaacgccattgactcggcactgttcacgcccgatccggcccttttcgcgtgccaaaagcgcacaactgtggtggtgctcagccgactcgtctaccggaagggcgccgatttgttggtggaagtgatcccggacatttgtgaacggcacccaaccggtgattataattaatta

SEQ ID NO: 26356 - DNA, 1643 bp, Heterodera glycines
gcgagcgcctcttggtttgggatgcgtttggcagccacaagagcgagagcgacgaaggtggtgaagggattgggagtggaaacagtttttatccctggcggctgcaccaaattcatgcaggtaccaaagcatccttctcattaaaattcacttttcttccctaggctcccgatgtctcgtggaacaagccgttcaaggagcgaattcggcatttctacaacacttggatgtccaatgatgcagaaaaagagttcacaccggcaggcaacccgaaggcaccagcgcttcacatggcacttgactggatccaccgatcgtggcaggaaatttccaaagccgtgatcatcaaatcattcgagggtcagtttaaaaataaaaatgcctacgaaagacgccgaaacttttaagtctgcgggttgactacgccattggacggaacaggagacgaaaaaattgcttgcttcaagccggaaggagcaattggaccgattgggatcaaatttttgcgcgactttagagcaaatgagacgatgaaagatggacgaaatgatcacgaagaagccggcctatctgatgatgatgatgtagagttggatgcagtcggagatgttgatgaatttttcgtttgttaagttttttttatttactgttgatttggttttgttttttgaaaaaaattggtgccaaacaatttcttaaaattctatttatatcccatgggggataaatagagactgggggattatttttcgaactcctcagaaagggggggataattggagactgcgaaattaatagagactgggctataattagagcaaatacggtatgcatgaaaaatacataaaacccaaaatatgcaaataaaagtcccgatttttatacgcaaacataaaaaagaaagtgtttttcctattattaagagcatgaagaagccaggaaaaaatatgcatttgcatgttttttgcagtcctgataatgacaaattaaaatgacaaattgcgaaatttttgatttaaatgaattaattagtagggagggatacgatttttaggcaaaagcctattttttcctaacaaataagctccccgtggcctgaaacgcacgaatgtgttttttcgggctgttgttaagctacttttcgagttattagtgcctattttctaggcttttatttttagcgcctaaaaagcctaaaaatttttgaaagagcctattttgcctattttggcgttttgtccaaaatttgttaacaaaaatcaataaaaacgaaaaatacacccctacacacgatcccaaaaaacgagatgtgtaccaataaatagagaatgccagagaaaaacattatctttttttctctaattttttgtctccttttggcgtactatctaatattttcattattaggaaaaacaacatttatttcgccacatataacttttccggcacaaattcgcgcactacatgccaaagaagggccagaagcggaaggagtggaaggaagctgaggatgggctcctgctgcttgcccagcttgggacacatatggcttacaaacggatgaaggcgactctgaggctgatcaacaggcgatttgacactttccccacccattgataaaggtacagtttttcagaattttt

SEQ ID NO: 26357 - DNA, 818 bp, Heterodera glycines
gaccaaattggggcgtgccaacctcccctccccccccccccacttggcttggccttcaaacccggcaatccctcggctggcgctaataaggcgggaaaacaatcgccaattgaattagcatcggaagaagccaaagacggacagcaggcgaatgaatgaatgccttcaacaatctctttgtccaagatgacttgagcccaccctttcgtttgcttttgtttttcttttggttactgttactttgccaacgattatttgatgagtaaactttcataaattacgatactcacaatcatttcaaaatcaattggttaataaattatattagggtttatattttttgataaaaaaactgccaaaatgttagtttttaggttcttaaaaaccccaaaaataggtacaaaaatgggaaaaaggtgccaaaaagcttcaaaattaaggtgtaaaaaaccgaaattttaagtaaatttgaaaaattatttggtcacttattaaaaaagagtataaaactatttaatttcactaataccaaaattcctaaacacttcttattttaggatttgggttttttgtgatcgagaaatggtttttatttattattataattttgtgtttcgaaattcaattgttaaatttaaaaaaagtctcggtctcgggatttttagtctcgagtcgtagggttgagtcttggtcagggaggtcagtctcgagaaattttcagactcgaacacactattatcggtactcccgaaccttaaataattattttaggttaaaaaaataattaaaatataattttttaaaatatttttttatta

SEQ ID NO: 26358 - DNA, 1752 bp, Heterodera glycines
ctctttttaggacaattttctatctcgtaaccccgatgctaatccgttccggagagcctcttcaaaattttttccattaccctaagagctgcggaaattgtgaattaattctcagaaaaatggctatctctttttaggacaattttctatctcgtaaccccgatgctaatccgttccggagagcctcttcaaaattttttccattaccctaagagctgcggaaattgtgaattaattctcagaaaaatggctatctctttttaggacaattttctatctcgtaaccccgatgctaatccgttccggagagcctcttcaaaattttttccattaccctaagagctgcggaaattgtgaattaattctcagaaaaatggctatctctttttaggacaattttctatctcgtaaccccgatgctaatccgttccggagagcctcttcaaaattttttccttaccctaagagctgcggaaattgtgaattaattctcagaaaaatggctatctctttttaggacaattttctatctcgtaaccccgatgctaatccgttccggagagcctcttcaaaattttttccattaccctaagagctgcggaaattgtgaattaattctcagaaaaatggctatctctttttaggacaattttctatctcgtaactccgatgctaatccgttccggagagcctcttcaaaattttttccattaccctaagagctgcggaaattgtgaattaattctcagaaaaatggttatctctaattaggacaattttttatgtagaacctcgattctaaacctgttggaattattggcatggcaacggacggatggattatggaggagagggaaaggatggcattgccgggcgcggggcttgaccgccggcgcagggctacggacagccgaccgaagcgagtggacagtcagacaatccgtcgacgttaaaatggcaaaaaatggtcaaaagaaacttttaccgcactcatcgcccaccaaattagcctttcacttgctattaattgtcctcaacggtaaaatttcggcctcaccgatgggtcggtggaataaataattttgaaaagaataattaaataattaattatttctttagccgaaagaccaccgacagaattcatcgtccaaatgggcaattttaatatttattttattaaattatataatttatttatttattcatccattctttgttatcttaaacagaactcggcatcgaccgtgccgaggatgtgggcgcaaatgctgggcaaatagcacgccgtttagagacaatttgtgccatggcattttggcgagcgatgaaatcgcatctttttgggagagggccaattgggggcgaacgaaatggcgccggcggggaaaaaacaaaaactgtggcgaaatgggacaatgagggggagaaaggcgcagtcacgctattcccttttcgagttcgagtgagcgagtggatgtgaagcaaaattgggggacaaaaacctaaattatctgccgagggatggttaatggaaagaaaatagtgaagtggtgaaaaagggaacagtgaaatttggagagagaatagagagggggagcgagaaagaaagagagaggagagggaaagaggggagagaaagaggtagagagaggagagggaaagaggggagagaaagagaggggaaagagagagcgaaagaaagagagagagagaggagagggaaagggggagagaaagaggtagagagaggag

SEQ ID NO: 26359 - DNA, 1206 bp, Heterodera glycines
  unsure (1)..(1206): unsure at all n locations
attttacctaaattcatcagaacctaaggcttctaaaataaaacgaaaattagttacatatgntcgaaaggacactaatttcagcgaattattcnatagtgttgcacaagtctataacaaactatttgccatgctttctaaaggataaaatattactagtttttgctccaagattctatagggctaattgtatcgcgagcgaatagcctaatggcgaaacctgcataattaaacgaagcaagtagtaacagaaaagcttcgttgattctgagaggcgaatctcgccaaggattatcgtcctcttttttgcccttggaccattcggggttgtagtgcagaaagaaacaattgcgatttaccacctgttaattgctttttgacccttattcataattttaataataaattagaacttaattttacctaattcatcagaacctaaggttctaaaataaacgaaattaattttatattgtcgaaaggacattaatttcagcgaattatttcatagttgttgcacaagtctataacaaactattttgcatgctttctaaaggataaaatattactagtttttgctccaagtttctatagggctaattgtatcgcgagcgaatagcctaatggcgaaacctgcataattaaacgaagcaagtagtaacagaaaagctgtgttgattctgagaggcgaatttcgccaaagattatcgtcctcttttttgcccttggatcattcggggttgtagtgcagaaagaaacaatttgcgatttaccacctgttaattgctttttgacccttattcataattttaataataaattagaacttaattttacctaattcatcagaacctaaggttctaaaataaacgaaattaatttcatattgtcgaaaggacattaatttcagcgaattatttcatagttgttgcacaagtctataacaaactattttgcatgctttctaaaggataaaatattactagtttttgctccaagtttatatagggctaattgtatcgcgagcgaatagcctaatggcgaaacctgcataattaaacgaagaagtagtaacagaaaagcttcgttgattctgagaggcgaatctcgccaaggattatcgtcctcttttttgcccttggaccattcggggttgtagtgcagaaagaaacaattgcgatttaccacctgttaattgctttttga

SEQ ID NO: 26360 - DNA, 1800 bp, Heterodera glycines
  unsure (1)..(1800): unsure at all n locations
gtaaaatgagttggtaatgccccgcagcacaattaaaatgagcatcatccatgttttgctgactcgtaaacgnntcatgaaaccgacgtttctttctttatnttcttcctataaaaataaagcaacaaaaaaattattaattntaactttttttattttcgtaaattttctctttaaaattaaaaaaagttattaattaaaagtttgtttcacccttttctgctgttcctccattttgccctcttcaatgttttgcatcgtttttttgtgcaattcgtcttcataaacgagtgccgttggaaacggtgccaaagcgacaaaagcaaatgccatcagtgccatcgctgtgcccatcacaaaattaggcagcataaatccgccaatttcatacaatgaggcgccaaaaattggccctgagatttggccaacgccttcaaatgtttccaaaatactctaaaacaaattaaaaagcatttaaaaatttattattttaaattaatattttaaggagtgaaatttttattattaaatatttaattttcttacgcctatcaacgacacgtgttcaggaaaaagttcagctgaaagtgtgaaaatactcagcacaaaaaatgtccgaccaacagcttggaaaaaacggatgaccaaagaacacaaaaagaaagtcaaattgctgtgcaaaaaggtgagaaacctaaacacaaatttaaataaaaattaataaataattaaaaaaaataacacacccaaaacaaattgctgacccggacacaagaaaaagtgcggtgtaaaatgtaaattttgttccaatttttacaatctaaaaatggaatttattgtatgtatgtgcctttaaaaaattatatcatttacataatttccgataattggtgccatgaaaaatctgcttaattggtatatgccgatcactaggccaatatggcctcgatcaatgcctcgagaaatggcctaaaaatagaataattactcgcccaaatattttaatttattcaaaaaatattaattagacaataactatttacttctttggggtaaattgtttccatgcaattaattgtaattgtgttaatgaatgttgcggtcaaaaatacgctgaccaatgtcagttcatggccattaagcgaattgagcagtgatttggcatattggccatagcttttcattattagcataataatataattgtattttcaaattgatttctgccgtctgtccaaagaaagaatacaattaattaatgggacataattacttcttaaaatgaacgcctaattaggaataacattcacccaactgttcgccaatttatgaccttattaattaatgtcagtatcagccgcaccaaatctttttcattttaatgtgggcggatcccaaaaaagtaatcggatcacatttgaaacgatgttctcgagttatacaggggatggatgatggtaatgaagatggatcttgcaattaattttcgataattgattcatcaatcgctttgctactcatccgccgctctgatcataaaaggaacacatgtgatctgaggagcagccgaacagaaactatcaaaaagtttgtttttggattttgtgattaaaataaattatagtttgatgataattaggtacttttccgttttggggccaaagtttgattttttttttttaaatcagcagcgggcgcgaagaattttatattaatctccgctcccattgcataaatatccaaaaccttggcgcagaccccttcgaagagatcttagatcaaattgacgcatttatgcct

SEQ ID NO: 26361 - DNA, 964 bp, Heterodera glycines
tatatcatcatttaaataataaaaattaaaacaaaattatttaagctaaatacaaaacacattacaataaaacagcaaaaataattaaaagaaaaaatatataaataaattttaaatttgtgaaatggagtaaatatttttattataactttagacataccgtattttcaaaaaattttcactaataattagtcgaaaattaatccccccgtctacatttattccccatatctaataatccccccccccatctttctgaggaggttcaacaataattccgccgggggggggtgggataattagagatatacgttattataaaattttaaaaaaaagttaatcgattatttttttgatttttaacaaaattttaataactacaatgaattaaataaaatcttataaaaacaaaatagtgatgcgattcattacaaataaatagtactctccttgaattacttaaataaatttcattaaatataataattaactaaaaaatatttacaaactaaaaaatatttataacaaatattttttttaatttaataaataaaataaaacataaaatataattttagcaaaaaaatcacgcgatatttttatggttatatatttaatatcattaaaattactttatttaattattgaaaaagcctttttattataatttttaatatccttataatttatatatttttttattaaaaattatataaaaaataataatataatcattttatggcttccttttaattttgacattttcttttttttcatgacgaggccaattctatttatatcaacagttggtacatattttagtttttatttattttcataacattttttagcaagttaattttttcgttttcaacatgattttatttgaaaaaatgaaatatatttatattaggaatttattataaatttttttgcataattgaatcaaatgactattattctg

SEQ ID NO: 26362 - DNA, 1036 bp, Heterodera glycines
  unsure (1)..(1036): unsure at all n locations
tttttaattttcaaaacaaatatatattgcgttaaaaaaatgcaaaaaatcaaaagaacagggttcataggatataaataaaattaaatatactattaaatataaatttctcaaaaacctaaaaaatatgtataaaaaattatttttgcatgcataaagcaagcagtttagtgaataaggttttttagtgaacatattctttgatctcttattatatactattatcattaaattaatatttatagtaattaattaatttttatatagaaaacaataaaaaaatatttattttctgcaatttacaaataaattcgacctttaacagtttataaatttaattcaaattaaatacattctaatttctattggctctggctaaatcaaacacagaaaaataaataaataataatgtagttgcattaaaatgttttttttgctaatgaaatattaaaaataataaattacttaattaataaaaatttaatttttgattaaatggaaaattattcatttaaaaaaaattaataatattactttgtaaaatgaaaagaaaaattctaaaaaaataatttagcaatattaatagatttattattataataatgttaaaattaaaattccctatccccgggaacatttttctttcttggttcatcaagaagcacaaatattaatacattttgataaaatccgggcactggttagaccatgctaagtccaaatatattctttatttgtaaaaaaatactattattattcattagttaaattgattgaaattcttaaacaaaaattatgttcgatcaaagcaagaactaaatgtaatgaatggaaagaatattgttattaattcaaaaatagatttcttttaaattaaagtaaaaatggcttcttagctgataataaagaaatacaaaattaataattttatttttaaagatttatttttaagttggcattgctttccttataatagaatgccataataatattaagaaaaattatttatttacaagaccnntgcaggcccatgcaa

SEQ ID NO: 26363 - DNA, 978 bp, Heterodera glycines
agccacaccttgatctgacgcaaaagaaggcagatgacgcggaaaagccaccacattttgttgatccgcatgttccaacgaaggctcaggttgaggagacacagccacaccttgaattgaaggaaaagtcaatgaatgttgtggtagtcatcagttaaggagccacaccttgatctgacgcaaaagaaggcagatgacgcggaaaagccaccacattttgttgatccgcatgttccaacgaaggctcaggttgaggagacacagccacaccttgaattgaaggaaaagtcaatgaatgttgtggtagtcatcagttaaggagccacaccttgatctgacgcaaaagaaggcagatgacgcggaaaagccaccacattttgttgatccgcatgttccaacgaaggctcaggttgaggagacacagccacaccttgaattgaaggaaaagtcaatgaatgttgtggtagtcatcagttaaggagccacaccttgatctgacgcaaaagaaggcagatgacgcggaaaagccaccacattttgttgatccgcatgttccaacgaaggctcaggttgaggagacacagccacaccttgaattgaaggaaaagtcaatgaatgttgtggtagtcatcagttaaggagccacaccttgatctgacgcaaaagaaggcagatgacgcggaaaagccaccacattttgttgatccgcatgttccaacgaaggctcaggttgaggagacacagccacaccttgaattgaaggaaaagtcaatgaatgttgtggtagtcatcagttaaggagccacaccttgatctgacgcaaaagaaggcagatgacgcggaaaagccaccacattttgttgatccgcatgttccaacgaaggctcaggttgaggagacacagccacaccttgaattgaaggaaaagtcaatgaatgttgtggtagtcatcagttaaggagccacaccttgatctga

SEQ ID NO: 26364 - DNA, 2067 bp, Heterodera glycines
  unsure (1)..(2067): unsure at all n locations
ttttgtattttttatgcctttttcacattttggtgcctttttaggtgcctatttgagaaattttcgtgcctaaaagtccggtctctaataattacacattgattcataaaatattttatgtgtccagcaaaataagaatattaattaggcggacagttcgtcagaaacttaacattcagtttgatcatataaagaactattttttaagtttaatatagccaatcttaggaaacgcaaaaaagttcgctctgaaaaaacccgcgaccgatactctcgagcatcactaattagtaccctcttgaagaactccagcgccgaagcttttaaagtgaggtcgagttttttgaaaaaatcaaaatttttgacaaacttcaccaaaaaggaaattataatcgaatgaattataagacagaaaagtttaataaaagcgaaaagataggtgaccattattagcgcaagtgtgaaagaaaattatgtggtgactttaattgttggtgacgtgaacaaccagcaatgctgctgctggtatttatagatagccgtcccgtccccgtggacgaggccgggggtggggctcgaactctaataaaatttacagatcctaacgattttacccaaaagcctcaaatcctaatttcaaaaaaaccatcattgacctataaaaaaaccacaaaatgaggataaatcctcagatctgtaatggtaaaaaattaaccaattacagattaacaaaaattatttctcaattaaacaaaggtttgattggtctttgacaattgatcactgatcagaagaaatttccgcggtcttccggcttcgtgtcgcagcattttcgcgcattgcaatggcaattggtcttcgccttataacaatagcaaatgtcgtccaaatgcatttgcttcccgcactttttacagacgaatttcgactccaacgccttaacgaaaatttaatggtaatttaatattagttttacaaaatagtcgtaagaatctggccgtaaatcttattggcaggtctgccaactgaaaattccaaaaaagctttgaaaattgaaaatcaaacccaaaaattcctaatttttaatagaattaaataatcgaaaattcaatttgatcataaagccaattaaacaaacacaaaattttagggtagccaagtttcttgtgaagaagtcggtgaacccatgaaatgaaagtgtacttttttgtaggccaacatcatgtcgtccagcgcataattcccggcgattttgaccaaatggttcagcaaagacaagtcagcttaatgaaaaatagcatatttaaaatcaattccaattaaataaaagcatatgaacttaatttttaaatttaaatcgtccgtgaccttttgttctgctccaaaggatggagcgacccacattactaatttaataattgatgagtgcgaatgatcaaaattaattaattcttttaaattgccatttttttttgctgcactcactccgtcccattgctccgcgtatctcagcaccacttttcgggagcatctgaatcagatcaacaatctcctgacagtcgcgctttttgagaaccacactgaacggctcgaacaccatgtccatttgatggtccttgggtttttgattatatacagtacagtgtcactattatgcccgctgtaaaatgctataccaaatgcccaatgacttggaaacatttaatatcgtaggaaatttttacaacgaattttcacttgcctcgtccatcatgctgctgctgttcccggagtggccaaggagcacatctttggcattcgtgatcagcttagataaaagaaatttcagttgatttttaaaatatttttgaatttagattaattgtttagttacagtaactcttgtcactggtcctaccataaataatttgtcgctgcattggttgtttttatccgggtgaatgacacggacaagctttcgatagttttcgctaatctcctcgggaagggcattttgacgcacgcaaagccattcntcctgactcttaagggcgataagcaaataaaataaaacgtaataaaagttca

SEQ ID NO: 26365 - DNA, 1608 bp, Heterodera glycines
acagagaaagggtgagaagaggcaacaaacagagaaaccgctagagagagagaggagagagagagagatagagagagggagagacaaacagagaagcagagacaaagagatagagaacgagagagaaaagacaaaaacgttttcgtcattcgcactcaccgtaaagagtggttacgcaccgaaacggcgttgttcgggatcagaacgtgtggcgacgatcgccaaagtttcgccccgtttcctcggcacagccaagcggtcacctaacaaaagatccgatggcttttctctctttgctccttcggccaacttttcgcttcgccttcctcagccgatgcttttgcctcagctgaatgtccaattcctctcggaaacgcatggcatccaaaagcgtctccaattcggcggatgaacgcgaacgactaatggaacggaccataagggcgaaaatgacgaaggaaaactgagggagagagggggaaagatcaatcggacgaacgaacggcggagggacggaccatcagcagaatggcgatggtgtacagctaaagtgatcggggttagcaaggagcaacgggacgaaggccatgatgatcagaccattcggccgacgtcggaatgaaagtccatcgaattgatcggccgaaactctgcctttgcttccaaaggccgacttctgacaaatgtatttgcccgatcaaaacattttgcatttccttccaaacccattaatagcacaaaatgactccaattttgccatacattggcaaacatttgctccaattttgtcgctttcgtttcttcgacttccattttggctcaaaaacgcatttttatgtgataatgataaaaacgttgttgataaattgtggaaagagccgaatagaaattgttttactgtgtcgttgttggaagagaaaagcttcatttggcaaattttgagaataaattttgaaagggagaagagaggagaacggcacactttcagggcaaacgaaggaaaagaaatcaatggacgagagataatgacagataatgaggtatttaggaggaggggggggggagagggaacgaggcagacgagggaatggcgggcggagaaacgatggcacggcacaccccccggggcgaactctgtagcatttgacaatgaagccaatagaaaatacaataattgaaaagcgaaggcagtaattaaaaaatgaaagaaaagaaaaaaaatgggttggcaaaattattagcgaattgaacaccaaaaatggcaaaaaattgcaaattggcacagcgggaaatttacaaagtgacagcaaaacaaatcaaacgaacgcaacatttatttaatttattttttaccgttcccaacaaaaaatcagagaaacaaacggccaaaagagagaaaagggacggcgacagcaaaagcaaaacccaaaaaaacattgagaaaagaaccaaagggcggcggatcggacaaataaaagcgatgccttttcaggtgccgaaatggcaggcgaaagagtgaataggcccattcacattgtgctccccccctcagcaaataaaaccttgcaaattgccatcaattaacaaaatgaaaaatggcaaatgctc

SEQ ID NO: 26366 - DNA, 1535 bp, Heterodera glycines
  unsure (1)..(1535): unsure at all n locations
acgcacacgtggaccttccctctagggatgtggttcagcataggacctgctcctcggggattgtggttcggaaaaggacctgccccgtcgggtgattgtcgtccgaaaggtttacaaaggtttccttatcgttactggccaacatccggtgcgaagctggtcccgcactttgccaagaccagtggacttgtctaggtagcgaagctcccaaagcgcgaagcgctttttcccagctaaatagccgacggttcacgcacccgctagttactatatatgttatattgacaaggagtttcgttgctaaaaccattttctcccggccgaaggccgggagcgccctgaaagtagtggaagggtcttacaactttttgaggagcatccgggaaaaatataggttttcaggtccaagggccaactgagtaccagggactgatttctcattttttcgtgcgtttgacggcccctaactttttttgtaaaactcgaatcaaaaagtgcccgctgtgagggcactccaccaaagtgtcctctaaatgctggtattttttaaaattttttttgatcaaacccctggcctgcaaaaaatggcaactgaagcgtgctcaaaaagtacacttcagtaccaggtgaataccgcgccagggtttgatctgagcggggggtggccagcgaacttattgtagagctttggaagctcgattttttgaaattttaaaatttcgaaaattttcaaaatttttcaagttaggcctaaaaaacggttttcgggtttttgaattttatgattttttaacgaattttcccgggaaaacgaagaccacttccaaaacatagtttttcgagctctatcgattggtaatttttttggaaaaatttcgattttttcccggaaatagaaaaaattttcggcctcagcgggacatttgagtcctgggcccataactcgtcaggggttgattttagcgaaaaattgtcttagaacatttttgtagagcattttaaatgctatcgaatggtgtactacatgatgtaaaattttcaaacattttcgagctaggccccctagaaattttcaaaaatttttttggggtcgaaaaagggtgtgaaaaatatttttctgggctattttgatgtgctgagcacgaatatgatgtttatttttcgtttcaaaatttttggaattttttaaaaattctttattttttggcaattttttggcccttggaaatttgggctaatattggaaaattcatatctagcctaagggttgaccaattttgagcaaataaagctttaaaaatagagaaaaatcaggagaattttatgggatttatttaggttttctaacatcaatatgaaaaaagttattccagaaattctggaaattttagatttttcagaaaaaaattcgtaactgccttctgaaaagctatttgagaaaagtaaaatactacaaaaatccgcaatttttttctctataatataaattntattttacatttttatcacatttttaaaaaaagatataaaaataa

SEQ ID NO: 26367 - DNA, 1325 bp, Heterodera glycines
  unsure (1)..(1325): unsure at all n locations
ctagggttaggcaaggggctatataaatgtcgtattggtattcagcgaccccgaaaanccctaaaatagacccattctccggctttttatgagttttttagacttttggacaattcgtgggtttttactcttttggacaattcgtggcttggacaattcgtggcttggacaattcgtggcttggacaatttgtgggtcagcgcatttttcatcgcaaatttcattcaaaatttgtgaaattttcccggcaccgccgtaccctcctccaagttcccaaaaagtttttgaaaaaatcgcgctgtaaaaaacgtgtaaatagtcactccttttcccaaaaatgttctaaaataatgaaaaatgacaaaaaaagattttgataaaataattgaataattttttcaagcgaatatactaaaaacatttgtgaaataccttttacttggttaagaattaaaaaatttagcctattaaaatatttagaaatttttttattatattgtatattttttgaaaaatttccgatttcttgcaccgcaaaaaagtgggtttgaaaagaaaaaaatagtcaaatttatgaaccgttaataatttgatttccgatcaactttttaccgtcggatccaatcgaaaaatcttagtcgacccatcagccccttttaatgcatcccgccagctgctaaaaatttatttttcagcattttttgatttttggaaatttattgaatttaattgaaattttttcgaattttccaaaatcccgcaatcccgcacgggatcccgcaaattttaaatgcgggatttgcgggattaatcccgcgggatcccgtcccgcaaaaaattttgagttccagtcccgcagcgggatccgcaaatttgaaatttccggtctctagtgtaaagtaagaataacccaaaaattttcaaatgaatttcctgtcaaagtcaaatcaggagtcccacaagggtcggttttaggacctattttatttttaatttacattaatgacttacctgaaaaaattccaaaagaaatctcaattaaactttttgcagatgatacaaaaatttatcattgctattcaaatgaatcccaacgtaaagttttagaaacagccctaatttcagtcttttactgggctgaaacatggggcttaaatttttcagtaaaaaatcttccgtcttatatttaggtaaaaataacaaaaaaaataccgtacacaattaaaaatgcaactattcctgaatcaaaaattatccgtgatttaggcattctaatcgataacaaactcaaattcgacggacatgtttcaataattctccaaaaa

SEQ ID NO: 26368 - DNA, 1090 bp, Heterodera glycines
  unsure (1)..(1090): unsure at all n locations
aaaatatgaaaaaaatngtaacttaaattaaaaaattttaaacgcattaaattattactattaattacactacatttaatattcgtttttaaaattcagatttntacatttactcaattccttgatataatgattactggattttgtgcgcgaaacattctaattcttgcgaggtcagccaagtactttgtgaccgtaaaatggttaatgaaattagtttgcacttcaaaaaaatgaggtttgctcctgtcacaaaaaaaaacgtaatttttaaaatatatcgtaaaaaaaaaaaatgttcatgaaggattgttttagagaatatccgctattgcatgtactataacacaagtctgtatgatagcttttagtaaagttattacgggttttatttgacagagatcaaaaataacaacatttcgaccccccttggagtaaccccctgtctggaaatgtcttcctgatcatttttgtagagttcgaacaatgttcgacttttcgaccttttgttcgaactttttattttcaataacccagggctcccagtcactgtacaaacatttaaagtctcttttgaggtcttacaagtgctctgtgagcgaaaataacaaatgaaatttgttcgaactccaaaaagtgggtctaaacgtcgttttggagcaaaaataacaacatttcgaccccccttggagtaaccccctgtctggaaatgtcttcctgatcatttttgtagagttcgaacaatgttcgacttttcgaccttttgttcgaactttttattttcaataacccagggctcccagtcactgtacaaacatttaaagtctcttttgaggtcttacaagtgctctgtgagcgaaaataacaaatgaaatttgttcgaactccaaaaagtgggtctaaacgtcgttttggagcaaaaataacaacatttcgaccccccttggagtaaccccctgtctggaaatgtcttcctgatcatttttgtagagttcgaacaatgttcgacttttcgacattttgttcgaactcgttattttggtctgaaaagggttcccagtcattgcgcaagtatttatgacgctttatt

SEQ ID NO: 26369 - DNA, 1339 bp, Heterodera glycines
tcactcttttttctctcccactcacttctctttctctcccactcactcctctttctctcccactctctcctctttctcctcccctcactcctttttctctcccactaacttctcttcctcctcctaccattcctttttccctctaactcactcttcttcctcctcttccgccacactttcctcggccccatcctcctcctcttcctcctctttactactttcttttccattgttctcattttcctttgcctccattggatgaaaccgttttgaaactgatttgatgtcaatattttcctgcaattaaattaaatttaataattttaaaatattttattaatttcttctttgatcccaccgaatttcccccctcttcgcaatggcgtcgctttgttccgccgacagttcgttgttgttgctgctgctgctgttgttgttgaactgttagtccaagttggtgctgaagatgaggaaacatttgaatggaataagcagaaaaaatcaattgctaaattaattttaaaagagtgttaattttattattaacaatttgcgtgcatttttaatcctcacaattaaaaattaaacatttaatggataaattgaacaaatcaaaggcgaagggtgattgcagagaaatgttaagtagtgacatgaaagtgtgattggctgacgaatggttgagaataaaaatttgaaaggggagaaaagtgccgaactgacaaatgaggggacaaattgatggaaaatgggaaagggaaggcacaaacaaacaaaaagaccgaattagggatgtaagttgtgtgggctaaaaatgccaaatatgggcttaaaatatacactaaaaacttcaccaaaccatacgcataaatgttaattttcagctttgcaaaaaaatatgtaagctctaatcggtcggcactttctcgtcctttattcgactcgatgttcgagaagtagcggagggagggcattcatttgatttgacaatttgacaaatattctatcattcgaaagctgttcatgaagcaaaactaattgttgctaccaatttcaccaaaaaaagagaaaataaagaaaataagttacaatcagcaacaatgagctcaaaaaagccttaattttttataataatttaatttactataattttggagatttagttcctatccctccccttcctgtaccccctccccccccccgttaccgttcctgcagatacccatcataatttgatatttatgtttatttattaaacaattaatctttttcaattaatttgtttgtgttttcgtttttaccaaaggcaaagttaaaaaattggattatttcaccgttt

SEQ ID NO: 26370 - DNA, 1730 bp, Heterodera glycines
  unsure (1)..(1730): unsure at all n locations
acgaaacaaattacccttcaattgaaagggaggctttggcattaatttatgcagttaaggaattctcgccatatatcgttgggtctggggttacaaaagtaataacggattgtagtgccttaacaggcatgatgaaagcgaaggagttaaaagggagacttgagaaatatcaagtaactctccaaagtttcgaattagaaattatttatcggcctggaaaaaagaataaagtggcagattttttgtctcgatataatataccgggaaatgaaaaagattgtgaaccaaaactggaagaaaattcagatgaatttgaatttcagccaaaaattttaagtgcaaaaaatattaatgaaaatttgattgccaaaaatgatggaattttgaatgaaaatccgagaataaccttaaaacagtgattgaggcacaaacaaaggtaaaggaattggccaaaattttctacattttaaaaaccggaaagtgtccaagtgatgttctgaaatggaaaagagttgtttctgattatagcttgataaatggagccatttatttcgtaaaaggcaaagaaaacatggagaaacctaaattaataatccctcattctttaagacaaaaactttttcttattttccattcagagggccattttggattcgaaaaaacttggcacgaaattaaagaacgattttattggatcggaatgaaagaagacgtgaaaatgctaatcgaagcatgtgaaaagtgccaaatgaggaaaattcagacaggccaggccaaatcggctccgagtgtcccacttgaaccatcaaatggcccatttcaaagaattcattgcgacttaatgggtcctttaaagaaaactgaaaaaggaaacttgtatattttcttggcgattgatagtttttaaaaatgggttatggccaaagcaatcccggatcagaaagcgaatactgtatcagaaatttttgttgaaattgtggtccatcaacattcaactcctgagattgttgtgactgatcagggaagacagttcacttcgggaattttaatgatttggcaaaaatatatggttttgagcatgtcactacaacaccatatcatcagcagtctaatggaatagctgaaggggctatgcgaatcatggctaatattatttctcaaatagtcaatgaaaaagggaataattgggatgaaattctgccgcacgctattttttcatacaatgtttcaatacatgcagctacaaaattttcgccattttttatcattaatttacgacagccaaaattgccaactgatcggttacttaaactcccatcccccgatgagcttgtgtccgatatttcggtctatacaagaattcagactgaaaaagcagctaaagcgtgggaaattgtgcgaaatgaaattttaaaagcgcaggaaaggaacaaagaagagaatgatcgcataaagaaagcgaatgaaagagaatttgaaattggtgatttagtgttgtttaaaaaagaagttttgggccataaatttgatcagcgttggctgggaccaatgcgttgttgntgggggttgaaaaagaaaagaaaaatgttgttttacagtcaattgatggaagcgctaaattaagaaaagtacatcaagaaaaagtgaaacattttaatggaccagcaattcttccntctaggcagtcagacgaaccattaaattgnngaaagtacgtagatgatccgaat

SEQ ID NO: 26371 - DNA, 1172 bp, Heterodera glycines
ttttacatttattcgatcaaaaatgtatcaaatattatatttttcacctcccatgattatcttttacaatttttggggagaaaaatagcaaatttagtgcaatttttattaaaaaaaaataaaatttttaacaaattttttacggcgcatttttccaagaaattttggagaacgggggaggggagtgggtccggcggtgccgataggcgccgtcggaaaaatttttgttatttctttgatttgttaacagattttcatcaaaaattatcaatttatgcgattttgagacaattggcgaccatttttacattcaaaaggctttttttgcgacatttttaaaaaaattttggaggttggacagtataattattagagtggtaaataatgagttcgattcgaatctataaaaaaatgttttcttttaatagtaaaaaatgcactaaatcttttgaggtgctaaaaaaaactttcatcgctaaaaatgtcaatgtaattgattgttgctaaactttatgatatttccaaattaaaatgattgtatgatgtcactctatgatgaatactagcgggtgcgtgaaccgtcggatctgggcttgggataaagcgcttcgcgcttcttgagcttcgctacctaggctgtgaagcgattcaaattgatcgaattggttggagtgatttttttgaatttttaaaaaattattaggggtttttagtccacatcgaggctcaagacgggcgcttcgcgcccgttttttagcttgttaggccgcttcgcggcctcagtcgggctcttcgcgcccgtttttcaaattttgttgggcttggacgggcgcttcgcgcacgttgtttaattttgtagaggccaaacgggcgcttcgcgcccgtatttaaatgttgttgagctcagacgaggtacaaaaattgttggaagatgtgttagaagaggtacaacagtgatcagaagagttacaacagtgattagaagaggtaaaacagtgactaaaagaggtaaacagtgattagaagaggtacaacagtgatcagaagaggtacaactgtgattaaaagaggtacaactgtgattaggagaggtacaatggtgattaaaagtgctacaacagtgatcagaaaaggaacaacggtgattagaagaggtacacctagtgattaga

SEQ ID NO: 26372 - DNA, 1002 bp, Heterodera glycines
  unsure (1)..(1002): unsure at all n locations
aaacaaaaaaatcgattttttcaagtgtccgtttggggtactcaaacatttatggggagcaaaaatccaacgcagaattaaagtacaggctatagggaagctattcccgaaggattcggtctccccataaatctgggcgcatcggttcggggggactgccccgaaaacaaaaaaatcgattttttcaagtgtccgtttggggtactcaaacaattatggggagcaaaaatccaacgcagaattaaagtacaggctatagggaagctattccggaaggattcggtctccccataaatctgggcgcatcggttcggggggactgccccgaaaacaaaaaaatcgattttttcaagtgtccgtttggggtactcaaacaattatggggagcaaaaatccaacgcagaattaaagtacaggctatagggaagctattccggaaggattcggtctccccataaatctgggcgcatcggctcggggggactgccccgaaaacaaaaaaatcgattttttcaagtgtccgtttggggtactcaaacaattatggggagcaaaaatccaacgcagaattaaagtacaggctatagggaagctattcccgaaggattcggtctccccataaatctgggcgcatcggttcggggggactgccccgaaaacaaaaaaatcgattttttcaagtgtccgtttggggtactcaaacaattatggggagcaaaaatccaacgcagaattaaagtacaggctatagggaagctattcccgaaggattcggtctccccataaatctgggcgcatcggttcggggggactgccccgaaaacaaaaataaatcgattttttcaagtgtccgtttggggtactcacacaattaagggggagcaaaaatccaacgcagaattaaagtacaggctatagtgaagcttatccggnaaaggatcagtctccccataaatctgngcgcatncggttcagggggactggccccgaaaaccaaaaaaa

SEQ ID NO: 26373 - DNA, 1560 bp, Heterodera glycines
ccccccccccccccattcgccgcccatgcaaagcccacccccaaggattttgggcgctctcgtgcatacctctaatacagagatatttatttgcattttgaatacataaaaaaggaaacgaggttgttagggcacatagccgggaggacaaaattttgccttttgggcaacagcgatgactcaccaccacatgaccaaccattcattggcattcattagccgccgcctgggacaatggcacaaacgaaacggagtggattttaacgcgaaatgcattcggagaatgctcttagagtaaatttcttaaaagcagaaagggactcgaaattatgagttttgtcccgacactcatactccaaacttgacaattgggtgaataaattcgagaactttttcttattaatcgacacctcgagactgagaatttgtggtaaaaattgaaattatgaagtccaagaaattgttcagaacatttaacatctttgcaaacagcaaaagctaggtgcaagaaattttgaaaaacaaaaaaaaactaaaattaaattttaacactaacaaaaaaaagttttaaaaatttctgaaatcaaaaacacggattccaaattaagatatgatggccctgctggtatacctaatcaagccgttttgtcctatcctgcacctttttctttcacgctttttctcgggcattccccgatgaatccacgcataaatttcccgtttcattttattcgttgcatcgatttgcctctgcttcagaacaacaggaggcaaatccacaccaatcttctgggttggattaattagcagcatagatcggtatccgattcaaatcccaatatttacacctctccccccccattttgccctcgggggttgaaaaacggccggcggatttgaatttgtggaataatttagtcgattttatctgatcaatgcaaagagaagagaatgcaagaaatgagtgagtgacccaaaattgggaggaaaattggaataaaaattgtggaggggcattcagagaaatttagggaggcggaggaaggactgagaagggcgaccacgcggaggcggaggaggacgaattggaatcggcggaatgtgctgctgcgacgtctaccgctgctgtgggcagaatttcgcagcggaaggacgccgcggggttgggcgcgaacggggcacagcagcagcggcacagccggacgccattttcactgaacggaggcgggggaaatgatgggagaaggactaggcggaggacaaaagtgacaaaaattgacagtgacaaattggcgaaatgaattaaaaattgattaaatttgttgcaaaaattggacggaagaatgggggggggggtagagttgaggtcgagctatattgcttgggcttaagcttatactttatttgaaacttcaaaatttaaaaaaagttcaaactactctggctaatgctttatttaataagggaattttaattattttattagaaatcaaaaaagttttgagaagaatgggcaaaggtgccgtttttgtgatttctgcgaaaaaaattaaaaaattt

SEQ ID NO: 26374 - DNA, 2003 bp, Heterodera glycines
tatgttagcacatatttgggggtttggcacatattttgcacatattttggcatttttgagaaaaattgcaataaaaatacaagaaaattgaaaaatacacccctaaaaatcgacttttttcctaattattaacataattttcaaattaaaaaattttttattcgattgtagaaactaatgaaatctcgaattcattaattcgtcattggatttcgaagttctctgctggaactttcaatttatagaaatgatttatcaaaaaaagacaattttaccccaaacacttcgaaatgtatttgatttgcgttgtatgggctaaaaatgataaagaatgagatttttgggaatttttatgcaaaaacacacttattttttcaatttttaacacatattttagcacatattttggcatttttgggggtttttagcacatatttcagcattttttagcacatattttattacatatttcaggatttttagcacataaaaatccggtctctactcattaccctcctctaaaactgtcagatgccccgggcaaaattagaaaatgaactaggcaaatgctgtaagctagctggatttgtaattgaattcaaattcatgcgagtcagccgattagccgccggagaatttgtgaagttgaatctgcgcgtcgataagtcagactgatcgctatcttcatgttcatttttccttttccttctccatttcttaacaccctgccacctcccccccctcctcctgcttcggctatcgccaattatggaattctgcttccagctaagggttctgctcccttactcatttgagccggttaaatatttgaattaagtaattaattatgtcaggcagacacataattaaatgaatgttgcgagtttgccggtgccaactggccatgccgattaccatcttaggaattaacttgttgcgattgctaaggtgtgacagcgaaaaatagcgaataaatatgcaaatgaaaaatgggatttagaaaaatgtggcaattagccagacgactacaacattgtaatgagtataaaatggtctaataatttcagtcaaattaagcatcaaaattgcattttctgatcagtttttatcagtctaattaaacaatttttaatggtaacccggtcatttacgccgccctcctttcctcgatcatttcggagcacctctgccgatcaaaccaaatcaaaaaatcatgccgagctgagcaagttgcggcaactgtatctcagagtgcacgatgctaggggagggcggcggatcgaaacaacgccacatcccaagatttttggcaaagggcatcgatttcctttaggttatttaaggtgtggaagaacttccacaaaatttgcacaaggtagtgccacgggaaccggtcgggggcagatgggcttggtcggtgggtcggggtcgaataggcgaacacacacacacacacacacacacacacacacacaattaagtaatgtttattcggggacctcaaacttgggtaattaaaccgatatttaaatgtgaacaatacaaaaaataaaaatgaaatgcgccatcaccggggggacaaataatcacaatcacagaaagaggggccgtcggggggataatcacagaaatgcgggattcaccgggaaaatccaagggggacaaatgttgggccaggagaagtgcaaaaaggtggaaagagagaaagggaccaggaaaagaaatggtcaaaagtggtccgaggatgggcaaagggagaaagagagatagagtgtgtgagagcgggcaaagggataggcattgattgcctgtaaaagcgaaatgaatgtgaattgggaatgatttgggagtgatttgggggccatttaaatatggaatagggaaagagataaaaaatggggccaaaaagtgaaattgttaaatttacaattaaaatgggccgatcactacaaattgggggagcagaagtactttggagggggcaaaattggcgaacaaacgat

SEQ ID NO: 26375 - DNA, 1760 bp, Heterodera glycines
gaaaattttttaatgtaagataaaatttaatcgtatcaggcatttggcattattatgtgttttattgattttataaaaaaaaatcagtaaaagacataaaatgtcaaatgtctgatttgatggttttttgactaacgcccattatgatggtttttgactaaagtcccaacaccatttgaaacatatcaaaaggaaactaaaaaagaaattttgtaaaaattgaaaaatatgtacatagatttgtacaaaaaaggaggaattatatatgaaaaattatataaaattgaactaattgtgccaaaatatgtggaaattgtttttttctttttttttaaatttttataagaaattctaaaagttctaaaaaccataatttatcggggaaattttaattataagtttggttgcacaattgtaaatcaaacacatttcgtgcttttcaggcgttaaaatattttaattgtttatcctcctaatcattgccagggcttttactttttgaaaaatcgattgttcgggggtggggtgtattatttgaaattaagtagtttcttagagttgcattttattttattgcatttttcaaaataattttttattcccaaagtgaaattgcaagttctcgagcaaatcacaacttaattaaaaaatattaggagaagtttcaaataaaaaaataaaaaataatctttaaatcattaaaaattgtgaaaacaaattggtttcaagcattttttgattttgagaacgacataaaattttagaattttattgtaaaaaaaatttttaatgtttgtatttgattttgattttttttcgtattttatttttcgattttcaacaaccctgttttatagccattagttttgcctgagcgcatcagtatgtcacagaaattatatgaataattctgtcgaattggttttgtgtatttatgaatagataaaatttcgtttttctttttttgttttagttacattttttagtattttattttaacgattcgcagcaacaacccttatatgtaaagaccggctttttagggttttgcctattttttgcgggtagtacttgatgagagaagcacgaaaatcagattttaaaaaattatttcacttttgtaatttttgtgtataaagacactgcgatttttccaatttttagcacctttttgggatgggcgcttttagcacctaggcattttagtatctgttttgcactttttggcacctaaattttagtacgctgtttcagaatttttggcacctaaaagatccggtctctacttatatgtaacacttttttattctattacttttatttatttagttaattatttgcaatgcaatcagcttcttttgctgcttatttaatcatcgttattatagttcatttttatactccaattttaaatgcaacgccatcggagagttaaatgatacgatgattaattaataatcaaatttagttaggtggactataacatgttaattgcttttatgagaggccatcagcaaggtcaattcagtgaatattcatcgcacaaatttgaagcacaccttggcattgtgcattttaacataaagaatttgcaatgtgactcaatttcggagatatttgaagaatatgagcgacggagaatgccaaacatatcacaaaatatttgaacattctgtacgaatatttgttcatagaatacgtcggcgaagtgcctacagtggagctctaatttgtgttacaagagacatattggaaattga

SEQ ID NO: 26376 - DNA, 1014 bp, Heterodera glycines
tcctttttctgggaaaaacttttcgtgaaacgtcgaaaaattttccactcgcatcagaagcagactcaaattcttcaacacacaatataaaaatattacgcaagaacttatttttacatcctttttagaaatgctacataaatttttattgtaaatagttacaaacaaactttttttcacttccaatttctaccagttgccaaacaaaaaggcgatagttaagcattgagatataaaaaaatcgtctagaataattatctcaacaatttgtcgggaaagctgaataaatttctgttgcaataggcatattggcacaagacataaatgtagagcaggcacaaaatagaggaaataccaaagattaaaaaattcttgtttatgccccactctgctttggctggccatacctcgccagagagtggagatagaccctttgttgatacatttggaaatgtcgagcccgcctagcgcattcgaataacacaaaatttgtttgcatttgccaccaaacaatccgcttatgacgcgccgaatgaaaattcacaaaaatttggcaccggaaaaactgcattttttcatgggccagcataataaagtaaacccaaaatgtaaggaaatttaaattggtcatgagagatgtttagttttttatttgtcccatcctttttctgggaaaaaacttttcgagaaaagctgaaaaattttccacttgcatcagaagcagactcaaattcttcaacacacaatataaaaatattacgcaagaacttatttttacatcctttttagaaatgctacataaatttttattgtaaatagttacaaacaaactttttttcactgccaatttctaccagttgccaaacaaaaaggcgatagttaagcattgagatataaaaaaatcgtctagaataattatctcaacaatttgtcgggaaagctgaataaatttctgttgcaataggcatattggcacaagacataaatgtagagcaggcacaaaatagaggaaat

SEQ ID NO: 26377 - DNA, 1079 bp, Heterodera glycines
catcaattattttttcagaatgtgatcagggtacaaaaaatacgggtccataaatgggtgtaactccgcttggagatgcgttagaaaagaaagaaaaatatgttcggacagcttttgaagagctgcattgaatgctgcagttgccgctgctgtacgcccacccgttgctgagttagggtcgagagcggcatgaaaaaagacaaaaaggaggaaaatgaaacaaattcgcggctttgccctcgcgttggagaaagcaatgcgcagaataactggggagacttagggttagcgcatcaattatttttttcagaatgtgatcggggtacaaaaaatacgggtccaaaaatgggtgtaactccgcttggagatgcgttagaaaagaaagaaaaatatgttcggacagcttttgaagagctgcattgaatgctgcagttgccgctgctgtacgcccacccgttgctgagttagggtcgagagcggcatgaaaaaagacaaaaaggaggaaaatgaaacaaattcgcggctttgccctcgcgttggagaaagcaatgcgcagaataactggggagacttagggttagcgcatcaattatttttttcagaatgtgatcggggtacaaaaaatacgggtccataaatgggtgtaactccgcttggagatgcgttagaaaagaaagaaaaatatgttcggacagcttttgaagagctgcattgaatgctgcagttgccgctgctgtacgcccacccgttgctgagttagggtcgagagcggcatgaaaaaagacaaaaaggaggaaaatgaaacaaattcgcggctttgccctcgcgttggagaaagcaatgcgcagaataactggggagacttagggttagcgcatcaattatttttttcagaatgtgatcggggtacaaaaaatacgggtacaaaaatgggtgtaactccgcttggagatgcgttagaaaagaaagaaaaatatgttcggacagcttttgaagagctgcattgaatgctgcagttgccgctgctgtacgcccaccagttgctgagttagggtcgagagcggcagaaaaaagacaaa

SEQ ID NO: 26378 - DNA, 1441 bp, Heterodera glycines
aaaagtcagattttcgaaaaattttaaaaacaacaagcgttggcattttttcaggttaagttagtcctttacaatggagaaggcctgcaaaatttggaaagattatatcgattttagtgcgctaagttcgatgaaactttttaaaatataagcctaaactttttggcctgtttaaaaaggaattaaacatttttaaaatatttattcatctcccttttgatagaaaagcatcagagtgccttaattaattttttttaaataaaaaaatttgactagaccaatcgaaagctaacggtcgacctaatggaaaaaaatccccgaaggagagaatttaattaattccattccttcgggggtccgtgccgggtgccgcggggtaagcagtgctggtttcgtttcatcacggcccccatccttttgactagtcagccagcgttgcttaacttgtcagatcggacgggtacgcatgattccaattttccaagcaccccaccgaaagtagaacgaaataaccaaaatataaggaaaatattttaaaaagatgttattcatctcccttttgatagaaaaagcatcagagagccttatttaacttttaattaacatttggtgcgtttcagagcacgttctaaaaaatatttatgaattaattttgcaaaataataaataattaatgaaaaagtcagaatttcgaaaaattttaaaaacaacaagcgttggcattttttcaggttaagttagtcctttacaatggagaaggcctgcaaaatttggagagattatatcgattttagtgcgctaagttcgatgaaactttttaaaatataagcctaaactttttggcctgtttaaaaaggaattaaaaatttttaaaaattttattcatctcccttttgatagaaaaagcatcagagagccttatttaacttttaattaacatttggtgtgtttcagagcactttctgaaaaaatacttatgaattaattttgcaaaaaataaataattaatgaaaaagtcagaatttcgaaaaattttaaaaacaacaagcgttggcattttttcaggttaagttagtcctttacaatggagaaggcctgcaaaatttggagagattatatcgattttagtgcgctaggttcgatgaaacttttaaaatataagcctaaactttttggcttatttaaaaagcaattaaaaatttttaaaaattttattcatatcccttttgatagaaaaagcatcagagagccttgattaacttttaaataaaatttggtgcgtttcagagcactttctaaaaaatacttatgaattaattttgcaaaataataaataattaatgaaaaagtcagaatttcgaaaaattttaaaaacaacaagcgttggcattttttcaggtaaagttagtcctttacaatggagaaggcctgcaaaatttgg

SEQ ID NO: 26379 - DNA, 2078 bp, Heterodera glycines
ggcaccgccggaccctctctcctcgcccattcaccaaaagtttttttgggaaatgcgccgcaaaaaattgttaaaaatctgattttttgtttgagtaaaaacctaagaatctgtgtcctactgatgaattgggggttgaatgtttttttttcttcaaaaaatggattaaaaaattgccgggtttttacaaaattttgcccgaattatgtgtttttgccacagttaggagtgtaaatatttttgctttttccgtccaaattattttctactaaacgaaagcgaaacgaaattgctgacatctatgagaccggcagtgcaaaagattgttcactgttttccatttttttcgtcagttccaattcggcagtgaatattttcgtcagtggattcataaaattataatgtgcttcatttttggttaaactatttaatacagtatttatcgctttttgcgtatggtacttctaagcaaaataaaatgattaattgtgctttaataaatgatttacataaaaagaaattgtactttaaaactgttgaatattattagtaaatttacttctccaacttcttatctcgccatccttcccatgcgttctcgagtgcctatttgcatatttgcttagtccttatctagtttttgcaatgcatttggcacttggactttcacgcacgaataacagcgttgaaggctggcatgcaatttggaatgcccatcttaaaggaaatcagcgactcagcggttttgtccggaaaatgattgaagatgatatgcggtcccagcgaattattgattatcagattgcgcctgctgatggaataagggggccacacgcaaatgggaaaatgataatggcctgggaaatctcgggaaggaatttgcggagaaaagatccgaggccaaaggggaagttatcggaaatccacttttcaatatctcagatctttgcataaacgacttatgcgcaatgattttggaaacagggattatccagataaccaaaaggaaaaattctaaggcagatctcggcatcatgatcatacatatactctttgcttggagaagaaagattggaattattcggctgtccatgaagactttttgccacatttgctcccatgaccactgtgaaaagcattttcttctttttataatgatataaataaaattatttatttttttgaaaatgtgtatgtcctcaaaagtcgtgtccccaattgtcgggatcctcaaatgtcaaatcctcaaaagtcgtgtccccaattgtcgggatcctcaaatgtcaaatcctcaaaagtcgtgtccccaattgtcgggatcctcaaatgtcgggtcctcaattgtcgggatcctcaaatgtcgggatcctcaaatgtcgggtcctcaattgtcgggatcctcaaatgtcgggtcctcaaatgtcgggatcctcaaatgtcgggtagccacgctttcgccggtttgggcccccttccacagaactctcagaatttcatgcacatgcaaagaaagacagccacccttttttttgtttggctttacatttgtcaattcttcatttttacatattttattattagataatgattatggaggatcaatttattacttggagtaaaagcatgtgattaattgccatgaatttttgagggcattgccatccatatgcacatgtcagcattttgggaaagtaatttaatagaaaagcatttatatgtttataaagaaattttttattattttaaataaatatttattatataattttatttaaatatttatataattgcttttgatgttttgcatttttctaattccacttttattcctcaattttaagctcataatggcatttttgcctcttttctcgcgccacttttttccaaattattcctttttgcttttgttcgccactgtttccatcggtttggtgccctccggcgccgttgttcaaactttttggaagaatttgtttcagaatgaactccctcaaagtgaccgatcggcccaaaatttccagctggtttgccgaattggacgagggcgatttcgtgctaaccgaccgcatgtccgcagt

SEQ ID NO: 26380 - DNA, 1155 bp, Heterodera glycines
gctgcttctgatgcgattgaaaatttttcagcttttctttaaaagttttttcccagaatttatacagctttcccgacaaattgtttagataattattctagacgatttttttatatctcagtgcttaactattgcctttttgtatgataactggtagatattgggagtgaaaaaaagtttgtttgtgactatttacaataaaaatttatgcagcatttctaaaaaggatgtaaaaataaaatcttgcgtaatattttttacattatgttgttgaagaatttgagtctgcttctgatgcaattggaaaatttttcagcttttctcgaaaagttttttcccagaaaacggatgggtcaaataaaaaactaaacatctcacatgaccaatttaaattcccttacattttgggtttactttattatgctggcccataaaaaaatggagtttttccggtgccaaatttttgtgaattttctttcggccttgggggcaaatgaaaacaaattttgtgttatttgaatgcgctagccgatctctacattttcaaatgtatcaacaaagggtctatctccactctctggcgagttatgtccagccaaagcagagtgggccataaacacgaattttttaatctttggtatttcctctattttgagcctgctctacatttatgtattgtgccaatatgcctattgcaactgaaatttattcaactttcccgacaaattgttgagataattattctagacgatttttttatatctcaaagcttaactattgcctttttgtatgataactggtagatattgggagtaaaaaaaagtttttttgtgactatttacaataaaaatttatgcagcatttctaaaaaggatgtaaaaataatttcttgcgtaatattttttacattatgttgttgaagaatttgaggctgcttctgatgcgattgaaaatttttcagcttttcttgaaaagttttttcccagaatttaaattttgattttttttttacttgaatcattttaatatttaagagtggtttagggcctttttttttttgattttttttttaaattttttttttgaaagattttttgataattttttttttaattttaaaaaaattggtttatattccagttcttttttttcttt

SEQ ID NO: 26381 - DNA, 1084 bp, Heterodera glycines
tgagcggtgaggaccgcaaatttggcacttttttccccgtagtgatttgttccagtcgccgttgataatgcagtcggtgcagatgatggtagccgctgcaaagttaacttcatgctcgaaccggttctccaccttcttgtcctgtgtcgcctcaaagtcgtatgcgatgatcctgtatgacttaattcgttgttgttttaggggctggatgaaacatttcgtacaggggttcatcccgtcgtcgtcgtcttcttttatatgaaattgcttgcaaagtttacaaaactgttccccacatttatgcccaacactcccatgaaccttaatgttataaattaccccacaatcttcgcagcgctgaaatttggtgcacaaatccttgtggaggtggcgctcataacagctgttgttgtaaaaggtgttgttacagtgatcacattttttgacgtatccttgttggggctcacatgaatagtcgactcccacctcacggcacccgtgacagagtgaagagcagtttgatgaatgtgcgattttcttgtagtacggcgactcgcaggagaggcagtagttctttttgttgaaaaattttgaaagagttttgatgccgtcaaagtggttgttgttgtggtagagaagaatgggaaactggtagtcggtgatatcggatttggtgattgggcgcatctggtaatcattaaaaataaatattttgtactcaccgggatacttgacgttccacaacccttgcacttgatgaatgtatacttctgcatcgtattctgtttccgttgtcgggatacccgcctcgcggagcagttgctgcaccttttgtcgtaaaaccgttgtttggttgttgttaatccatcgccatctattttcggtaattatcccacgtttatacaaagagtagtagcgcatcagttccagcgcgtaaaaaagacagtagttgtcgttgttgttgactttgaaaatgtgcgattgtgaggagacaggtggtcgcccttttccctttgttgtccgttgtcgcggtagtccattggtgtttaggacagtgacgggaattataaagggagcaccatat

SEQ ID NO: 26382 - DNA, 892 bp, Heterodera glycines
tcctatataaagagagcattttccacttccagtgctcactttcacctgaaaagcctggatttccggcggagggtgggtgagccacgggtggttagtcccttcccccccccccgttctgtgtcgccgaggacgaagatgctcgacgccgctgccaccacactatgggtagagaaacagagagagagagagcgagagagagagagtgaagacacaatgtgtgttagagaaaagtttttttggacttggaaatttttttcctctataaagtgtaagagaaagagagagagagcgagagagagagagagtgaagacacaatgtgtgttagagaaaagtttttttggacttggaaatttttttcctctataaagtgtaagagaaagagagagagagcgagagagagagagagtgaagacacaatgtgtgttagagaaaagtttttttggacttggaaatttttttcctctataaagtgtaagagaaagagagagagagcgagagagagagagagtgaagacacaatgtgtgttagagaaaaacctctaaagacagaccctgtctctagaggtacctatcccctctgcaaaagagaggaaaggcgcacgcacagcctccgccggaactccaggctttccagctgtgcgtgactaactgagcagactgaacaaaataaaatatataaaaagaaaaaataaaatttaattttacttaaaatacttaaattttacttaaaatacttaaattttaacaccaccgagagttgtacccacagccgtgtgtgccaatgggacgtcaatggacgccaattggacttatttggtcagctgtgggaatgccttaaccgacgggtggcatcgcgtcaattccacctaataggcgttcgtcggctacagc

SEQ ID NO: 26383 - DNA, 960 bp, Heterodera glycines
acgcagccacgcccttggcttttattcctacggacatcactcgctagtccatcactaagcattaggaaattgttggatgggacgcagccacgccttggcttttattcctacggacaccactcgctagtccatcactaagcattaggaaattgttggatgggacgcagccacgccttggcttttattcctacggacatcactcgctagtccatcactaagcattaggaaattgttggatgggacgcagccacgccttggcttttattcctacggacatcactcgctagtccatcactaagcattaggaaattgttggatgggacgcagccacgccttggcttttattcctacggacaccactcgctagtccaccactaagcactaggaaattgttggatgggacgcagccacgccttggcttttattcctacggacatcactcgctagtccatcactaagcattaggaaattgttggatgggacgcagccacgccttggcttttattcctacggacatcactcgctagtccatcactaagcactaggaaattgttggacgggacgcagccacgccttggcttttattcctacggacaccactcgctagtccatcactaagcactaggaaatagttggatgggacgcagccacgccttggcttttattactacggacaccactcgctagtccatcactaagcactaggaaattgttggacgggacgcagccacgccttggcttttattcctacggacaccactcgctagtccatcactaagcactaggaaattgttggacgggacgcagccacgccttggcttttattcctacggacaccactcgctagtccatcactaagcactatggaatagttggacgggacgcagccacgccttggcttttattactacggacacctctcgctagtccatcactaagcactaggaaattgttggacgg

SEQ ID NO: 26384 - DNA, 1767 bp, Heterodera glycines
  unsure (1)..(1767): unsure at all n locations
catatgccgggaaattttcaaaatttttcgagctaggccccctagaaatgttcgaaaatttttttcggacgaaaatgggggtgaaaaatatttttctggggtaaaataaggtgctgagtacgaatatgatgtctattttaagtttcataatttttggaattttttaaaaattctttattttttggcaattttttggccctcgggattttggcctaatatttgaaaattcataacaaatcgaagggtggatcaattttcgtgcaattatattataaaaatagagaaaaatcaggagaattttatgggatttatttgggatttctatcttaaaaagaaaacaagttattccagaatttctgaaaattttcgatttttcagaaaaaaattcataacccccttctgaaaagaaatttttgaaaattaaaatactacaaaaatccgcaatttttttctttataatataaattttattttacatttttatcactttcttacgaattgttacaaaaataaaaccgattttgggattatggaccaaaggggtgagcataggatttttgagttgaaaaattttttcaccaaaaatcttcaaaaaatatgtctttaggggttatttgggcccctgatcacgaatacgtaatcagattttacttttgacatgtttaagacctcagaatccctgtgtgattgggattctgaggcacccttatgaggagggggggggggggcggcaggttcggacccggacggtatattatttttctatgcatttttgggttattttcactgtttataattaatttgaagatttgttttaaattatttaaatttatttttttttttaattttagaaattattttttgttttattattattaacaaaattattttaattaaatttaatttttcttttgaaaaatagatttatttttaagcaaaattagatttaaaaatttggatgcataataattcatttcaaaataaagtaaaataaattattccgtttattaattaaaaaataaacttttacattttttattattttgtttttttaaaatttttaaataaacctaattctataaaattatatttaaaattatgaaattatttttgtacatctcataacaagttagacttttgtacctcttctaatcacttttgtacctcttctaatcacttttgtacctcttttatcacttttgtacctcttctaatcacttttgttcaaattttaatcactgttgtacctcttttaatcactgttgtacctcttctaatcattttgtacctcttctaatcacttttgtacctcttctaattactgttgtacctcttctaatcacttttgtacctcctctaatcacttttgtacctcttctaatcacttttgtacctcttctaatcacttttgtacctcttctaatcacagttgtacctcttctgatcacttttgttcaaattttaatcactgttgtacctcttttaatcactgttgtacctcttctaatcacagttgtacctcttctaatcacagttgtacctcttctgatcactgttgtacctcttctgatcactgttgtacctcttctgatcactgttgtacctcttttatcacttttgtacctctttctgaggccgcgaagcggccgaaaaggcccaactaatttttaaaaacgggcgcgaagcgcccgtctgagcttaacaatnttaaaaacaggcgcgaagcgcccgttagagcaaaacaaattttgaaaaacggcgcgaagc

SEQ ID NO: 26385 - DNA, 857 bp, Heterodera glycines
tttaggacaattttctatctcgtaaccccgatgttaatccgttccgcagagcctcttcaaaattttttccattaccgcaagagctgcggaaattgtgaattaattctcagaaaaatggctatctctttttaggacaattttctatctcgtaaccccgatgctaatccgttccggagagcctcttcaaaattttttccattaccgtaagagctgcggaaattgtgaattaattctcagaaaaatggctatctctttttaggacaattttctatctcgtaaccccgatgctaatccgttccggagagcctcttcaaaattttttccttaccctaagagctgcggaaattgtgaattaattctcagaaaaatggctatctctttttaggacaattttctatctcgtaaccccgatgctaatccgttccggagagcctcttcaaaattttttccattaccgtaagagctgcggaaattgtgaattaattctcagaaaaatggctatctctttttaggacaattttctatctcgtaaccccgatgctaatccgttccggagagcctcttcaaaattttttccattaccgtaagagctgcggaaattgtgaattaattctcagaaaaatggctatctctttttaggacaattttctatctcgtaaccccgatgctaatccgttccggagagcctcttcaaaattttttccattaccctaagagctgcggaaattgtgaattaattctcagaaaaatggctatctctttttaggacaattttctatctcgtaaccccgatgctaatccgttccggagagcctcttcaaaattttttccattaccgtaagagctgcggaaattgt

SEQ ID NO: 26386 - DNA, 1322 bp, Heterodera glycines
aaaaacaatatcatgtgcccaaacgtccccctgcgaaaatttgaaccctatttttgcattttaaataactccacggaaacataaatttttgccaagaaatttttatacccaaaaataataagacaaataaatgtaagacaaataaatacggacaaatgccatgaaaatttagaaaatttaaataacaaatgctatacttaaaatgctctttcccacaaatatgtaagcaacaacaccaaaatggtggaaggaattcttcgccatcactggccgtatcagctaaattaaatttaaaaaaagattatggttaagatctctataattattactttctgactccataaccataattactttacccattagattcgtttccatgtgtttgttgtatctgttgggcattcatttttctacgcgttggagtatggggattaccacctttagttttgtctagaatttcaagaagttttgactaatgaatataaattttattacctttttgtttttttagcgctgacttaggtttgtttctttcatcattatcagaatggcaatgaacgcctgcagcacagaaactcaacaaaacgaaaaggaacaacacaattttgtgtacgttcatgataggaggaggagaagcgttttctaaaaaaataattaaataattattctaatcccaaaaaaaaattggctaaaaagtggtttcactagagaccggaaatttcaaatttgcgtatcccgctgttttaaatgtcggacggtttagtcctgttgaaggtggacacttcagtaccgggtttttcatgatggaaaatggtaggcgcacccctaattttcgagattttgtgaaattttgattttgtggaaacagattaatattttgaaagaagtgaaggaatatgtaggctgctggtccatagaggctcttaaatagcaaaagccgagacattgccaaccatcggcgaattaatccattcctaaacaaatttttatgaaaataataacaaataaaaatttatttgcactttttcgtttgtgtgcactttatcatatggcgccaattcaatgccaatgagaaggcatgagaatggcacacgacaaaaaatttattcaaaatcaatgtcataggatggcataaagaaaattctgtcggtgatttgggtttttcttttttcaattgtacatatttgtgaattacaaatagaaaaatacattacccattgtacgaattcgctgagatttgcataatccgaaaatttagtaagttttgaagcagcattagacactttttaaagggatgaatcaggggacgacaccagaaggac

SEQ ID NO: 26387 - DNA, 1990 bp, Heterodera glycines
gattagaagaggtacaccagttgattaaaacagttttttatgtgaattaaaaaaggtacaacagtgattagaagtggtacaaaaggattagaagaggtacaaaaatgatcagaagaggtacaacagtgattagaagaggtacaacagtgatgagaagagtgattagaagaggtacaacagtgattaaaagaggtacaacagtgattagaagaggtacgacagtgattagtagaggtacaaaagtgataagaagaggtacaaaagtgattagaagaggtacaaaagtgataagaagaggtacaaaagtgattagaagaggtacaacatggtatagtgcaacagtgattaaaaagaggtacaactgtgattaaaagagatacaccagtgattagtagaggtacaaaagtgattaaaagaggtaaaacgtgattaaaagaagtacaacagtgattaaaagacgtcaaaagtgattaaaaaggtacaaaagtgaattaaaaaaggtacaacagtgattagaacaggttcaacagtgattagaagtggtacaaaaggattagaagaggttcaacagtgatcagaagaggtacaacagtgattagaagaggtacaacagtgattagaagaggtacaaaagtgattaaaagaggtaaattgattaaaagaagtacaacagtgattaaaagacgtcaaaagtgattaaaagaggtacaaaagtgaattaaaaaaggttcaacagtgattagaagtggtacaaaaggattagaagaggttcaacagtaaatagaagaggtacaacagagattaagaaaggtaaaacagtgattagtagaggtacaaagtgatcagaagaggtacaacagtgataaaagaggtacaacagcgattagaagagtgattagaagaagtacaacagtgattagaagaggtacaacagtgattagaagaggtacaaaagtgataagaagaggtacaaaagtgattagaagaggtacatcatggtttaaaattaaataaataatgaaaagtttttataaaaatcgattgcattttaatttaaaatttttttataataaaatactctttttattcattaaatataattttgaaaattaataattgaatatttattttgaaatgaaattcattttttataaattcaaaaaataaataattaaattaaataaattaattaaataatttataaaaatcttgaaattaattaaaacattaaaaataacccaaaaatacaaagaaaaataatgtacaccgcccgggtccgaacttcgcctatatgaaattctttaatcaaacaaaaaattaattttaaaaaatttttcacaaaaaaataatttaatttaaattaaaaaattaattaaataatttataaaaatcttgaaatgaattaaaaacattaaaaataacccaaaaatgcacagaaaaataatgttacaccgtccggattcgaactttgcaccacccccctcaaaatgatgcctcagaatccccaatcacacagggattctgaggtctgaacgatgtcaaaagtaaaatctgatcacgtattcgtgatcagcgtcataaaatacccctaaagacatgtttttggaatattttcggtaaaaaaatttttccacccaaaaatcctggtcacccccctatggtcccgaaaccaaaaatcacttttatttttataacaattcgcaaaaaagagataaaaatgtaaaataaaatttatattatagagaaaaaaattgcggatttttgtagtattttacttttacagaatgtcttttcagaagggagttctgaatttttttctgaaaaatctaaaatttccagaatttctggaataactttttttctttagaagatagaaatcccaaataaatcccataaaattctcccgattttttgctatttttaaagctttaattcacttaaattgaccggtcctccattgagttatgaattttcaaattttaaccccaaa

SEQ ID NO: 26388 - DNA, 1102 bp, Heterodera glycines
ccagaaagaaaatccagaaaattagggtcgtcgctattattccgaaatgtgggttggagttcatttgagtgtgagcagaaaaagagatagacgttttttcaaaattttcagagccaaactcgcccagaaagaaaatccagaaaaattagggtcgtcgctattattccgaaaatgtggttggagttcatttgagtgttgagcagaaaaagagatagacgttttttcaaaattttcagagccaaactcgcccagaaagaaaatccagaaaaattagggtcgtcgctattattccgaaaatgtggttggagttcatgtgagtgttgagcagaaaaagagatagacgttttttcaaaattttcagagccaaactcgcccagaaagaaaatccagaaaaattagggtcgtcgctactattccgaaaatgtggttggaattcatttgagtgttgagcagaaaaagagatagacgttttttcaaaattttcagagccaaactcgcccagaaagaaaatccagaaaaattagggtcgtcgctattattccgaaaatgtggttggagttcatttgagtgttgagcagaaaaagagatagacgttttttcaaaattttcagagccaaactcgcccagaaagaaaatccagaaaaattagggtcgtcgctattattccgaaaatgtggttggagttcatttgagtgttgagcagaaaaagagatagacgttttttcaaaattttcagagccaaactcgcccagaaagaaaatccagaaaaattagggtcgtcgctactattccgaaaatgtggttggaattcatttgagtgttgagcagaaaaagagatagacgttttttcaaaattttcagagccaaactcgcccagaaagaaaatccagaaaaattagggtcgtcgctattattccgaaaatgtggttggaattcatttgagtgttgagcagaaaaagagatagacgttttttcaaaattttcagagccaaactcgcccagaaagaaaatccagaaaaattagggtcgtcgctattattccgataatgtggttggagttcatgtgagtgttgagcagaaaagagatagacgttttttcaaa

SEQ ID NO: 26389 - DNA, 1436 bp, Heterodera glycines
caaaaattttaattttcgattttttggtcgaattcggatccgggatttggaattggtcgaaatggaagccggattcgcgatcagcgaccccgaaaacctatagagtggcttcttttattctgaaatgtaaaaaaaaatatatgcatatggggcttaaactaccacagagccgttaacaatcaccataacacctttttcttcatcttattattttacttttattttcagattgagaaacggcgtgaggcggtcagaaaacgaatttgcccgtgctttttgagactcaaatcggcgattgacgaccaatacaacgaaaagaaaaaggttgtcaagcgagagcaaaataactatgaaaataatacgacaaaaaatcatagactgatgaaaccataactttgatgttgtcatatgacaaaactgatagtgtatttttcgctcattatcagcacctttgacaactcatgagtgaaataaaaaatcgtttaaatcgggcattttatattatctctaccattaccccacaaaaataaataaaacgtaaaaaattaacacccccgcctttcacagaaattggacaccgtccgttctctccgtttacgcgcgttggagcgcggtcgggaggccgaattgagtgcagcgcggctgaatttgcatgagttagagacgacggtggtgcggcaccaatgcgaaaaaatggtggaaggtaaaatggagcaactcaaagcggagacggaagcggtggaaggtgtgcaattttatgatttgggacaacacttaccgaaacaccgaacccatgaataatgccttatttcttcgaactaactcgaaacccccttaaatgtcgttttgattaattcgcttttaatttcgaattccctccagttttaccggtgaattgttggttcaaagactacgtactctcaccgcattcttgaatttttacaatttaataaccgtaaaagccttttcagaaatttctacaagaacttttcaactcgaatttgacaaaatgcaatgatgagtacaaatctcaatcgatgaacaaatatttggtggaatgcgaagtgagtgaatgagttggttggaaaaatcgattgcagcttattcctccacctaaaacctgtgtcgtggttgaaatgggaatgaaacccgaacttaggactttcgagcacctgtcgtttggggcttagaagggaaaatatgcccggattcggttacccgacgtttgcgcccctggacgatttagagtttatttgaatccattcgtgagcctgaaacgagctttaaattaaactgattgaggagtgattgtgatgctggtaatttgaattagtatttttaaaatcacgaaaaacgtttagaaagatggagttttgtgtaaaaagatgggagacgagaattaatggcttaataaaatagaagaaattaaattacga

SEQ ID NO: 26390 - DNA, 2412 bp, Heterodera glycines
gacataaattatcccacattgtgagaaatttaaatttattcagtattttcgagactattttgataaaaataaaataataattaattttaatatttcaattcattgatacttttgtcactttgttcctaccaccaaatttaagaaatttcaaaaatactcgcaaagtctgcttaagataatgacactattggcactggcctaaaataaatcattattgaaatcaaaacaacaaaaaaagtgtattcaattttgactcccttccatcatcattcacatcccttttattattcattgcaaaaagtccgcatgaaaattcaagtaaatagaataataatactggtatttaagtaatgacccaattatgtatttgaacaatgtcatttatcacattaattaattgttcgtttagtgagtgctacacgggattaggcctggggcggtcccctctcctcatccaacctgctgccctataacttagcaaatgtgtgccccctagtggacccccaatcacttttccgtcggatccggatcccgaccaatctcccccccccccttcccgttacgtttcggggtatttcaccttataataatcatttaccacaacggaataaagaatgttattacattgaacatcttaataggggaaatgttaggccatcacattcatatttattattttctaaaagaaatcctgtcctttttattttctcataatgataatcgagaagaaaaaacaaaggattctttgatcattcactcattgtgtttggccaattatccatcaactttgtttggccagccgtgtcaatatgtgggtggatgaaagacgagaaaaagtggccatgagggtgcagtcgagcgcgggatttcactataaaggggagcattttcacttcggcgtcctttcactttccaaattcatgattaatttctgatcattcatatcacccaattttgatcagcatttgagcaaaattaaatgctataatttctgacaaaaatatttttttgctaacaggtaattaataaaaacatattcaatgtaagcctgaaaaatatcaatttaaaaattttttgtttttgaaacgacataaaaaaataaaagaaaaactataaataaaacaaatattgcaaataaatgtatgtagtaggaagactagtttcggccataccgattttccggtaacggtaacagtaaaaactgttaattaccggaaccggttttttaaccattttttcgaaacttgattgtttatggtaaggattaattcgataaattttaccttgtcgaaatacatgtaattttgaggtcatgactcggtctcgactaatattaatcagttttttaattgaacggcacactttttggataattgcaaaatttagcgcattaataatgtacaaattattcgctaattactttaaatccgttgtgggctttctctttgtgctgtgttgctgcttggtcattatgatgccttccatgactttggcttgttgttgcgactgttgctgctgcggcggtggtggtggcggcggctcgtcatcgacgctggccgtcaatgtcaacggcacaattataccgttgccgagctcgggaggaggtttggacgcgacgacttttaattgaccctaattatccattccacaggtggcggcggtggttgttgcgattgttgttgcggtggtggtggtggtggcggtggcagcaacgatgccgcactgttggcagcaatcacagctgcaaccgcgtcctcctcgggtcgccgtcgtcgacgacagcttggcacactccctcaaacttttgcacaacgttcggcacgtacagcaacagcggcggcacaaggccaggttctaatccgataatcggacagggatggtttgatgtgggaaattttggcgccaagcgcttagtttgttaatttgtcttggtaccaatggaaagaatttaacaggatttgagtgtaaaaaagtctaggtggcccaaaaatgaaaaaaactcactttttctggtttttttcgccgcaaaaagatataagtaaaagcgtttaaagtttcttgcgcagaaacttcccgttggcctaattgaattgaatcattaaattatagggtaaataaacaataaatttgcgattgaaattttttgttttacttttaccgacaaaaattgccgaaaaattttattgggcaaattcatcccggtcatccattccatgttatggggtttctaaacgtagtgttgatttttaaattatttttaataaaataaataaaaatcatttcatttaaattttaaaatatttaataataaatgaaaaaacaatttgataacaaaaggtacaaaattcttctgctctcgaaggaggagtccaatgcaattgttgttgtgagaatggacaatgtgtgaaatgt

SEQ ID NO: 26391 - DNA, 1076 bp, Heterodera glycines
gtggaccatcagatacaggctaaatttctttcaccccaccccaacatttttgcgtttattggtggcattcgtgaggaaattgtgcgagttaatgcaatttcggtcaagttggattgcggctaagaaccagcactcgtacagtcgagcggagtaccgtcaggcaaacgaacgacttttgaccctcattggacgttactatcaaatggacacggaaaattttttgaaagccacttctaaattcgttaaatttcgtggtgttgatccagtgcggcagcaaaacgaggaaccgattgaagatgattaaacactgaaaaacgaatatactttattacctttagtgagggatgcgcactgtgcccccagaccaactatgcaccgtttatcccggatggagtttgggagggaatggggaaaagccaaggcgcctttgaccaagccccgaacccccaaacgactcattgactgttaagatgtatttattcattcgatgttggatttaaacgaagcgagaaatcggaataataattgaagtctgttccatcacaactgactgactgatcactggggaaagagaaatacgaagagaatgggcggagaaacattacaatgtgaaaaggaaaaacgtgtgaaaaggataaatgtgattgaattgataatggccaatgggaaataattaaatgagggaaatgcgtcgaataatccttacaactcccccctttccttaggatcgtccccgatccttaaaagaaaaatgaagtgaatgaatgaatgggtccaaactctcggcttcgcccttcgtctctccaatccgaacttccacggccaagctgcgcattacaataatgaacagcggtccaccttcatctcagatggatggcatgggaaatcggagaaaagcaaccaggggtcattccggtttggggatgagatgtaagagcatgatgagaggagagaaagaatgggccagagaaagtgtgaggaaaaccgacgcatagtaagaattttttgaattgggggaaagaaaggccattaacaatggggaataaaaggaaaatgaatgataatttttaaataga

SEQ ID NO: 26392 - DNA, 1349 bp, Heterodera glycines
taacattgctttaaaaaatattccttaatgaacgatcaacaaaaacaaattttccaatgtataaaatcaaacttagaacatccttcagaaaattgtaaaagctgtttttatatcgacggaccaggaggaactgggaaatcttttgttcaaaatgctttatttcattagcacgtggtttttcaaaaaaagtaactaatatggcttttagtggtattgcggcaactttattgaaaaatggacgaactgttcacaactgttttaaattaccattagatttgaatagcaattctttgtcatctattgaacttaggtaattctaaggaagcgaatgaaattcgccaaacagatgtttttatttttgacgaagcacctatggcaccaaaatatataattgaaatactaaataaaaaacttaaagaaattcataataatgattatatttttgggggtaaaattatgatattaagtggtgattttcgccaatgattacctattaaaaataaggcaaccaaagccgaaatactagatttattaatacaaaaaagtgaattatggaataattttcaaatttttcatttaactcaaaatatgcgttctgaccctttaaaaataggaaatggtaataacggtgatacgtttttacatcttcccgaaagttgcgatgtcggaaataatgatttaattgacgaaatttttggagaaataataaaaagaaaggtttttttgaaattgtgtaattactgtattttagctccatataacagagaaattaactgttacaacgaaaaagttttgtcaaaatttccaggagaaaattatatatttaaaagtattgatgatgcagagagtaaaggcgctcctattcttcctgaaatactcaataaactcgaaacaagtagtctcccgaatcatgaacttaaactaaaaataaattgtgtaacaaaattaattagaaatttaaatgttagtgcgggtttatgcaatggaacacgtcttcaaatacttgatattgggaaaaatgtattaagagtaatgattttaacaggtgatagaacgggtgagatcgattttattccaagaataagtttaatagaagataaaaaatttccttatgtacttaaaagacatcaatttccattaaggttagcattttgcatgaccattaatggagcccaaggacaaacttttgaaaaaattggtattgatttatcaagagaggttttttcacatgggcaattatatgtagcataatcaagaacacgaaattgggaaagaattaaaatcaaatattcaaatgaaaatatagaaaaaatcgttaaaaatattgtttggcaggaagcattgtaaat

SEQ ID NO: 26393 - DNA, 1027 bp, Heterodera glycines
  unsure (1)..(1027): unsure at all n locations
aaaaattccagacaatagtatcggcgtcatatgctgagagtgcgntggaatcccttgactgtagacagaaaaagagatagccatttttccaaattttcacgatcaaatgcgctgagaaaaaaattccaganacaattagtatcggcgtcattatgctgagagtgcggtggaattcccttgactgtagaccagaaaaagagatagccatttttccaaaattttcacgatcaaatgcgctgagaaaaaaattccagaacaattagtatcggcgtcattatgctgagagtgcggttggaattcccttgactgtagaccagaaaaagagatagccatttttccaaaattttcacgatcaaatgcgctgagaaaaaaattccagaacaattagtatcggcgtcattatgctgagagtgcggttggaattcccttgactgtagaccagaaaaagagatagccatttttccaaaattttcacgatcaaatgcgctgagaaaaaaattccagaacaattagtatcggcgtcattatgctgagagtgcggttggaattcccttgactgtagaccagaaaaagagatagccatttttccaaaattttcacgatcaaatgcgctgagaaaaaaattccagaacaattagtatcggcgtcattatgctgagagtgcggttggaattcccttgactgtagaccagaaaaagagatagccatttttccaaaattttcacgatcaaatgcgctgagaaaaaaattccagaacaattagtatcggcgtcattatgctgagagtgcggttggaattcccttgactgtagaccagaaaaagagatagccatttttccaaaattttcacgatcaaatgcgctgagaaaaaaattccagaacaattagtatcggcgtcattatgctgagagtgcggttggaattcccttgactgtagaccagaaaaagagatagccatttttccaaaattttcacgatcaaatgcgctgagaaaaaaattccagaacaattagtatcggcgtcatta

SEQ ID NO: 26394 - DNA, 972 bp, Heterodera glycines
actcgtcgcaccaattccccttccatagggagggacccgcgcccaaatgtctcctttttgaacttcaaaaaatgccccccccccttcggctggcagcaaataaaacgcccaaaattcaaaggagaataaaatgaaacaataataaataattaaataaataaaagatgtattttattaaggtataaaatcaacaaagcaacagtaaaatgtatcattagttttcaaattatattaattcaaaaataaattcagaatatttgattttatttttacttggtttgccaatttgtctttttctttttttaaatcattttttgtctcttactttggttacttttcccccttttctctgctttagctgtggcagccgttgttctcgccttcctttaatctctgtagaaaatgaccatcccaatgtcccaatgtcgttctattttgcggcgctctctcgctgtcttctccattctctctctctctctctctcaccctctctgtctctccctctctgtctctccctctctcactctttctctctcaccctctctgtctctccctctctctctcaccctctctgtctctccctctctcactctttctctctctccctctctgtctctccctctctcactctttctctctcaccctctctgtctctccctctctctctcaccctctctctccctctctctctcaccctctctgtctctccctctctctctctcgctctaactttcttttattcctttcttctcattatcatatttatcaatcaccttaaaaatgagtggtttcagaagaaaaagaaatacaaaaagacctgtgctgaactgttgagctgctgctgattttgttaatgaaatttttggacttctgacgatgagagggaggaaaatagagagaggggaaaagaaagaaaggaataaagggagaacagagagagaggagaaagagacaaggaaagggagggagaaa

SEQ ID NO: 26395 - DNA, 2227 bp, Heterodera glycines
ggaacaattttgagaaattttccacttcttatggggatattctaaaaaattaggtcgattcttagcgggtgcttttttgttctattgcattttatcgagaagttttccaaaaaaaatgtcgaaatagtgaaaatagtgacaaacgccaaaatagtgatttcgataatcgatttaaaacgacccaaaacgatgagaaaaatggaaattagggtgcttggcattttacaaataagaaaatcgggtactgagtgcccaaaaaaggaacataaaaatggcataaacaaatcatggagagaaaattgttggcattggcactatttccgagctcaaattttagaaaaacattccaatttcaaagaaaataaaaagttacaatactttgttaaaaagaattcaattagataaaaaaccccattttgcagatttatgctcttttggttgctttttggctttgccactttttagggcatctccatgttttatcaacaaaaattgaatttttaaggtaaagaccggtttaattttgtgataaaatttacatgatctcctaattattttaaaatattgaaagatttgtgaaattaatggactaaaaattttaaaatttaaaaaattataaataaaagaaaatatacatatttcaaaataatatattgatgaagaaagagcaaaataattatgaaatcacaggaaggaaatcgaacggcatagacaaatcaatggaaaaatggttggcattggcatcatttcctgacaaaaaattttggaaaaacatttccaatttcaaagaaaataaacgatttttggaggatataaaagccaaaaaaagaaaagcaaaaaacataattaattaccttttcaaatcattcaaaaatgcgcgccattctcttcctggccatggtttgcttggtgatggctgttattcttgagacaggtggccaaaattaattaaaaatttaaaaatattttattattttagccaactcaaaggcagtgaaaaaagacaataagaaaggtataaataaattgaaaataaatattaattggaatatgcttttaaaggagcaattacaacgccagcaaaaggaaaagcggcgccgaaaggagcagcgaaaggaggtaaagcagaaaagagagagggactaattaatacaaattaactaattaatcaaataattaattaaggaattaaaaaagacgcaaaatcaaagggaaaaggaaaaaaggacgccaaaggcaaaaagggtaaggattttaatataaagcgaaatttaaacagttaatttttgaattttagacaaaaaagctaagccagccaaaggaaaaggtgcccctaaaaatggtaattattattaattttaaatgctaattaaaatgattgaataaatttagataaaaaatccccagcggcaaaagccaatgacaaaaagagcccaagtaaataattaattatatttaatattgtgccaaaattgccaatttgaagccaaaccaatggcagcagtgaaagccgtgccaaaggcggcggagaatgctcagaagggaccgtcgagtgcggaagtggtggcggaggaaaacaacttggacactgaggcggtcgacgacttgggggcggaagagtcggactttgaccaattggcagaggacgaactgctcgaggacgacgccatggacggcgaggcggacgaatgggaaggcatgggggaggagacggagatggacagccaaatggcactctgatggccaactaattggacaaattacaaacggaacaaaacgggacaatgacacaaaatattatttatcatttttggcatatcattgaaaataaatagaatttattttgcatttcagtaaataatggccaatattctgaaaaacttaatgggtgtcgaaagttccatgtggagccttttaaaacacaaaattccttcacagcaggcagcacgcaattaggattacggaaatagcggcgttttgtagcccgtcattacggataacggaaaacggttttttttgtgatttttccttaattataatattagtttttttttaaaattcaaaccaaattgttcataaattcgtgaactctcaaatatctcattctttatcaatttcgctagcataattacaacaaaatcatttcaaagttttaggcgttaatcttcaggaaacaaagaaacccaagaaggaattaaagcagaattggttttggagccatggattt

SEQ ID NO: 26396 - DNA, 1224 bp, Heterodera glycines
aaaaatccaacgcagaattaaagtacaggctatagggaagctattcccgaaggattcggtctccccataaatctgggcgcatcggttcggggggactgccccgaaaacaaaaaaaatcgattttttcaagtgtccgtttggggtactcaaacaattatggggagcaaaaatccaacgcagaattaaagtacaggctatagggaagctattccggaaggattcggtctccccataaatctgggcgcatcggttcggggggactgccccgaaaacaaaaaaatcgattttttcaagtgtccgtttggggtactcaaacaattatggggagcaaaaatccaacgcagaattaaagtacaggctataggaaagctactcccgaaggattcggtctccccataaatctgggcgcatcggttcggggggactgccccgaaaacaaaaaaaatcgattttttcaagtgtccgtttggggtactcaaacaattatggggagcaaaaatccaacgcagaattaaagtacaggctatagggaagctactcccgaaggattcggtctccccataaatctgggcgcatcggttcggggggactgccccgaaaacaaaaaaatcgattttttcaagtgtccgtttggggtactcaaacaattatggggagcaaaaatccaacgcagaattaaagtacaggctatagggaagctactcccgaaggattcggtctccccataaatctgggcgcatcggttcggggggactgccccgaaaacaaaaaaatcgattttttcaagtgtccgtttggggtactcaaacaattatggggagcaaaaatccaacgcagaattaaagtacaggctatagggaagctactcccgaaggattcggtctccccataaatctgggcgcatcggttcggggggactgccccgaaaacaaaaaaatcgattttttcaagtgtccgtttggggtactcaaacaattatggggagcaaaaatccaacgcagaattaaagtacaggctatagggaagctactcccgaaggattcggtctccccataaatctgggcgcatcggttcggggggactgccccgaaaacaaaaaaatctattttttcaagtgtccgtttggggtactcaaacatttatggggagcaaaaatccaacgcagaattaaagtacagactatagggaagctattcccgaaggattcggtctccccataaatct

SEQ ID NO: 26397 - DNA, 1890 bp, Heterodera glycines
  unsure (1)..(1890): unsure at all n locations
ttttcattttttaagacaaaacttttttaggggtttcgggggtcaaaagattcaattttagcatccatttcgactcattcgaaccccgaacctggactcgaacaaaagttgcgatttcaattttcagtaaaattcacatttaggtaccgaaaaaaatgccaaatttcgtgcaattttttcagcctgaaatttcgaagctatctaacgcgccatactagtatttaataataataattttaaaaaagctaaaaacaattagagtgagtgaataattgatttttgtttggtacaaatgtgaattttgttaaaaatgaatttgcgactttttgttaagggcctcatttttcaaacatttaactgattgttgtgagtgatcaaacaaaactcattcgtcacatattcctaacaaactacagctgatgaccgatcgcaaagcacgcccgggcccggcacatccaaaattgcggaaggcgtcaaaaaccgaagttcaaaacgtagtcgacgacgtgtcggcggtgggccccatggcggtgccggtgaagacgatgaggactacccatacaagccggacgaacttgccttcaacaaaacgtcatactttaaagtcagtgccggacggacacgattttttgaatccgagaaaaattgcatctcttaactccgaagttttttggaaattattttttaaattttttgtatcacttatttttttattttttgcaatttaaaattccctaacccgaattcgaacaaaaattagatctttttttttccaaaatatgcgtttttaaattcatttacatttttgatcgatttaacgcattaaaaaaaattttttttggtttatataatattatttcccgtcaggttgaaaagctgttggcacaatttggttggggccgttgggctgtgctgaaagcattttctgatttgactgaacatgaactggaacacatcaccaggcaattttcaatttccttttaccccaattgttgatcattgatcagggggtggggattttggtaaatttaaaaaatcacagatttcatgtcttgacattttttctggagaattccacctgtagatcactgatcagagtgccgttgccattctcctaaaattgattcaacaaattattgggtagttatgcccattgattttgacaggacactgttgttgcattgtgttcgcgaatttcgtggcgatgagaagatccgtgaatacgtgtgggcactgatcactccgtcgcatcgcacacaaaaaaaatcggcaacaacaaaaattgatccggatcaaaagcagcagcaggatgaaaaaaagacagcagcggcaactggggactcaaacagccgctaccaccagggatgggccgctttgcctgaatacaatgtatgtcgtctaatgctcatctggaatcatatactttcacgtcaaatctaatgatttttatgctcacatttcccgggtcatctatgttactaaatctatgatttttccaaccggtccctcttttcccgtttcatctggaatcatatactttcacgtcaaaccgaatgatttttccactgtcactttccttggtcatctatgttactaagtctatgatttttccaaccggtcccttttcccgtttcatctggaatcatatactttcacgtcaaacctaatgatttttccactgtcactttccctggtcatcgatgtcacgtgaaatctcatgattttccaaccggtccccgtttcccatgtaatctggaaatcatataattccgcgtcaaatctaatgatttttccatggtcccatttcccgtgacatcgatatcacgtgaaaactcatggttttacaanccggntcccgtgtcatctttttgatgaaatcatatactattt

SEQ ID NO: 26398 - DNA, 2324 bp, Heterodera glycines
tttcgtttttatttaatttctttcttttttttgaaagtcctcctctgttcttacgaatccaaactgtgcttaattataattgtggactttatttatgggctttttattcgggggctttccgcggagggcctaagaaattattcatttaattattcaaaaagaatttattccatcgcaaaacgccaataaaacaaaaaaactttgataatctctctgggaaggaaaatattttaataaatttacaaatttttttaaaatatacatttaaaaattatttcatcaagactgaatagacagtagtgccgaccgaatgtttgggcattgacacttttttttaccagccgactttttcttttggcattcgatgctgtcaaaacaatgcggtgccatgccatgccatgccatcattgtgtaaatgagggggcgggtggggaatgccttgtccgtacgtctcttccgtctttcttttttctttccggcgccctttaaattttttaattaaatgcgcagagacgcaacagaagggcaaaaacactgaagggattggcacaaaacattcatttctttggcattaacagatgataagcttgtatagtttttttcgcttttaataacaaaaaaaataattaatttaaaatgaaaaatattttgaaacgcaaaaaaatgcaataaaaaagaagtaatttttggaaattctttaaacagagaattacttaaaaattgacaaatttacaatttaaaatgaattaggtatattttaaaacgcaaaaaaaaaatatgaaataaaaaaaataattttttggaaaaattttgacagaaatatttaaaaatacgagcggaaaaatgttttattactttttaaaggtaaatattttttgaaccaattatgataaattcactcctaaattcctttttttttggcttaaatggtcaaaaatatatttttttgaaaaaaagaaggcaacaaatttataagtagggctggaatttttttgcggcttagttatggcgagagaagtcccaaaaatagcattttctccgaacaatttttgatttagagcgacttataaaaacataaaaacacatattttggcgttttggcacataaaaacatatcgcacatatttgggctattttggattttttagcacatattttggcatttttgagaaaaatcgtaaaaaaatacaagaaaatctgaaaatgcaccctaaaaattgactactttacgtttcttaagcatttagaaaatttctttatatatttaaatgcctaaagcagccaaatcaaacgctgtgttaaatcgtcactggatttcaaagttcccggaaggaacttattcaactgatggaaaaattaatccgggactttacaaattgattgatatcgccaaaattttgattggaggtcgggcgaaaattgacaaagactgatattaaatatgattttttttttttgagtaaatacatttggtttttccaatttttagcacatatttttgcattttttaacacatatttaggcctttttttttggtttttagcacatattttattacatatttcaggatttttagcacataaaaatcccagccctaattattatatataatcacagcaataaattttggtcattttcagaaaggcaacgaaaatcaatcagaaaataaataacaaatttaaacaaattccccagtgaatgagaaaagtcactcgtataacctttccttgcactaaaaaagtaggaaaatgcattagcttttttgattcccttctctttggccaatcaattacaatgccttcaatttggccattaattctgtcagttcggcggtcacattcgtattcagaagcaccgcatcggtctgttgttgctgttcctccgtcgttttcgtgttgcaattcggcggtccattggtcctttccccgtcactttcgccggcactttgcgatggcaatgcttccggcagttcgtaggccaaacggacagagtccgagccgatgccaacggtggccgaatttgcgggcaaaagattctgtcgttcctctggcaactgttgttcgacgatctcgatgcctttattttaagctcgattaatgccataattggttgactgacacaccaaattcgttgttctcatggacaacacccgccggcgtcgacgacttttcactgtttttcgtgtgtttttcatccttggcaatcagcgcctgtttttcctttagattaatttttttaaaatttttaatggggttatttaatataaacttggttttttttattaggaacaaagaataattaattttttaattgggggggggggg

SEQ ID NO: 26399 - DNA, 1813 bp, Heterodera glycines
  unsure (1)..(1813): unsure at all n locations
ttctccctttactatcttcaaaaaacatttagccatacatgcaattaattcatttttgtacaggagctcattttcgggatagtgtgttaaaattcaaatttatttttaaaatatttttttattatttttttggctttcagtttttttcataattttttaaaagtgcctgtcctgcccccaattcccccccccccccccgggtcgattctcaagagttcaaaatttcgggttctacaaatttttacagaaaaaacggtagtagaaatggcctccaattaccaagggtttggttttacaccattatacgaaaaggaagaacccgcctcgttctatgtagacaaaaagaaaatcgaagaacgggttagtctctctaagccattcgcacacatttcattcattgtcgtcatttctgatccaggctaagctcggcgtcatgctcggcgtgtaccttccgaccatccagcacattcttggcgtcaccatgttcatccgtttggcgtggatcgtcggtgtcgctggcgtatcgcacacttttctgatgctcttcatttgctgcctttgtgtaactttgcgttctttcaattcactttttcacgtgtccttcagacgtttctcacctgtattagtgtgtcagcggtggcgaccaatggcgtcgtggaaggcggaggagcatattttatgatatcacgcaatttgggacctgaatttggaagtgcggttggcattctgttctatctggccaacactgttgcaacttccatgtatttggttggaggaattgaaattcttctggtgattcttccggtcaacccattgacttttcatccgtaaattttcagttgtacctttgtcccgggatgacaattggcggtaaaaatgcgcacacggacactggtgagttacatcagcacacggccaaggggccaaaggaagtggcgacagaaatcagcctgggggagggcgacgcaaattccccccttgaaaagtcgcttattttagtaacacaaatacttaccctcgacaggtttcttggggatgatgtccaacaacatgcgtctgtatgctacttttctgctcattgttcagttcaccatcgttgcaatgggtgttcgttttgtccaacttcttgcacctgtaacttcttcgttttctttcccctaactttgtccccctaatttccctaaggtttcgctcgtctgtgtcattctctccgttttggcttgttacgctggtgccgttgaaaaaacgatttccggaagcggacaacagtatcttttgaggaagctgtacacttcaaatcattgcattcagagtttgcatgatcggtgaccatttgcttcaaactgatgcagttttgaaaggcgtgttcaaaaatcagtccattcccgagggagtgtccgtctgcgattattgcaactcgacttaccttttagacctgtgatatattttttcttttttaaaattttcgacaacctttaagggttatcaaattttctgctaaggacaacaacagtcaccttctgaatgcctcctgtgtcaatggatttcccggttttgccactgacactttttggggtcagtgatggtaaaattttttaattcccatgcatttccctcaattgttacaggcaatttcaatcctaattaccccgactttcatgaatacgccgtaggaaagaaagctgacgtttccaaggaagtcttccaggatgtcaagacgtaacactttgtccctttgctgtgtttnccttcattttcagctctttcttccttatcatggccatttacttccccgncgtgacgggcattctca

SEQ ID NO: 26400 - DNA, 1132 bp, Heterodera glycines
ctcctttgtttttgccagagtttgtgtgccacaaataaaaaatgcgggaatagaggaagaagaaccaaacaaagatgaacgatgaaaaacactttcaggaagcgctaggtgattattggagcccagaaaaattgtagattcagaattttaatggtaataatagaagaggtacataaatctagaaataagcatattgcagtgattgggaagaaagatttaagtgattaaatactgaatttttggggccatcaactcctttgtttttgccagagtttgtgtgccacaaataaaaaatgcgggaatagaggaagaagaaccaaacaaagatgaacgatgaaaaacagtttcaggaggcgcccggtggttggttattggagcccagaaaaattgtagattcagaattttaatggtaataatagaagaggtacataaatttagaaataagcatattgcagtgattgggaagaaagatttaagtgattaaatactgaatttttggggccatcaactcctttgtttttgccagagtttgtgtgccacaaataaaaaatgcgggaatagaggaagaagaaccaaacaaagatgaacgatgaaaaacactttcaggaagcgctaggtgattattggagcccagaaaaattgtagattcagaattttaatggtaataatagaagaggtacataaatctagaaataagcatattgcagtgattgggaagaaagatttaagtgattaaatactgaatttttggggccatcaactcctttgtttttgccagagtttgtgtgccacaaataaaaaatgcgggaatagaggaagaagaaccaaacaaagatgaacgatgaaaaacactttcaggaagcgctaggtgattattggagcccagaaaaattgtagattcagaattttaatggtaataatagaagaagtacataaatctagaaataagcatattgcagtgattgggaagaaagatttaagtgattaaatactgaatttttggggccatcaactcctttgtttttgccagagtttgtgtgccacaaataaaaaatgcgggaatagaggaagaagaacaaacaaagatgaacgatgaaaaacactttcaggaggcgcttggtggttattggag

SEQ ID NO: 26401 - DNA, 1284 bp, Heterodera glycines
  unsure (1)..(1284): unsure at all n locations
gagatagccatttttctgggatagagtataaatntaaaaatttccctcaaaaataaaaagtctatttgcgcaccgcctnnccctatcatgctcgagagcatttgtatgtgtataaatttatcaaaaaaagagatagccatttttctgggataacctctaaaatataaaaatcctctgtgaaataaaatggcgattgtgcacagccttccgtctcatacgcaagcgcttttgtgaggtataaaattctctcaaaaaaagagatagccatttttctgggatagagtataaatataaaaatcctctcaaaaataaaagggcgattgcgcacagccctccgtatcatgcgcaagagcatttgtgtgtgtataaaatttctcaaaaaaagagatagccatttttctgggatagactctaaatataaaaatcctctctgaaataaaatggcgattgtgcacagccctccgtatcatacgcaagcgcttttgtgaggtataaaatttctcaaaaaaagagatagacatttttctgggataacctctaaatataaaaattccctctgaaataaaagggctattgcgcacagccctccctatcatacgcaagcgcttttgtgtggtataaaatttatcaaaaaaagagatagccatttttctgggatagagtataaatttaaaaattccctcaaaaataaaaggtctattgcgcaccgccctccctatcatgctcgagagcatttgtatgtgtataaaatttatcaaaaaaagagatagccatttttctgggataacctctaaatataaaaatcctctgtgaaataaaatggcgattgtgcacagccctccgtctcatacgcaagcgcttttgtgaggtataaaatttctcaaaaaaagagatagccatttttctgggatagagtataaatttaaaaattccctcaaaaataaaaggtctattgcgcaccgccctccctatcatgctcgagagcatttgtatgtgtataaaatttatcaaaaaaagagatagccatttttctgggatagagtataaatttaaaaattccctcaaaaataaaaggtctattgcgcaccgccctccctatcatgctcgagagcatttgtatgtgtataaaatttatcaaaaaaagagatagccatttttctgggataacctctaaatttaaaaattcccctcaaaataaaaggtctattgcgcaccgccctccctatcatgctcgagagcatttgtatgtgtataaaatttatcaaaaaaagagatagcattttt

SEQ ID NO: 26402 - DNA, 1110 bp, Heterodera glycines
gtgcgcgtgtgtgttgagcatggcattggtggaaaggcacggaaaggcgacggcggacgaaatccgcacggaggaaacgacggcatttttggaagaggtgcccaaatgtggaaccagcatttgatggcatccggtcaacgcgttctttctcattgtcagattatcaaccaaaagtcctgttgggctgttcaatttcgtgcgctttacgagcggagtttgttggaacggcaaaatcggcgcagaatggagagggcgtgtgctcaactcgagtctcttggcaaagtgttggacaatgccacgccctcttcggttggtacaaatttctttgccgatcactcttatcaattcctatcgatatctgttccattttcattcccactccatgatttttccctttaggtcaccctctcccatcgtttgtgccttctcttcgcctccaatccaacgcccttttggacggtgctcaaatggcatgccgatgtgctcctttcgctcggctgtgtctctgatgcccttcgcattttcgaacggctccaactttgggaggaaactgtccaatgctttgtgagtcttcgtcagtcggaaaaggccgaggcattggtgcggcgtttgttggaacagcgggaggaaccgttgtacctttgtttgttgggcgatgtgacgggcgacgcggagtgttaccaaaaggcgattcgggtgagacgcgaaaagcccttttttggtgcatttgatttttacattttacaaaaaaaggggggtccggacgatccgtcagtggacaatccgtcagtggataatccgtcagtggacaattcgtcagcaaattttttatgagcaatgatcaaaaattttaaaaatgattgttaaatttaataaatataatttttatagatcttaacatttctagttactttatagtttaattaattgacaatttcgagaaattatcatttaattcttttaaaatggttatttcatatttttataaaataacacaaattattaattcacatttttagcgacttaaattaatttcacatgattttaaataaatctgagtgttttaaaaataaatttgcttatggattagttactgaagtattgtccact

SEQ ID NO: 26403 - DNA, 1685 bp, Heterodera glycines
attgaatttattgttctcttttttctctggaacttatggaacattgctaatgtttatgtcaatttttttaattatatgtaaataggaattcatttttattaaaaaatgaaatgaattaaatttcaaaattaaggaaattaaattggttttgaataatttaaatggaagcataaaaataaagctattttaattcttaaaaacttatattttaaataaataataaggtagcttaaaatattcaattattttttaattaattgtttatatttttttataaaagatcaattattatttgaattttattgttctcttttttctctggaacttatggaacattgctaatgtttatgtcaatttttttaattatatgtaaataggaattcatttttattaaaaaatgaaatttatttcatcttatttttaatttgtgtttttcgtgttttttgattatgaaataaataattatttttggtttgtaaaaatcaattttttttttttataaatcataaattaggaattatatattgttttcttaaatgaattttaaaattatagctatgtatatactcttttattttgatgccttttattggggtattgtttaagttcttgcataatacccaacaattttatttttaaaatcataacaattcaagtaataaagtaaatttaatgaatctatgccagattattccactatattagccctaattttgaccaattaattaggggttttactttgacatcacaaagttatggccccgtgaattggttatgaaaaaattacaattttcagagaaaagatttatgcatattttataagggctatttgaatttacttgctccaaatttaactgaatctttttggcccataattaaatgtaaaacaaaattatcgtaccgattttcgtgaaaattcacctgaacttaattaaaattatttttaatgctataaatttttcttcttttttttatataaaataattttacttttattttttctttggttcagtcagcagatggagtctctctttcccgtgtataattagaaaaattaactaaattcccaattactacaaatttcatttgttgcaattaatgcactgccaattcttttcgctgtcgtgtgaaattggcaatctgttggaggaatgtctcgaatattcggagataaaattaagataaaatttgactttatatttatttcagtgattacattgaaaaaatttttttttggctgaaataaggagaattcttagaaataaggacaaatacgatctctgatttatttacaactctaaaaattagctgagatttaaataaaaatccttatcttttctgagatttttttttattattttgtgtcaattttatggtttttgttgtggaaatttgcatataatgattagggatacataccattttaggtttttacctgtattttcctgagctcccattgacctgaaaagcacgaaaaacatgtttttttgtggttgttaagctacttttcgaagtttttagaacctattttcaaggtttttattttttgatcctaaaccctaaaaattcaaaaaaaaaactattttaaactattttggcgttttgcctgaaatttattaataaaaatgcaataaaaacgaaaaatacatccctaagaatcgactccaaaaatttcggaaaaatac

SEQ ID NO: 26404 - DNA, 2412 bp, Heterodera glycines
gaagcggacgagcaaatggtggcgatgcgcaatgagacagggtcgaaaaagacagggaaaactgaacacaaatgaacggtttcagcgcaacgaccggtggacgtggacaattggacgtacaaggcgaggaacgtggtgctgttcaaccatttggcggaggccccgctgacgatgggcgaacacatcgaaagggccaagcagcgcgaaatggccatcaacagagaggccacccgtttcggcaccgaggcgatgatggcacaacgaccccagcagcaaatgatggcacgtgtcacccttcagaacattgccaaaaatgcgggccacattgacatcaccggcaagctgatcggaatagaggccaaaacggtcggattggtggccacaccgacgccggcgccaggtgagtgggcattgtatcacgacccatgggtttggaattgttttcgttgtttttactagagcatcactcattctttgaggaattgacgactcaccactgatgacctggggagagattgagggcactccgttccgactcgacgcccccgacattcagccgtcgctggaggatgcgcccgcattccgagtgagtggccgactaattgtcagcaaccgacacgaacagaattcggaaccgaaaaatcccaaattttgtgcaaaaattcgattattcctttgtccctaaactttgttccattcatttttcagatccccgaagtgccaattagggagaaaatcgctcaaggaattgccgagcaaattgcgtctcgttaccataacaaacggaagagggcaatggaccaaatccaacaaatggcgccgtaagaggcggaagagatgcctttaattccgttgaattgtagaaagacgccaaaattcaattctgtgcgctcttccggcggtcgtttggccacaatgtctcctgccgcccgcagtcttttgggcgataaacttggcattcgactgggcactgatcggatcaaagtttctccaagtccgagggggtcagttgaatatttgttgtttaaatgtcgtaaaatacaattaaatcctcgaatttaagttcggcttcgagaacggtcttcagcccggcaatttatcagatgatcaaagtgaagaatgagcccaagtcgggcgcaacgacgcccaaacgggcggcagcgacgccgactttcgagcaggttcatcagttacggacgacctcctgagggtaatgacgacaatcgaagcaaaaaagcgggtccattttatttagaattccttcacctggtccttcaacactaatcaaaaacaaagaacaaagagaagcgcagcaaagaaaaggtaaataatgtcaacaaaaatcagaaaaacattcgaatggctttaagtttcggaaacggaagaaacccagcaaaatatgggaaaaaggccatcagctgcggatttcttctgatgtatgaattcaaatctacatgttctcctagcaagtgaaaaagtgacgtattttcaattatgtttttcccatttattttttcaacgaataaatacagtgatataaataaaaatttatttgttttaaaattacaaatgattgacttattgttgaatcagtccacctctcaccccttcccaaaatgataaatgtctttttctccgccggacgctttcagttcattttgctccaaatgctgcctcgtataaacctgtaaaaaaagctgacgaataaaaaaaggaaataaaagagagacttggatgaccggcaatcccatggccacgcacacatctggccactgcagcacgacacggagtgaatgtttttcagggaaaatctcgcggattcgctcccttccgtcggcgccggagagagcgacgaaaaaacgaacattgtcgggactaaacaaagaattacaaaaatataagaacactaaccgaaattggtgttgggagtcccaatgagcaggcgaagaaaacaccttaactttgcaattgggtttattttattccgtccgtttgcgctgtttttcttattttcacctcctcaaatgcctcggccaacggaatgtcttccgcacattcggacacaaaatcggtctgtcccttttccgggtattgcaacagaagcggccaaatcagtcgcgcacttttggtgccctcgtccaccagtcgaaccatcgaatgctgaagtgaaaaccaaataaattgtacaaccagcaaatgaataattagtcaattgcgaccctttcgagtgggccaaacgaaatttgcaaatgttggcataattcgtccggctcgtccaccggtggacaaaggcgaactccccgcgccctaagttcttctattaattttgtattgcgccttcgttcgagagtttcctagaaacaaaaaaatgatgatactaaatgaggaaatagagaaatgaccgtcttctct

SEQ ID NO: 26405 - DNA, 1618 bp, Heterodera glycines
ttgccatttttggttgggaataaaatttaattatttgaccactttcaatggccaaatcgaataaattaaataaaaattgttttataatttcctttttcatttttctgcccaccaattcgccccattttcagtcatttcccttcactcagtgccgaataaatggaacaatttggcgaaacaatggataaaaattagccgaaattgttgtccatccatccattgaccatattttgggacgggtaattaagggaccggcgaaaacgcaagaattatttgaagggccaaaaagaatggaaaagcgaagggaaaagggaaaaagggtcggagctgaaagaagaacgaaaaagtgcaagtgatcatcaaataaaagcaaataataatccaatttaaatttaatttaatttaatttaaataatattcgatacataattaactataataatacataatcacataaacagaaaagtaaatcattcattcataaaaatttcaattaaatatttttaaatttatatcatcatttatgaacaaaattttatatattatgccaattttatattttgtaatattaaatttaatataaattaaataatataataatattgttattaaaataatttattttgctttttatttggtcacttgcactttttgtatttcgtctcagcatgaaaatgtccgtaggattcattatgcgatggatattcgcttaccatccgccttttgcgcctccgtccgaatgcattttctgtcccacgactgatgctgctgcgactgcttggacacggagaccaactcgaagcagaactgctcgtgaatgatgtcgaactggcaaaaacggacgaaagaatgggctcagtgaggagatttcaaacttttgtgcacggaattcgtagaaaatttgtcgggatattcctctggtgaaggccaatgaatgatttttgcagaaaagtgtcctccgaatttggcacgactaacaaaaattcctaaaacaatgaaagaaatttttaaaaaagagatataataaatacttccaaatagagcatatgttcgtcttcattgagctcgttaaacggtgctaataatcgcaagcgaaagtcaagcaactcaataatttttggacaattggacaaagtccaactgatggaaagggcattttggcaaaatgggaaaatggccgaaacagccggaagatgaatttgtatggccaaatttgggggatttatttgaatccattcggaagacgaagtaataaaggcggactaaatgaaatgaatgttaattattaaaaataatcagccggcggcatttcttttgggttactcaccggcagggaaagccgatacaaaccgggcgcaaaaaaatgccaacattcgaattccatccgaattcgcttcgtcgcccttaaaattttcctgccaatcgctaaaaataaattagactttttaatcaaataatttttttttacaaaatgtgcccaattgaaagattttcaacgaattcaatgaatgccgaaattccaaatttgcttcaaaaaaacattcgacggagaaattagtctctaaatattttaaacaattatatttatctgccaaactcactgaataatttcgatatt

SEQ ID NO: 26406 - DNA, 1181 bp, Heterodera glycines
gttttcgtataattcgaaatatccccaattccgaatacttttcagattggctcctggtcctatcaatctgaatatcttcggcttgttgttgatgagcgtgacgtgttccttggtgatttctacgataaccaggaatggctgctggtaaaacatttttatccaagaaaattgtaggcatactttgtaaaaaaaaaaattttaaatttttcatagaaaatttcaaataaaaaaattgtcgtataaaaatttcaaatgataaattttcttccacactccccccccccccgaaaaatgtcccctctgggcgcagaggtggtcaaagaattgagctcctccaactgctgctgtctgcccgaggggggggggataaatttcaatgaggtggcaaaattttgaaaactccgaccaaccaaaaataaaggaagaaaaaagcctgttaaaaaaacaaaaaattctttaaaaaattaaaattatgcctaaaaactcattttaaaatggggaaatttaaataaaatccggcgccctgaggatatttttcaacgaggtgatgaaaaccccgaccaaccaaaaaatgaagaagatataaactgttagaaaaggaaaattttaatgtccaaaaaggcatttaaaatgtgggatttttttttgagcaattaaattaaaaatccgccaccaccgtggcgatatttttcaacaatttttaagtgtgtgacgatgaaaaaaaaatgggacattctccgacacacagcgggagagcagcagcagaagctcgccgccatcatcgcccaccacaaatataaataattgaaaatagaaaagtgtcaggggatgggaaagaattttttttttgcagtaattttttggaaaatttgagcgtaatcaattatttatttatttatgcatgatttttagtgggttttttgcataaattatcaaaaaataattatttttccgtttttttattcaaataaattttgaccatcaaaaaaatgaattcaatttgagtgaaaatttattattttttaaccaaaataggtcaaaaagaataatttcggcgaacggaaaagaacaaggaaaggaccaaaaaacaatttgcaaacaaatttttcttctccaaatttggcgccgtgggaaaaaaattaaaaaaaaaaggggctttaacctggttctaattttaaaaa

SEQ ID NO: 26407 - DNA, 1126 bp, Heterodera glycines
ttttcatctgttctcttttgtccgtttttcccctcggaaaaaagacattttccgtataaaattcaacaaaaaagagagtgtattttgtttatttttaacggaattttcccgtcaaaaacggtattttatacataattcaaagttaggcacctaactggactttggcttacattttctctgatttttgccatgaaatttgtcactttgttcgcccgtcgttggcccctttcgctttctgtcgccgcttcgtttggccgcgtcggtgcgacgcgcgccgcttcgacgctgacaattcgcgacgcattaaaccaggcaagtttttagggtttttggtcatgtattcggcatcgtttcaatcaatttcatgggttaccgaacccgaaattcgaccgtaaatcggattgggttttaaattgataattttttattcaaaccgtttcgcgcaagtccgaattttgccattttcatcgtccagcaaccccgaacagattccgtgaaatgatttcggtaacacaaaattaaagcgtgccgaaaattttgtttttccctcggtgccatttttgcagatttttaagtgcttgtgacataccatcatgcatttgtcgtattaaataatttctcatcgtcaacagcagcagtgtctcaatccgtctccactgatcgctcccatcgatcgtcggcgatttgcgacagtcaaaaagaaacggcaatggaacagaacggcacaacaatcggaggatgaggaggacgacgaagcacaggaggaggaagaagaagatgaggaggacgaaggaatgccaaccgattgccggaccaaagaattcacaatgctttcgcggaggtgccgaaaattgggggggggcatcaaaataaaaactatctctattggatgaaattgccaaaaaaaaacggataatttttcggcttcgaacccaaatgggaccaaatgcgcacaatttccaacattgacagtttccgatagatccccagaaacattatacaacaaggcactggttggggggaatagacaaaagcccctctttttggcattttctttcttctggatttggggggggacttaaggcccccccccccctcccccgaaattaaaaaaaaaatttttttt

SEQ ID NO: 26408 - DNA, 1581 bp, Heterodera glycines
cccccccctccccgaaattaaaaaaaaattttttttcaaaaatttttcaaactttgatttcgttccccctcccccggagccaagggtttggctaggctttaaacaaaaccaaaaaacaaatttccgagagtcacgacttttctgttttccgcaatttgtgtgcatattttccagcttttttgttcagattggacactgtggtcggagtggcactcaaaacgagcataaggtgagaaagtgcggcaaaacaaaaacaattctttcttttgtgtttcccattcatttcagcgcacttggcaattggattttgcagggccgcgttcgggtcaatgaaacggtaggaaaacgtaaaaaaataataaaataaattggccaattggtttaggtggtcatcaaaaaggcgcacgaggtacgatttttttcaattttgaaaagcatttattcgctaattgaacgatttggacgcattaatcattcacggacattttattgggccaacaattgaacggaattgagcaaaatggagttgaatttcaatttttatatccaaaaaatagtgaggggtgaacaaataaatggtcaatgaccaattaatttaccattgaatactttttcaaaaaattttgtttttagtaatctttggtttcttcaaactttctacgaaagtatttacaattagttcccttccggaccgagactctcgggaattgaccccgagactatcaacaaataaatactcatttctgtgtatcgcacagatagagcagggcgacttggtggaagtgtgggacgcgccgtacgaggaaaacgcgcggcttgccacggtgcaccgtctgcgcattgtgcggtgtcgttttgaccaacgcaaaggctatgtgatcaaaacgaagtgttggcccaattacataatggagaattgggtcagtggagatgaagcggaggaggagggagaagaagaagcacaacaacagcaggaagagggaagggaagacgaagcggaaggaacggcggaggaaaagggcggaagaaaaagtgaatgaagccgaaagttgtgacgacgaaattttatattttatttgctaaatctaataattgcgaaaatttaattgtaaatttgggtgctttgagtaatatgtggagggggaaggcacgaatcgcccggcacagatgacggacggggtcgaactcgcagctctcggtgttttgtcccctattttattaataggtgaattcatcgaatcaaaattgtaaataaattaggtaaattgcaacaatattaaaaatcgatgcgccattgcagtggaaagaaatgactccgatttatattattgtagcgagttaagctgattaaaataaacaacaaaacaaaaaggaaaattaatgatccttgatcgttgtattttttaaattagtgcttaattaaatgttttggcgttacgtttgaccccattatgaagagaatgaatcaaattggtggtccgattgaacaataaactaaccattaaaattgaatattttttgttcttccttacaaaaaataaataaatgtacaatttggggccattcaataatatagacatt

SEQ ID NO: 26409 - DNA, 1662 bp, Heterodera glycines
tcatattcatctaattgccggcttctattggcactcgggcaaggagcgtccgccaattaagaaacatcggcctcagaacatcggcaacaacaacaatcataaaaactcaacagaatgggcaccggcagagatttgctggcctccgcgcgattttgccggaggcagcggcggtggccgcagcaaaacgccgcacggtggccaattaacgccgccggcgcagcgccaaaggtccgccggccatttgcaggtggccattgcctacgaccggccgagttgggtgctgaccattcggctgatcgctgcccacggactggccacctgtggccaacagatgccaaatccgttcatcaaagtgtatctgttgcccgagcgaaagtgcgtgtggtgtgaaacaatttaggcgttgtttcttggcattttgtctcatagaagcatgcgagacaattcagtgcttagcgaaaactcagtcccagttatcattatggtcaatcgaagctgtccatatccagcgaaatcgccctgttttatccaattcattcccgtaaaattttgcccctcgtttttcgtagatacaatatcccaggactctgtcttttgaaaatttgactttcaacattcctgatacatacaatatgtaattttggttaaaattttttgggtctccgaaattttagccaggccctagacgaatcaggctttagctcccgacagtttttgatcataccgtagtccccagcagtggactcaaaaacattttttaagagtgtccaacaaacgtcgtactaaatacgtgccggccagctgtaatccagtttgggaccagcttgttgaggtacagcacagccatggtcatcccccgatttccaaatcgcttttacagtattcaattccacccaaccaactggagaagcattacctggagtttacggtaatcgactatgacagacagacgacggacttggacagccgaatcattggccaagtgcatgttggccttaccggtctgctggcatttttccaaaaatgtttggtctttttttgcctccttttagacccctcatcattgaccggaatgcctcgatggtagagggagggctcggaatttacgaaaaaaaaccattttttttgtgccaaggttggccctccaatgccctgcggtttcttctgagccaatgcgcggcaattcgtccccaatggacacacccttaaactatcaaatgctgccgaacaaaacatattacaatccgggtaattggtccataattataaagctaacaaaagcattgcgcaagttacggtactctcgagtgatggtaacttgggttacgatttattcatttttaatccgatgttttttttttgagtgatcacaaacttttgggactcggactaacttaatcccagtcaatttcgagaatccgtgctcaaaaacccccaaaattcttgacgagtcttatgacgttcagattccctactaatccgtccaatgctaatttgcccattttagctgctttggatttgttggacggatatccggccattgcctgacccaaaatgggctgctaattgctcactccgtttcgcatcgatcactaccaccacaattgcttcttgcttcggttgttcatcgactgtgtgatttgccaatttgatcagccattt

SEQ ID NO: 26410 - DNA, 996 bp, Heterodera glycines
ggatgcaattggagacctgacggacacattgttgtccgagtttgaccacccgcttcaactgcacacgccacccgacgacgacgacagcgaaggtgccctctcccccctacactcccttcccctccctctgcccaaattctgtccgtcccgggtaaatgccactaaatatggtccttttccctttcctttaccactcactttttatggcattttctcttttaatcccttcgcccccttcattaatctctgctggtcactttttatgtgctgaaaaattaattaatagcctccgtttaagagaatgtttcgtccgcggctttggctggtgccatcgttgggggagaaacgcgcagtttggaccggcactttgtcacttgtcaaagggaacggcacaacggacgaacgaagggacaaacggcggacaaagacattgtgagaaatgaatacttattaaactggactaattaaggataaatgaaatgattaatctcaattaaaatttcaaattcccatcagtaaaaaattagcttatctttttttcacattaaatgatcacattaaatattgccaaaggcacaaacatttaaacaagacattaattacttccgctttaattattttttcttcttttcagagttcgcccggtgttgctttgttggatccgtcatctctccacaattcgtcaacttctgcccaccagcgattcgcggtatttgtggagttttgaattttaacttaaaatttgatcaaaatttgatataaacccgaaaatacttttactaaattcggccgtcctcggccaatgaattggggggggggagcgaaaaaccatccgttttatccgtttcccttagcatttatccgtctctgttagcatttatctgtccgtctgttctatcgatcgatgcttttcgttgactgattaatcgcttaccaaccatttttgcatttgatcagcgaaatcactcccattagtgactaatcaatctcttaaat

SEQ ID NO: 26411 - DNA, 1180 bp, Heterodera glycines
aaaaaagttaaacaggatgaagtaaatgttgttttttacattattaagaaagatgagatagtacgtaaagtgagagaaataaagataaaaagtaaatgtgacagaacgccaattttaaccataattattagggctgggatttttgggaatcggtcgttttggcgccgccgttttggcgacgccgttttggcgccgccgttttggcgacagagtcgttttggcgccgccgttttggcgacagggtcgttttggcgccaaaaaatcagagacgcagaaataagcggcagacaagcgcctcttcaatttggtgcacaattacattccgtgaacccgaacaatgataacgatcacaattaccacattaacccaaatcaaaatcatcatatcatttttgaatttcttcgtggcgtttcgcgcaattatcatatgaacccatgaattttcttatttgtcttctttttgtttgttattgttagggccccgacttttagtgacgaaaaatcccaaaatagttaactaaaatagtgacgaaaaagtgccaaaaaagtgacaaatagtgacataatttttagccaaaaattgtgtaaaattaatttttattcactgatttcagttgcaaatgaggtacataagtactcaacatttttaaatcaaaatttgcaaagaaaaaaaaattttgggggaaaattttaagaaaattttccaattcttagtggattttttgaaaaaaaattttaggtcgattcttaagggtgtattttttgtttttattgcatttttgttaaggaattttgccaaaaaatgtcgaaaaagtgaaaaaatagtgaaaaaagccaaaaagtgaattttcactattttaagtgacaaaacgccaaaatagtgatttttagtgacgaaaaatgacgtccaaatgaaaaattttttacgcggaaatgcgttttttgagctcctttcttcaaaacaattgagcaaaaaaaaagttttttcactaaaagtcgcggccctagttattgttatttacatttttatgaaaagttttaatttttaaaaattgaaatcgatcttggattcacaattttttaattttggcttggcgccaaaacggcagcgccaggcgtcgccaaaacagcggcgccaaaacggcggcgccaaaacggcggcgccaaaacgatacagactc

SEQ ID NO: 26412 - DNA, 2504 bp, Heterodera glycines
  unsure (1)..(2504): unsure at all n locations
caatgatattttaatgccctctttttaaaaaataacaggaaaaaagcaagaaaatagccaaaagcctaaagaagtcctcttttatgttatacttagtttgtgccaattcctatttttatgaattttttccaaggcaatgatattttaaatgcctctttttaaaaaataacaggaaaaagcaagaaaatagccaaaagcctaaagaattcctcttttaagttgtacttagtttgtgccaattcctattttatggaatttttaccaagccaatgatattttaaatgcctctttttaaaaaataacaggaaaaagcaagaaaatagccaaaagcctaaagaagtcctcttttatgttatacttagtttgtgccaattcctattttatggaatttttaccaaggcaatgatattttaaaggcctcatttaaaaataacaggaaaaagcaagaaaatagccaaaagcctaaagaattcctcttttaagttgtacttagtttgtggcaattcccattttatggaatttttaccaaggcaatgatattttaaaggcctctttttaaaaaataacaggaaaaagcaagaaaatatccaaaggcctaaagaagtcctcttttatgttgtacttagtttgtgccaattcctattttatggaatttttacaaaggcaatgatattttaaaggcctcatttaaaaataacaggaaaaagcaagaaaatagccaaaagcctaaagaattcctcttttaagttgtacttagtttgtggcaattcctattttatggaatttttaccaaggcaatgatattttaaaggcctctttttaaaaaataacaggaaaaagcaagaaaatagccaaaagcctaaagaattcctcttttaagttgtacttagtttgtggcaattcctattttatggaatttttaccaaggcaatgaagacgtaaataatgaataaatatattttaattatattaataaataattcctgtttatccaaatagttttttaaggtgcaatgtcgtttcgtgaaagtgctatgttcaagatttggcacttttactaagcgcaagcaattgttggcaaaaatttttaattcgtccaaataaatttatttcggcattacaaatgctgtcacaaatgagataatataattaatgtactgaaggaatactcgagaattcagaaaaaataaaaaatgccatgaatatcaaaataattcgcgagcattttagtctaaatgaatgtgatacacataaacgtaacatgaagcaagtgattttctccctaaaaaattcgaaaaatttaatagaccttttcttcaattagttaaaaaattttcattatttattgtttttcaaaaggattttgagtcttttaaataatttcttcattttttaaaaatttttgtaagggcagaagaccagcgacgattgatgaaatttgcacaccgcaaaagtctccaaatgcaatgctacaatgaatggcggaaaaactgatttaaacggcatttttaaatcattaaaattaatttcgcaaatatttaataacggaaaaagtcataaaatgagaaaaacaaaatcatttaaaaatgccaataaaatatgtcaatgctaagaaaagtgaatgttgaattagaattggagcaattgcaagtcgatcgaatcagtctgccttccatctttccaagaattgattgatcagacggatgtgtagccctgacgcttggcacgcgcacgcccgatcagataggcgaccagcacaatgacaaccaggccggccagacaagcgcccacaatgatctattatgggtagagaaagcaatcaggtgcaattagaggagcgagaattttttaaaaaatttacttttttttaattaaaaaaggagcatttttaaaaatttcattttttaaatgtaggtgcatttttaaaaaattgatggttttttcctgaaaaatttcttaaaatttgcaaaaaaaaaatatttgaccaaaataattacagcaaaaaatctgctaaatgccatccatacctaatgttttaggaaattacaatgggaaggaacaaatattttttgtcaggaaaaaatcgggaaagtccaagggcaggatctgttttctgctgctgttcctggattatacagtgcgcaacgaaatgatatgtttcaaataataagaaaaatttttaaaagccaatgccagttgaaaaagtatggaaataaaaaatggcaaaccggaatcaaatcggaagttcgaacatccataagacatggttcggtggctgaaaaaagttataaatttgtatagacaaaaacaaaggttcaattatgttccctcccagcgacaaatttttttttttctgaatttcttagagaggttttttatatgtattttttttctaaatcttttcttatttttttacaatgcacgannaaaaaatttagaaaacttaatcaggtttttcaaaaaaaaaactaggaaaatatctctaaatttagaaactaaaaaag

SEQ ID NO: 26413 - DNA, 1022 bp, Heterodera glycines
ctgaccacagctttttgtagagctcgagctgctctttccaatggtctattcccggtctcgatccatgccgaactcacaaagatattaagagaaattgaaaatttgtttttcaaataagggaaattgttctacaaatttggaattttctcagaaaataaaaccgctcctaaagtgccgattttttctgaccacagctttttgtagagctcgagctgctctttccaatggtctattctcggtctcgatccgtgccgaactcacaaagatattaagagaaattgaaaatttgtttttcaaataagggaaattgttctacaaatttggaattttctcagaaaataaaaccgctcctaaagtgccgattttttctgaccacagctttttgtagagctcgagctgctctttccaatggtctattcccggtctcgatctgtgccgaactcacaaagacattaagagaaattgaaaatttgtttttcaaataagggaaattgttctacaaatttggaattttctcagaaaataaaaccgctcctaaagtgccgattttttctgaccacagctttttgtagagctcgagctcctctttccaatggtctatttccggtctcgatccgtgccgaactcacaaagatattaagagaaattgaaaatttgtttttcaaataagggaaattgttctacaaatttggaattttctcagaaaataaaaccgctcctaaagtgccgattttttctgaccacagctttttgtagagctcgagctgctctttccaatggtctattcccggtctcgatctatgccgaactcacaaagacattaagagaaattgaaaatttgtttttcaaataagggaaattgttctacaaatttggaattttctcagaaaataaaaccgctcctaaagtgccgattttttctgaccacagctttttgtagagctcgagctgctctttccatggtctattcccggtctcgatctatgccgaactcacaaagacataaaagagaaattgaaaat

SEQ ID NO: 26414 - DNA, 1719 bp, Heterodera glycines
  unsure (1)..(1719): unsure at all n locations
tcaaggcgatacactcattgtaccatcaggtgtgattatacacccaaattaaattccattaaataacataaaataatctaaatttataaaaattaatgttttaattgctttttaaatgatgtagaaattccttcatttttattaaatgtaataaataacggatttattccacagcaaaaatctatttccattaaatatctaaatgaataaaaaaaaaaaaattaaaatttataaaattaaaccattttaaattatttttttgaataatattcaattttcccgatttttagaaaaattatctataacactaattattttacaccaaaattaatttcatttaaataacctaaaaaataatcaaaatttacagtaattttttcacacctaaatttatttcgattaaataacaaaaattaaatatacaaaatttataaattttattgcatttgcattttacttttacataaacgaataatcaaatttcaaattcataaaaatatagccattttaattatttttgattaatgctgaatttacttgattttataaaagctcacagataaagggaattatcccaaaattgattttgcttttaataatatttgttaaacgtttaataatgaattgcatatatcatcagcacgtttaattattaataattacaattaaatgacttaataaaattaatttttaattttttacaaaatttaggcctaatattttttgtaaaaatgtaaaaaaaaaaaaaatttttttttgtgaattcaggatggattcattctgtttatacgcccgtcgattcgcttgtttttgttggcaatttcctgcacagttattcaattccaatgcaaattcgcatttcacatttggaagatcgcattcaagtgaattatatttgctagtgtcaaataatttaaaaaaattttcattttttatatttatttatgtcttagaaaaaacccattttgtgagttcctatggccccattacaggctaatagagagcaaatttagagctatcgaatgatataagaattaaaaatttgttatttttgaataaagttttatgaatatttttccgccaaaaaatttccactttttggttgttttatttgaataagcgacccaacacttttgacactagcgcctaaattgttatcagtagaaattttgatgatttattttcgtattttcagccagaaaaaaattaccgtttcccgcatttcaaacaaattttttgggctttcattgctcaaattgtgcacaaagccacacacagaatttatcagaaacaattgccagaggaagcacacaatagtcaaggatacagattttctgcgccaaaaaatgatcaaacggcaatgaattttgtcaaaattgatgatcaatggacaagggtcagtgtcaaattgtttaatgcttttatgtttttttaggtaaattatgattaaacaaatgggtaagatcatcggccccgaaaatttaggccatttttggtgtataccacgacacttactgatttgatcaaccccggcccctatttagttaacctcttataaaccccgatcccgacttttctcaccccgcagaagagtcggggcggcctgaacaaatcaaaaatgttacaattaaaatattttggcaagtacactgtgagctggataaagctgttanaatttaattgttattggaaaatttattanaagtttgatgtgatcaa

SEQ ID NO: 26415 - DNA, 1097 bp, Heterodera glycines
acgatgattgttgggtaacgcgattgatgtgagcacaaatattacaattttaggggattttttaatcaaaaaaatatataattaaaaataattagttgaaaatgattcctgcggcccttttatttttgggttgaacaggtccggttatttgcacaaaaaccgagtctaaaacttttaatcagaaatccccggtattgggttcaaccgggtattaaaaataaagaatttatcattttttacaatttctttgtctcgaattaacaagacttaataaatgttttcatctaatttgaaagcaaatcaattcggtctaaaaatatgaaaatctaattgttttgcttaagggttcatttacatttaacccaattcaaacaatttacgacaatgaggacagtgcgcaatttactgctacaaaaaattacgatattagtaagcaaacaaattattgcaattattagattttataaaatcaaacttaatttattaattaattctaagctctccagattatactaaaaaataatataatattttttacagattttcttcgttctctcccaccgctggtgatcaatgggcttttcccacttttgagatatgccgaacaattgctgactttgaagtatccggaagtaattgaaggcatcactcgacctcatcacttggtgcaagagtttcgggtgagaaaatgcattttataaatggcatttttcaaatggcatttctcaaccaagaaatccccgtacacatacatattaaggcacttcttgagaaaatccgtgaacttggtctgcattctgatcagtgattttgaagcgattcaaatgagaaatttcgagaaatgtaacagttaatttgttgctatatttttaaaattaattttaaatgcaattattttattttttcattgtattcaatttcattaattttaattttttttttatgatgatggcgaatgcttgaatgttttgtggacgtttgcgtgaatatagtctcgttgtaaaatatttttttggcaaaaagaaatttaaaaacgatttttgctaagttttttggaatttttcatttgctaaaattttttggcttttttattacat

SEQ ID NO: 26416 - DNA, 1482 bp, Heterodera glycines
  unsure (1)..(1482): unsure at all n locations
ggcgttcgcgcccgtttttcaaattttgttgcccttggacgggcgtttcgcgcccgtttttaaaattgttggtccttgacggccgcttcgcggccgttttcaaaattttgttggctttggacgggcgcttcgcgnccgtttctaaattttgttgttcttttcggccgcttcgcggccgttttttaaattttagaacagatacaaaagtgattagaagaggtacaactgtgattgattagaagaggtacaactgtgattagaagaggtacaacagtgattagaagaggtacaactgtgattgattagaagaggtacaactgtgattgattaaaagaggtacaacagtgatgagaagaggtacaaaagtgatcagaagaggtacaacagtgatgagaagaggtacaacagtaaatagaagaggtacaacagtgattagaagaggtacaacagtgattagaagaggtacaacagtgatgagaagaggtacaacagtaaataaaagaggtacaacagtgattagaagaggtacaaaagtgattaaaagaggtacaaaaattgaatgcaatttattataaattttaaaaaataaattaattattccttttattaattaaaaagagaattttgaaatgtacaataattgaatatttaaattaatatgaaattaatttttataaacaattaaaaaaaatatgaaattctttattaaaagataattattattttttacataaattcttttattattaatttacaacaaatctttaaatataaattgatacaacagtgattagtaaattcattaaattaaaatgaaaatatttttaacaaatttaattaaaaaaatacatgaaattctatcaattaaaaaaataattaatttaaacttataaaatttatttatcaaaaaaaaattaaattaaatataattttttatttattaactcaacaaaatattttattaattaaaatcattgaaaataacgtaaaaatgcacaaaaaaataatgttacaccgtccggattcgaacctgcccccccccctcaaaatgatgcctcagaatccccaatcacacagggattctgaggtcttaacgatgtcaaaagtaaaatctgattacgtattcgtgatcagtggcccaattaacccataaagacatgtttttggaagatttttattgaaaaaaatttttcactcaaaaatcctgtccaccccctttggtcccgaatcacaaaatcacttttatttttatatctttttttaaaaatgtgataaaaatgcaaaataaaatttatattatagagaaaaaaattgcggatttttgtagtattttacttttctncaatagcttttcagaaggcagttacgaattttttttctgaaaatctaaaatttccagaaattctggaataccttttttcatattgatgttaaaaacctaaataaatcccataaaatctcctgattttctctatttttaaa

SEQ ID NO: 26417 - DNA, 993 bp, Heterodera glycines
tggcgtggtgcgactttttgggatttgcaacttggggacccgacttttggggaccgaatgacatttggggatcccgacatttggggacccgacttttagggacccgacatttggggatccgacacttagagaacccgacttttagggaaccgacatttggggaccgaacgacatttggggatccgacacttaaaaaaaaaagtttttcttacagaaaattcgagttttcagcttattttttcttttttattcaatatttaaagaaatgtttaatcatttttatccaaatatcttaaaaaaaatttttttgttaatttttccaactctgagaaattcaagaggtcgatgggcgcattttttactgcatttttgttaagaaaatttttaaataatgtcgaaatagtgggcaaaaatagaggcgaaatgccaaaatagaaaagtccaaatagaggggattcctaaggacggataggggcgttaaaacgaagaattttcgcgctaaaaatgtatttttcctgcttttcttcattgaattcaagccgcagaaaaataagtaaaaacctaagaacgagaagcccattttattagcatttttaacgcaaattttgcccccatttcgtaacttcccatgtctccatgctttgaaatgaaatttagagatatgtgatgtatggcaaatgaatatgtcttcatatgaaatgttattgttccgattagtttgtccatcgccaattgtttcacggcacattgggcaggtgttgtttttctgaagccttaattatttgtgtgatcacaacaaattagattaacattttcgaattcaataccctcaaacaaaaagagttgttaaagcatttaagtttttttttggcatttatcctacagaatttttcaactgctttatagtgatctggatcagggtggcatggtaacaacgggtagttcgtacggacaacatttcaatttgggggtccatacaacccaaaaattgaa

SEQ ID NO: 26418 - DNA, 1370 bp, Heterodera glycines
  unsure (1)..(1370): unsure at all n locations
tttgtcggtgtgggtcttttgtctgtggatcttctgtttctatgccccttaacctaatgtntaatttatatttaattaaatgacgaatttgcgaatttttcttgcatttttggcaattgacttttgcctaaaatcccatcccatttcacataatttcccacttacattgacattgctccggtagtaagaaaagaataaatgcaatggaaatgtgtgaataagaaggcataattatttaattgacaattaaaaaataacttttatttctgtcaaaagataagcattaatttaggggtcatctgaaaacatttaactctttttttaattttgttatcattaattaattcgaaaaaagccaaaatgttaaattttcattatttgtcttcgacaaatagttaattttaggtaatggtttcataaaaatggaattgaggggtctgtggtgtcgaaggcatcgtcgtggacccttgcatttttaataaaaatttaacaagaatttcttcagatttacaaatttttttaaattttattatatccaaaaacttcaaatacttctaaaatcatttgaaaatttaacatcgtgattttttgaaattaaatttcaatttcgactctgataaaaatagttttcccattttttgagtttataaccctaactaactggaaaaaattattgaatgcattgttggtttgtgttcttgcataagcaaatattttggcaaatagttgctgttctttgtcctgctcattcatcgtaatttctttttcaattcgtctaattattgtgtcaatttgatttggcatttcactcaatgccatttccaaatactttgatttgccatcaatgatttccaaaaaattttcggcggcggttgcaaataaaaaattttctggcaccagacatttcagtgtattgataaacagatggtaaatatatttcacttaattttagatagaatttggctcagcaattgaataaaatattaaaaataaataaacataaattttcaaataaattttaataaatacaatttaaattttctgactttattttatttaacaatgaaaaatttacctatcaaaaaagttggttcactattattgaatgattgcttgtgttgatcaccattattggatatttgtgaagatgccccaacatgatcaacagcttcatacgatttattttctggcaaaatttgtttcattttttccaaattttctttgcttttgttttgatttttattgtcttctaaagaattatgcaacaaacattctttttcttcttccaatatttggtctaaaacttttaagcatgatagtgaaaaatggcttcacataaaaacaattgcattttcaaaatctcggcattc

SEQ ID NO: 26419 - DNA, 1133 bp, Heterodera glycines
acaattacacatgaccaatgggtttttccgccgaactctcacttgttgttgaccgatgtttcgctgatacggcattttctatcacgtataattcatccaaattcttaattactcaattaattcacgttttcgaatagatccccacgagaaattcgagctgatcgtcgctgatccgccgtggccaaatcgaacggtgaaaaggcaaagaacgtgcgtttggttacgattttgctaggtaatcctttgcatattttaaatttaagttaccaaatgttcaaagctggtcggttttctcccgacaatctttttgatcgtctcggccaccttccaattccccaactgcttgcggacgatggtcttttctgcatttggctaacaaatagcaagactgctcgtgaaatggcacaggaactgctcgagaaatgggaattacgcagattggcacaatggcattggcttaaggtggggggggggtgtaccaaatacgatacgatactatttaatggtcaacacccaatcattgaccaaaggcaacaggaaaagtggccacttggattttttaaagcgctaaaatttttgattaaactaaataattttcctaattggatctatgtaacaaaataagcattttcccggtacagatttgcaggacaggcgaacccatttgtgcctttcggcccgaacataaagtgccattcgaaagccttttgatcgcttgcaaagaatgctccgccaatgattggaaaattcctgacaacttttgcgttattaggtgcttcgaatttttcctcattctgattacaaatatttccgcagtgttccgaatgcaaatccgtcccgaaagcctccgatttctcttttgctccaacaacttggctttgttggccaagttcgcaatgggctcgaattgttcgcgcgatatttgctccccaatttcacttctgttggatttgaagcgacgaaattccaacaccaatattattttcattctgattaaatttagcattttcatatgataaaatataatttattgcttatgaacttcggataactttacgataaatgtacaatgttttttttataaatttatttgaggtattaataaaataataataacatatacctaattcaaa

SEQ ID NO: 26420 - DNA, 1405 bp, Heterodera glycines
tctttaataaacaaattttttatcacatagaaaattatcttttaaagtaaataatctattaaactaaaaatattcattatatctaaaataaactagtcattaaaaataatgaatttttcaaaagaatggttaaaataaattaaagacatatagaatagagccatcagtgataaagaacatatttaataaagataaatataccacttcataatagctaaaagtttattaattttcactaaaagtaaatagcaatattttagaaaaaagaatacaaaatataaacaaaataaaacattaaaagaatgaaaacatactttaataatcacaatatttaaaattttaattcttttttaacattataataaataaaaaataaataaatagttaatctcttataaacctaataagtttgtacatttgcaacatataaaaacgaatttataagaaaatgaaaaaaaaatattttataacttaaaatttatttatttgaatgaaaaaatattattaatgtttattttaaataaatttacttattatattaaaaacaaataacgtttattcaaaaaatttattttggtcaaattaaaaaaaccatttaagaaagataaatataaaataaagcaatgtcattctatagaaaatttattataaatatgaaaaaatataattttaatcatagaaagcaattgtaatttaaaaaatttgaaacaaaatcattacttttcaaattattatctgaataaaagaaaaaagaattttaacaatcataaaaaatcaataaaagattgaaaataaaaaaaaaattattttttgaattgattttcttaacttaacaaatttattataaatatacagaaaatgaaaaaaatacagagcttttgaaattttttcttaataatacttctaaagttgctagacattaaatgttaaataatcaaaaaaaaattcaatgatatacaatcatattaagagcttataattattatttgatctcttctgataaaaaatttaacataaaaatcaatagtaaatagggtattttagagtattataaaaacattataataagacgaaaattacacattaataatatagattacatcatatatttcataatacaataattaaaaggaaaatgaaaaataaataatgaggttaatattttaagtaaaaatagtataatattatattttttataaataagaactagagtgcaacgggaccgggaaatttgggcttaaccgggaccgggacttttttggttgaaaaaccgggactttttggctgggaaaaccggaaaaaaccgggacaaatccctgtcccggtcaaaaccggaaccttggtactcagttgtactcagttgtccgctaccaggtcccggtcccgtggcactctaaattaaaac

SEQ ID NO: 26421 - DNA, 1071 bp, Heterodera glycines
tgtcatcagttgttatgctctaaaaatgattttcggccgtttcgagtatatgtgaggtatggacggtccaaaaaaatggctatctctttttttgggaatctggtaatagaaatctctttggaaacaatgacagtggctgtcatcagttgttatgctctaaaaatgattttcgggccgtttgagtatatgtgaggtatggacggtccaaaaaaatggctatctctttttttggcaatctggtaatagaaatctctttggaaacaatgacagtggctgtcatcagttgttatgctctaaaaatgattttcgggccgtttgagtatatgtgaggtatggacggtccaaaaaaatggctatctctttttttggcaatctggtaatagaaatctctttggaaacaatgacagtggctgtcatcagttgttatgctctaaaaatgattttcgggccgtttgagtatatgtgaggtatggacggtccaaaaaaatggctatctctttttttggcaatctggtaatagaaatctctttggaaacaatgacagtggctgtcatcagttgttatgctctaaaaatgattttcgggccgtttgagtatatgtgaggtatggacggtccaaaaaaatggctatctctttttttggcaatctggtaatagaaatctctttggaaacaatgacagtggctgtcatcagttgttatgctctaaaaatgattttcgggccgtttgagtatatgtgaggtatggacggtccaaaaaaatggctatctctttttttggcaatctggtaatagaaatctctttggaaacaatgacagtggctgtcatcagttgttatgctctaaaaatgattttcgggccgtttgagtatatgtgaggtatggacggtccaaaaaaatggctatctctttttttggcaatctggtaatagaaatctctttggaaacaatgacagtggctgtcatcagttgttatgctctaaaatgattttcggggcgtttgagtatatgtgaggtatggacggtccaaaaaaaatggctatctctttttttggcattctggaaatagaaa

SEQ ID NO: 26422 - DNA, 1049 bp, Heterodera glycines
ggggcagtcccccccgaacccgatgcgcccagatttatgggggagaccgaatctcttcggagatagcttccctatagcctgtacttttattttgcggtggatttttgctcccccataattgtttgagtaccccaaacggacacttgaaaaaattgatttttttgtttttggggcagtccccccgaaccgatgcgcccagatttatggggagaccgaatccttccggaatagcttccctatagcctgtactttaattctgcgttggatttttgctccccataaatgtttgagtaccccaaacggacacttgaaaaaatcgatttttttgttttcggggcagtccccccgaaccgatgcgcccagatttatggggagaccgaatccttcgggaatagcttccctatagcctgtactttaattctgcgttggatttttgctccccataattgtttgagtaccccaaacggacacttgaaaaaatcgatttttttgttttcggggcagtccccccgaaccgatgcgcccagatttatggggagaccgaatccttcgggaatagcttccctatagcctgtactttaattctgcgttggatttttgctccccataaatgtttgagtaccccaaacggacacttgaaaaaatcgatttttttgttttcggggcagtccccccgaaccgatgcgcccagatttatggggagaccgaatccttcgggaatagcttccctatagcctgtactttaattctgcgttggatttttgctccccataattgtttgagtaccccaaacggacacttgaaaaaatcgatttttttgttttcggggcagtccccccgaaccgatgcgcccagatttatggggagaccgaatccttccggaatagcttccctatagcctgtactttaattctgcgttggatttttgctccccataattgtttgagtaccccaaacggacacttgaaaaaatcgattttttttgttttcggggcagtccccccgaaccgatgcgcccagaattatgggggagaaccgaatcctttcgg

SEQ ID NO: 26423 - DNA, 923 bp, Heterodera glycines
  unsure (1)..(923): unsure at all n locations
taaagaaacaaagagacaaacaacaccaaaattcacatcgaattgaaaatgtatgatgacagagttattaaacgataagggcatagagaaattggctggcgccgccgtcgttgatgccgctggtgtgccgttgctgctgcgcagccgccacttttgccgtcgtcgccgtgccatcgctgcctccgcaacagtcgcgtgccgtgcccattctctctcccgtccacacttttggcgcccaaaataaagatgatttgttgttaaaaatttaatgttttcgactcccgccgaaccgttgccttttggtaaatttggaaatcttaaaaaggatgaaaaaaagaaaatgcattggggatatttgcataacaacgtttttttaatttttaatttgttaaaaacatctgcagaagcttacccgaacacccagcggagaagccatggaatgcattgcgcgggtggtcggcggaagcgacgcctaatttttttgagatgaatgaaaattcgtagcattcctttttcaaattcgggaaaaatttttggttatgttaccaattttacaaaatttcgatccctgttttcgttagtaattcattaaaatagtgcctttgtcgcggtcgctgtcgtccgaaccgtcgccgtccgccgtgaccttgttgaagcggcggtgatcactgtgttggtggaagaggatgagcgggacgagctcgaagcggcggccatgatcgcggttgccgaacgagtgatctgaaatttggaatataaaaatttgaaaaatcgttagaaaatttttaaattttttctggcatgctaccccctataacaggaaaggatcgttcacaatttggtagtgtttttcagttagtacaaaagtttaatgtcctgntattaaggcaccgccaaattttacaactcaaaaatcacacctt

SEQ ID NO: 26424 - DNA, 1901 bp, Heterodera glycines
  unsure (1)..(1901): unsure at all n locations
ctgggaaagctacattccagcactcaaacgggcgagaagttcagtgcaggtgaccactcgctgatgcttttgttgttgggtcagtgcatggggaacttcggcaccctttttgttgatgaagccgagctgatggaggtaattgagcactgttgtctgatggaccccgaactctgctgcaggttggcgcgaactagaacacggatgctgctgaacgtgctgctccaagtcgtccgaatcgagagcatgtggccgtccggagcggggttcatcttcgagctgctcattgccttcacgaaattttgtgaaccatcgcttaactgtagaaagagagagtgcatcattgccctcactttcacaaatatttcgaagagcttgggttggggtagaattttttcggaattcgtaaagtaacagttgtcttaggcgaattttgtccattttttgaaaatcgttcgattttgcaaaagtaatggctatacaacaaatgcaaatggccagaagatggccaaccgtccgctgattcatcccaattgcctgcctccctttttcaatctgtttagaattaaatatcattttttgcataatttgttttttcagagggtcagaacttttcatcaacccaatatgttgttgggtcatattaacttgccataggagtagcatgtgtgctaagtgattgcagttgcaaatgagctacatttcctatataaaattctcttagcaaatattgacattttttaaatcaaaaattttgtcaagaaaaaaatttgggggaagaatttttgaaaaaattttccaattcttagtggtgtatttttttgaaatttttttagatcgattcttaggggtatattttttgattttattgcatttttgttaaggaattttccaaaaaatgttgaaatagtgaaaaatagtgacaaaacgccaaaaaagtgaattttcactattttaagtgacgaaacgccaaaatattgatttctagtgacgaaaaatgacgtccaaatgaaaattttaacgcagaaatgcgttttttgagctcctttcttcaaaacaattgagcaaaaaaaagttttttcactaaaagttgctgccctagtgatcagcgaccccgaaaacttataaaaaattggttttaaaaataaaaaaaaatttatggggcgtactgcacaagtaccaatttgtcatttcctctcgtgtcgtaccccccccccccccgttcaatttcagaaacttaaaaaaattcgaaaatttcacaaagaaaatttttgaaatttttcagtattttttcaaaaaaagttattaaaatttttattatttactttatctagaaaaaatatttcttgaattttgtggtaattaaaaaacctcgaatttttacgaaacgacatcaccgcatttgactttgaagtacggcacagtggcatttgtagggaaaaattttaacgcttttaaattttgaaacatagactgactgacattcattttctatttgttatttttgcattcctcggtttttctgggatcgtttcacttttttcttaccgagaaaatttgttcaagtattaacctctgtttagtttcatttcttaatgtatgattggcttctctgctgcagtgattttttctttaattttcatttatcgcatttttggcataaaattgggcgaaaaatctttttgagctttaaaatgtgaaggacagcctttannatatttctgagttttatttaaaattattatacaattgaaatttattcgcgtgattaatcataaagcgttgctgctactcagccaatgcaattggaaccgtacaattgaagagacgattccgttcaaattgcttaatcttcctcatncttatgctgatcgtctcccccattgggcttcgcttcacaccca

SEQ ID NO: 26425 - DNA, 998 bp, Heterodera glycines
tggcaaatgcctgtggctttattttcgttgagagatcctttaggagagagcgaaagagagaaagagagagaatagagagtgaggagagagagaagagagaggatagagagagagagtgaggggagagagaaaatgggaaagaaagggaaaagaataggcaaaagggggagagagatagagaaggatagacatcccgaaagcgtaaaagcataaaaaatgaatagaggacaaaagcagagatagataaaagcatagaattcgccatctccgttgcccatattaagagaacaaagctcagctaaaaaacgtaaaaccattcctgaatttttgattaataattaacatttattttttgaatttgtaattaaaattttaaaaagttgaaccgttaagcaaaatataaagcgaagtggggaaaggtcggagacgaaagggtaagagaaaggcgacttcgtaaagatttaataattaacaacattttcaagttaatttagtgagcggacaattttttgttagatttcggcaccggcggattctctccccccccccaatgtgtgaaaaggaaaacaaaaaaaggaaaagacttcactgggccaaaattaaaaaaacgatcgatcgcaaagattttccgctgaccccccccccctcccgcccagggcattgaacatgataataataatcatcacatttattcaattatttaccatttattttgtaatccaaatgtcacattttatatatgtcctaaacaattgtctctcttctagtgggcggttctttgatcaccccctctacatttgattacgcccccggggactttctctcgatcactcttttattcatcgggcctctcccccggcagtctctgctcccgagaccgaatcgggaagaaggcctaagcattgtatccttcccccagaataaaggcgtactgttgcatactgtattaatggggaataaaggaatacaaatggccctatggtgacatataacattca

SEQ ID NO: 26426 - DNA, 1177 bp, Heterodera glycines
tcggcctcttcgcggcctcgtggtgggccttcgccccctcccccccccgcccttcaaaattttgaaaaataaataaaataataggagactcagaattttgaaaattttttataaaaactgatgacaagctaatgtgataaaacaggttaattcttttcctttcagtatccctgcaaagtttggggcgcttctgataagtttctgaaaaaaaagataagcctaaactttttggcctgtttaaaaaggaattaaaaatttttaaaaatttattcatctccctttttgatagaaaaagcatcagagtgcctaaactagcatgtaaataaaatttggtgcgtttcagagcattttgtgaaaaaaatatttatgaattaattatgcaaaaaacaaataaaaacgaaagactcagattttcgaaaatttttttgagccagctagctcggcgctcatttcagtgtaagttagtcctttaccggggagtatccctgcaaagtttggtacgcttctgctcaattagcaaaaaatatgagtgatcgaattttcactaaaaaagttaagcctacattttttggcatatttaaaaagcaattaaaaaatttttaaaatttaataattttcctgcaccgaaggtactcactcggcctcttcgcggcctcgtggtgggccttcgccccccccccccctcccacgcccttcagagcacgacaaatatttcaacaaaaattttgaaatcatgtttcccactcccttctcccaggggtattattttgtaaagtctttttttccccaataaacttttcaaaccccatttttcgcaccgtgaatgttatttttatcgaattctgaaccgttttgagtagattagactagaaaaaattgaaaattttgaaatcatgtttcccactcccttctcccaggggtattattttgtaaagtctttttttccccaataaacttttcaaaccccatttttcgcaccgtgaatgttatttttatcgaattctgaaccgttttgagtagattagactagaaaaaattgaaaattttgaaatcatgtttcccactcccttctcccaggggtattattttgtaaagtctttttttcaaaataaacttttcaaaccccatttttcgcaccgtgaatgttatttttattgaattctgaaccggttgagta

SEQ ID NO: 26427 - DNA, 1391 bp, Heterodera glycines
  unsure (1)..(1391): unsure at all n locations
tttttttttttttttttaaaaaaaaaaaaaaaaaaaaaaaaaaaggggggggggttttttttttttttttttttaaaaaaaaaaaagaaggaggggggggggggggggggaaaaaaaaaaaaaacccccgggggggggttttttttttttattttttttttttttttttttttaaaaaacaacccccccccccctttttttttttttataaaaaaaaaaaaaaaattttttttttttttttttttttttttttttaaaaaaaaaaaaaaaaaaaaaaaaaaaaaaaaaaatattttttttttttttttttttttctttttttataaaagaagaaaaaaaaaaaaacactctttctttttttctttttccgcgggggcgggcgggggggggggggggggggggggggggggaaaaaatttctccccgcccccccaccacaacattttttttacaaaaaaaaaaaaaattttttctcccgggggcacaaaaaacaaaaaaaaaaaaaaagtttttttgtttgggggagacccccacacagggggggggggtttttttttcccccttttttttttttttttttgaaaaaaacttttttccccccccaatttttcccccttggggagaaggtcccccaaaagctttttttttccccaaggccttttggggaaaaaacccccccttttttttttttttttttaaaaaaatttttttttcccccgttggtttttttttttggggccccccgttttttccccgtcccccccttttgggaaaagtttccccaaggcctttttttttctggggtacccttaaggaggcccccttaacaaatttttttttttggttttttttaaaatttgggttttcccggtttcgggtttttttccattgctttcccttcccgcgttcccactccttattattttggcattgctttcattccctgcagctttcttgcctctttctttccttcagttagtctctcattgctattcttctctatcatcttcgtggactcatcagatttcttctatcccttcttcacttcctnttcttcgttcgtcttcttttcatgcccttccttccccgtctcactctctgttatcttttcattgctcttcttctctgtcactttcttggattcctgatcgcttttcttcttgtccttctttttcgcttccttttccatgtttgtcttcttttcattgctctccttccgcgtctcactctctattatcttcccattgctttctttctcaggaactctctttgcctctttctctccttctgttaatctctcattgctcttcttccctgtcaccttcgtggactcatcactattgttcttatccttcttcttcagttccttttccgagtccnntgactctaga

SEQ ID NO: 26428 - DNA, 1663 bp, Heterodera glycines
aaaatagtacggcaatcttaaataagtgtcaaaatgtgtcacattttgaggaaaatttgccaaatgtttgtttggcgtaatttcaaaacatttttcatcgttaggaaagggtccgggtcttatcatcttatatttatcccccatttataccagtccgtgttattcccgggtcctatcggctcatgacactctagccccctcattagctgtcgctatagtccacctcggcacatagtcatgactcagttactgatattggccgtactccttgtcttggattcggtcaagagcatgtggcatcatcgtctcacatccctcatcccatgcgccttgctgctgctgctgttgttgttgttgctggtggtggtggtagtgttgctgctgctgcggttgttgttccacatgcacaacttgagcccattgtggtggtggctgatacgcccattccgccggaagttgcggcccaatttccaaatgctgctcgggcagaggcgggtccagttcccatggctgatgttgtgggccttgcccatgatccatgcccatcagctgcccatcatccggcgcctgttcaatcaagattaaaattcaaataataatcaaaaaaaaaagaccaaaaaaaatctcacagcgaggaccaccagcccgtcgtcctggtagttgtggatcagcccctggacgacggtatcaatttcgtcaaccaataagctgaggcgtgcacgcagttgctcacgctcgttgcgacgtctttcggagttcattttcttggggtgcgcgggcgagtgaatggaagaaataaaaagagggcgactttcccatgtgcccttgtatatgagacgggatcgtggccatctgtgtagccaaggtccgacgctgcggtgaccgatgcgaacggggtcaaattcaaataacaaagggatgtgcggcatttctgaaccggcacaaaagagaaactaatgcatcatgccgctaccggcgatgcgcttgtcacatttacgggtatattcaaacacaaaagggattcaaaaaaattaagacacacggattaatatttttaattattagaacaatatgaaatggtgattaaatgcaatgaactatttagcaaaattattagtctgttataaaataggtaatcaattcatccatccggcattgttgttatgtaccatttgtccactttcattgctgttgttgttgttgtatgcgttgctttgattattcccagtgtcaaagtgcgtgcgattgttttcgaaattgccaaatgttgagttattattagtgaagctgcttctaaagcgattgttgttgtaatcgttgtttttatttgcacaattcatgtcgctcaacctcatattaagcgaaacacacccaatgcacatgtgaaattgcacttttacccctcctaagggatcgaactcgaaagcataattaccgccgctgttgttttttgtcgaattgaacaatttttgtgagcagcaatgacaaagattgaaagttagaatatacttttttcgtaaaagtttccataactgagcgttagtattgttgacgctgttattgttgctggtgttgttgttgttgttgttgttggattcttccggcatgttttgttgaacattattaaaagtattcatttttattttgcaaaaaaaaatcttgt

SEQ ID NO: 26429 - DNA, 293 bp, Heterodera glycines
cggtgtcatctatgttactagatcggggatcgatccccttgcggccgctcgagcaggacctgcagaagctagcttgatggggatcagattgtcgtttcccgccttcagtttaaactatcaagagagggaggagagggttggggaaggaaaggaaaaaaaaaatggaggaggagaaagggtgggtggcggaagaagaaaagggtggggggagaatgagtatgatggtcaatatggagaaaaagaaagagtaattaccaatttttttttcaattcaaaaatgtagatgtccgcag

SEQ ID NO: 26430 - DNA, 1437 bp, Heterodera glycines
  unsure (1)..(1437): unsure at all n locations
ttgctgaccaagtggcggtgtgtgagtgaccagcacgtcgagctnnttctcgggatctgattccacttctgcaacaagtgcttggcccctctggcgataaaatgcgtagccgggctgaatgcgtaattaatcagattaattaattgccaanttaccgattctgcccccccccccctcnccattaatgcgattaaacgctaattggttaatacacccaatttttggcccagtaatttcgattccggcacttatttttgaccaattaatggaatattgaccagttgttgttacagtaacctaccatcggatgccacggcgcaccgtacactttcaaaccgaacacctgtgacaaatggttgttttagttgttagcctataaaaaaaatatatattcttttgtcatgcctcaatttgccgatcacacaaataaatgcaattcgtgagcaattcgtacgcctaaagcaaaatagaaagaaaatatttaaaaattattctcaaaaaatttaatagtttattttaattttaagttaaaaaaaacaaatgcatgcttttgattaatcaaatcagttcgaatagtgattagcacaaaaatattaatttgttttgatatttaaattggactgagtttgatcgtcttaaaccagatgattcgttgtttggaccatattttgattcaaacagatattttcaaactgatcggatcacaagatcctataaagaccaatgtaccccttccatgtctgattgtgagtcggcactaacacgtgattgatcagatccattaaaatggacacataaatccttttgcttggattacatggtctgatcggaagaggtaattttggatcgtggtctgatcagactaggaaatgccgatttggcaaatgccatgccataccaccttgttgattcccaacatggacagcccggccaactgtcgttcgctcatctcctcgccgtcctcaaagcccagctcgtggttgccgggcaccacaattttcactttgtgtggcaatgtgcctgaagggcaatgcgaaaaatttgtgccagcctatgactcagcaattaaattttaaattttcacccaaatttcgtatttccgatgccgaaaattctccgaaatccaaaccctttggaaaaagcggtgatcaattaattatatcccatccctttgattattataatgtgttcagttttcaatagcactaatcagccgtggatcactgatcagagatcactctcgttactgacctatttgctgattgaatttgatcactgcactgacgtcgccgcattccgtgaaatcgcccgcatggatcagcacgtcactggaggagtggagagaattttttgcttgacaattatcaaaatcaaaatttgctgctggcttacccatcccgggatcaaatgcagaatttcctccaaactgaaatggga

SEQ ID NO: 26431 - DNA, 2073 bp, Heterodera glycines
  unsure (1)..(2073): unsure at all n locations
tgattgaaatgcatgagaattgagtcccagtgactggaatgctggagaattgagtcccagtgactggaatgctggaggattgagtcccggtgattgaaatgccggaggattgagtcccagtgattgaaatgctggagggttgagtgccggtgattgaaatgctggagggttgagtcccggcgactggaatgctggagaattgagtaccagtgttcggaacgccgtagatttgactcccagtgattgaaatgagggttgactcccagtgattgaaatgcatgagaattgagtcccagtgactggaatgctggaggattgagtcccagtgatcgaaatgctggagaattgagtcccagtgattgaaatgctggagggttgagtcccgttgattgaaatgcaggagaattgagtcccagtgattgaaatgctggagaattgagtcccagtgttcggaatgccgtagatttgactcccagtgattgaaatgccggaggattgactcccagtgattgaaatgcatgagaattgagtcccagtgactggaatgctggaggattgagtcccagtgatcgaaatgctggagaattgagtcccagtgattgaaatgctggagggttgagtcccgttgattgaaatgcaggagaatgagtcccagtgattgaaatgctagagggttgagtcccagtgttcggaatgccggaggattgagtcccagtgattgaaatgctggagggttgagttccgttgattgaaatgcaggagaatgagtcccagtgactggaatgctggtgggttggtcccagtgactggaatgccggagaattggtgagatagagttccgatgattgaaatgccgagggttgtttaagaaatgacaagaaacaaaaaggccagtagaatgttaaaatgttttgcctatgtagaattggtgagattgagtccaggtgtttcgagtgctgatggattgagtaacggtgattgaaaggtcgtagaactgagtcccagcgattggtatgcagaagaatcggcgagatttattgttggtgattggaatgcaggtggattgagtgattccaagtgattggaatgccgaagaattgagtcccaggccgcgaagcggccgagccattttcggttttattattcatagctcaataatacatcgtactacctagcgggggatgcgccgaaggcgctttccccgctagttaggataaaaaattttgtatttaaaaaataaaataatattagacagcagttaagtaaaggaatttatagataagactattttcaagagaaatttaaataaattttaataggaacatattaaaaatgctcaaaaatacaataattaacctataattttaaaataattaaatttgcgcttcacagcgccaaaaaaatttttacaaggtgcgaaggataagaatctttttttcagcaaagaggtcgtgaaaaaaaactcattaaaaatgcagggaaataagaaaatacatacaatttaatacatagcagttaatttttaagaataaatttaagcaaagttaaggaaacaaaaaaagaaaacataatataaaaagaatattaatgaatatggtctattttgtgtttttaaaaattaattaattattttatttaagaagtttttcttctttcttagccaatgcaacattttatattataaaagttaaaattaattcttaattttaaaatattaaaatagaatagaacaataataccaataaaaaaatttataaagtttaataggtgcataattcttaataataataataataataatcatttttcatcaacaaaatatcggtgcgatttcagtgaatgtcgaaaacaagggtaattaaatgtgaatttaaaaaatcttaacatctataacgcaaatcttaaactaccagttctaaagccattttaatattattaaggtgcaaattaaatttaaattattaatttaattanagttttattcaaaaggtagtttataacacatctcttnnaactgatcaaattaagaaaattaatattaaattaaaatanaattactataaacgatgaaat

SEQ ID NO: 26432 - DNA, 1520 bp, Heterodera glycines
aacaattggtgtaattaaattttttatcaaaaataaaaacttctcacaaagtttatggaaaaatgtgattgataaatattattattttaaaagtttaaaccctaattataagaaagcaaacaaaaaacgaaaataaaccctgaagacaaaaaaagacataatggcattaaaatggacaaaagttaaatacaataaaaagggaaattttcaaatataaaaattcacatgatcaaaaaaggcgcttcaaatggacttacgatctcacagtcggtttggaggaggcaaaccgaggtcatcatcattaaagcgattcaaatggtcgtgctgagccaaccattcgtcgactgtgtcctcgtaaaagaaatggccgagaagagaagcgatctgaatgaaacaaactaatggcataaacacggagcattggttcatccaatggttctttttttaattttagtcagggttcggagggtttgcagcgtaaccttcccctttccctaccgtctttcggagttttctgaattcttcctccattttttccagttcattttgtgtctctttttcggtttcattactgcttatatatcgctcaatcgccgctttccatcgcaacaaattcagttcttcaatctgatattacgaattacattaggattccaccggaatcactacctcactgtaaagttcaacaccggggaattgacaatcgcagaatttgaattcaaaaacgaatggaaaagtgaatcctttgcggacaaatttggtggccgaagtcgagtgacgtacggaacagttcagaaactccttaaatatgagtaaatgtaataaatcgaaataaattaaataatttaataaaacctgcatgaattggtcggtccgttcttctcttttgttcatccattgcgaaacaaaaatcgcttgccgtgccaacgatggaatgccggcggggagaagttcacacaaaggcgtagtgtgggaatacctttgccatcccgtcaaaataagcccagtcaagcggtctttcaaatactaaaaggaaaattaagcaaataaaatagcgtactaaagcaatcgccaaccatttcattctgatggtaaagcttttggtaagaacgcaaattttgcatgtatcgctcaatgtgcacgaattgttgggaaattccgtcggcgcctttgaaggcaccggcaaaataaatgttgtcaaaaaccttaaaagaggcaaagctgaaagattgcaataaaaacacgccacttggctgaaacgttcaaaaagtccgtcggggaaataccctggccgagccacgtcgagtcttataccccccaacaacggggacaatcggagagccgagtttatattcctccggcggcgcaacaggggattttctcgaacgtgtcattccaaaccgaaacctgctcgaaaccgaattcctcctttgccattcgggcaacgctaaaatgatataattcatcatggatgttttgaaatgtttttggtaagaacatataaaaaggggagtgcctaa

SEQ ID NO: 26433 - DNA, 1599 bp, Heterodera glycines
ggggcacagcactcaaaccaacacacttttggctgtttctgtttctgttggtggtgggggatgaggccaaagttagtgacgacgacaacgccggcgggcagggggcaaggagagaaagtgcgtgcgatgatatatttgtggaaaatgcaattacacccctcttctgctggaggagaagggggaaaaagtgggggaaagaaagaggagagagagagagaagagagagagagagagagtgaagagagagagagagagagaaaagagagagaaggaaagaaagaaggaaaaagagagggagaaaagaggagagagagagagaagagagagagagagaggaattatattgtttttatttatatttttggttttcgtgaatttaagaatccccaaaatttcatggtttataaaaatttttcaaaattttaatttcacttttttcgagaattttttgcccattgataatttttttttttgtatcagttaaaagaaatcggtttttaaatgactcactgatctgattttggctataaaaattggaggagtacttctgatgctttgctattcaaatttaataaggaaaataaatgtgcttcattcaaaagaaaaaaaagagttacgtgctgcggatttgaaccaaaacactcgctcaacagagtcggcgtcagtaccaactgcgccatttgcacgacaaaaacactctttccaaaatgattcgtaaaaatttcgtggttttaataaaaaattttcaaaattttaattttcacttttttcgagaattttttgcacatttatcttcctttaactttattttaattaatttcgcacttagaataaaaattttttaccattttttgacctattttaacatatgaatgtttttcaaattggaacaatgtcaatttcctcccctatcagattgtcttttactcgatgatcagtatttccttttacttcctgagcaaaatcagcatgccggacctctaaaatccttaattaaactttcttagccaattacggtttcagaaaatcataatttattctaaaggcacacacaaagaaacattcgttgatcactgcgacaaaaagaacaatttttatgagcacttcaaaatatctccacatttcaaattggtcgatcacttcttaatatccattctttcacctctgctgatgaccgtgagttgcgttgagaagcataaaaaatagtcaattggcacgacgaattgtaacggtagattgatgacaatgatgaaactgacgggagatgaaacattggcaaaagcctaaaatacggaaatttaaaaatataattaatcagttattggtacgcactattttgaacgatgccatttttagcaagcacagacgttgacgctgaacagaacatttcaacctttgccacattgtccggacgatgtgtgaaaagccattttgccaaggcttgtccatccgatgccatggcactatgggccagcaatttggtgaagaaatcgtcacagcagatggagaaaacacgaagcgatgaagaatcgttgagaattgatgggataacttgtcgaaaacggcggaagattctgtcggataataacttgcatcatt

SEQ ID NO: 26434 - DNA, 1241 bp, Heterodera glycines
  unsure (1)..(1241): unsure at all n locations
aaaaatcctttttttatncgagttaaaacgatgtgaatacacgcnaaatcaacgttcttccaaatccatntagcgcgagccccgggctgattaatctgaaaaggcaaagacagcgattngacaaaagtaagaaaacgtccaacttctctttaccttacaacgctcctttgttcttggatcagttgagagaagaccagctaaagaacacacaaatagccattaatcttggcacattttgatcaacactcacnccaatcgaagtcgctccatagtttcggggaaaagcgccgccagcccaagtgccgctccttgtctgacggcgcgtgggatcacagaaaggacccccgggtccgtccaaaaaggtgcgcttcgatgtccactttgccgagctgaccggcgacaatcatcggagccaagagacattctctgaagcaaagggattgttaaaagcgaccaataattcctcgcccttccctttttattgcctcgcgaggagcgaacggaacgtgcaatagtgttgcccattgactgtgaaaaggccggtgcctccgtctctgaccacaattttcacggcggaagccctcgtcttgcaaattctccagcattctctcctgccatcttcgtttatcgtcacctgcaacaaaaggacgcattaacagtttaacgtacaaaagtgagtatgccaattcacctccggtacttttgcgcggaaaagtctatttttttcacttgctccaatcccacgacgcaatgacatgataaagtcctcctcctccgcggaatttggcaattgcgaaatgtattcgagcgcaattataaaatttgcatactgaaaaaactgatcgagtcaaaaggatggggtgagggacttcgtcatcggaaaggatctcctgcatttgctgctgcagctgatccttcgtcacccattgggtgcccatcaaattgatctgtcctttctcggccggtttttctccgagaagtgccaattccatcgtttgcatcttttcaacttcgttcacttttgtctgatgtccgtcgaatgcattcacaagtttttgtgtgcgtttgtttatttccttttttgggataaataaaattaaaagcgaatggcaaattcaccgaaagcaaagaatagaatttgggtttggcagtgaaaaacagggaatgcttcggagagccggaggcgtccacgtcaatctacgggattttcgggaacacttcctccngggggtttcatcacg

SEQ ID NO: 26435 - DNA, 1200 bp, Heterodera glycines
aaaagtggaaattattgaagttatttgttaataaaatttatacagactagaaaaactttgcgttttttataaggttaatagagcatgttaagagctttcgaatgatacaaagattgttagatttagatgccaaagaaaaaagcttaagtggaaaaacgagctggcgccgaaacgggagcgccgaaacgggagcgccgaaacgcgtgggtccctcacatttatattcatgccagttcagtatggcaattttagtccgattcgagggcatcaattttttttattaatgtttctacctcgaaacatgcccattaatttataatttgtaaatttacaaacagttacggccttaaaattaaaaaaaagatcgctttgaggcattccagcagacttaaaactaccagactaaattgacccatatttcaagtgcatttaactgacaaaattcgccaccagcacacattggacagtgaactcgtgaaagcgttcgtttggttgacggatctgaacggttcgaaaaaatcttattagttgataacttttggtaaattaattcccatttattaaatattcggaaaaatgacgttaattggcactcagaataattcggaaatttattagtaatggtgctcaaattaggaaattttaccttcaggtcgcaaagagtgacgcgaggaaagtgcccactgtgctcccaagaagagccatgagttaggaagctgttcagcatctttaagaaaagcattttgacaaatatttcccataaaaaacaaaaatttcacgggactaaaatcaaaacaaaaaaaaaatattaaaaattaaatttaaaaaatattttttaaattatgccccacacggaacaaagattcaaaggacttatgatgattagggacgggatttttaggatctaaaattcgaaaataactcaaaacaacatttaggttatttagagagtaattcaaagttaatgggaaacagaataaatccaaaaatgcgttcccattaattagtttcaaatgccatcaattgcgaacactcaccgtccatccccaattgggcaatttgtcgacacccaaaaacatgctgatgaatttgaactaaacgaattttatattaacaagcaattaattgatggcattttcagtgtgaaaatgccaaaatgagtgttctcacctgaacaatgttggcgattaaatacagaaa

SEQ ID NO: 26436 - DNA, 2076 bp, Heterodera glycines
ttttcattttgtgactcttaaagtgaaacggagccgcctaccgaccccagtctgtcaaaatggtgacggacagaactgaccattccggctctgtactgctcgcccatctttgccacgtattcgccggtccattgggccgcgttttgtgtgttcaacgcaatgtattggccagttcggatgagaaattgagcgatacgttcgcttaaacattttcgtcgatatttttcaattttccttcgctttgctggtgtgctttgtaagtacctggtcctctcgcgttgctcctcgctcattctgtccacaatgtcgctgctgttgagcaccgcaaattgcttcaaggcatatacaaattcggactcaagtccgggcgccaacccgcgaggtaaaatgataccgacgaacatattcggatggtcagggcttgggttcggcatcacgtaaacacctaaagagagaattttgagcagtttaaaccaatagtaggcaaataaaaagcattttggcaaaaattacacacccaattcgttcttcagaattgccgttttgcccggttccaatgggtaggcccaggggccgacttggatgaaagcggcgggcgaagaggacgccaacggtaatgtggccgcgtctttcgcttcggtggtggcaccgctcgctttctccgtcttttgcgcttcttccggcttagtcaatttgaagatggccagcgaggagggcggagttggtgcatttgtttgatctccctggaaaaaaaagaaatgggagaccaaatttggtgacttgtcgcgattatcgcaaaccaaaaataaaatatttttggaggattttgtttcaacaaatttcagaagattgtaacccaaaaaaatgtttttattattttacttcgatcaccacaagctgaacaccgtccggcagccaatagaacagttcggcgtcggtggttgagccggcaatggcgtcgctggcagtgaccagcgaatggcgaatgttttccaccgcttgctgtagacggaaggaatttgtgtatccaaaaagagagtaacaaaaaaaatttgactttttaaaaaggtcgtagacctggacacggacaactgagtacctaggtcccggttttgaccgggaccgggaaattcccggttttctcagccaaaaagtcccgttcccggttttgcccaaaatccccggtcccgaccaaccctaatctcaacataatattaaaaaagaaaaaaaaagaagacgattcaaccccttggcccaatctataagatgatggttaaacaaatccttaaccataaaaaaattccaagagaggcacccgaagagctgtgggatatgtggctctctttattagtgggaaattatttacagttagtttattttaaataaaatttctgattggctcaaaaatttgccacatgattatcgatgacaattattttcgttattccttttatttttgttaaaaaaaggtttagaaatacttctttcgtggtcatttaaccatgagttggtggtaactcataggccgggggttaccaccaatttcgtgattatttaaccataaccacgttcttgttcccacccgattgtccacgtgcggtgctttgctgcgaatggtgtcaatccgatcggccaccatcccacggaccctctccaatccgttgcgaagtccgctcagtcgttccgtgtccaattgcagcgctttgtcccccaactctaacccgcgctcgtacattaaacatgcattgtcctaaatgagttttccattcttcgtcttgaactatactcattttgaaattttttcggttcaaagaatcacccggtcgtccacttcgtcgtagcaaaggccttgctcaataaaagcgtacgcatcggcgaagagactgtcaatgtcagccgaagccatcgaccaaagagagaaatgaataaataaaatgtaattcaaacaataacaaacagaaacagacagtaaattggcaaaaatggccttttccctcaagcaaaccaaaatttcgatttttcaagcaaatattttattccttgtaaattttggaatatataaaatgaaacatttgg

SEQ ID NO: 26437 - DNA, 2197 bp, Heterodera glycines
  unsure (1)..(2197): unsure at all n locations
cagtatttgggatatttttatccacatttttgctaatttgttcggcttgtcgtcgttcctcacttatgcatttccttttttccttttcactatcatgaatactctttgctatttgaacatgggttgcacaatttggtcgtttagttggaaaatttaatttggaaaaatctaaaaaatttataactacttaattatgtaatagtggtgcgccgtgactgaaaaaacccgtgaaatccacagttttcgtaactatgaattttttgagtttattcgaatattattcaccagtttttaacaaaatcataattaaactgaaagaaataattgcattttcgcgtagcctgaaaaagttttgaaattttggttaaattccgaattgttattatggatgctaggtcgtttcttaaaaaccgccactatgggcgtttcttaaagccgccaagaggtagaaaaaaaatgtaagacatataaactcataacttcgcttaaattcaatcaaattaataattcttggtatcattcaatagcttttaatattgtctatcagaatagaaaatttttatacaaaattataaaagtttacagggatttcttcgaattatttctggcttatcctgggcttcttgttggaatggttacccactcatctgcacctccctatatttgcaacacactggtgcggagtcgttatttaaaaaaccaacaatatgatttgatgaaaaattatttataacttagctcaaaagcaaacaaatttttaattcttggtatcattcaatagccctaaatgttctctattagtctaaaaaatttcaaaaaatttcgttatgttttaaaaaagttatggccagaggaactaaaatactttgtttttcgagcatttttggccctcattatttaaaaaaccatcaaaatgggcgtaatttaaaaaactatcattatagttaaaatcaatatttcctgaaacccatcacaaaattcattactttttgaattatcacaattatacattgattttatggaataaacttttataatcatatatattcctggtattttttagcctacattatattaacatactttacaacaacaaaaaatattaatacaaaaaagattgtaaatacattttgagatgaattgcggcaaatattgattttaacttaaattagtcaaataatgttggttttttaaataacgacatagcgccaacacacttcttgctcgtaatggagcagtcccgccctatgcctcatttacgcctaatattttttagtctcgaaacatctcggctctacgattcaaatggctttgtacagtaacgaaaacttttgatttaccattctatttgttttccgataaattcaaaattttattatttcgagtgcttagatacagtaccaagttttatttatatttaagaagttattttataaatttactaaaaaacagtgtaaaaaatattgcatgcccgtattactgtgtataaatgatatccccataataacaaaccattgaatgagcctccagcagctgcagccgaagttgaagcagcattgacattttgcatattcaattcactgaccttattttgcggaagattttcaatgcttaacttttcaaattcctctgcatcttcttcttaaaaaatcattaaaaatttttaataatttactaattacctgtatacatttcattaaggtcgaataggtatttcacggctggtcgatcatttctttcttgataaaagttatatttgataaattatattttaatattaataaatgtttttatgataaattcaaatatttgtataatttaattaaataaaaaaaaattatgcgtttctttttcatacctttttcatccacagaaaaacaaaaattttttgttaatatctcgattattattaataaaaaaaataaattcatatttagaaatttctttgtgaataaaaaaattttcaaattaataattatatttaataatgtacatttttttttgtttgacgtaataaaaaaatccatatcgattaacataaagatatgtttaatattttttgtttgcatataattttttttttgctggctatattttacaaacaaattttaatatattttatattgaaaatagtaataatgctcatttaacatatcttgagattactanaaaaacttttaatttttngaattatttt

SEQ ID NO: 26438 - DNA, 769 bp, Heterodera glycines
gtgggaaaggatatctgtctacattctgtacatatatgatttattggaaataaggatttttcggttcaatccttcaattcaataaggcaaaatttagactcagcagatccacaaatttggtttttgtgcggatcaggccgaggccgtttgcacaatttgtttttgcaattttcaaatataatgccaaatgttctaaatcaaatttataatgatttccgaaaagtcggcccaattaaaccaacaaatcaatattaatagcttttcccagactaaactttagaaaatcacattcaagttttacaaataggcagattttatggtaatggtaacgatttggtgtcccgacgaaaattttttttaaatttcgtaggtcttttttctaggcttaaaaaatgtgctgatcacgaatgtatactcagattttaaacatcattgatgatttttatctatgatttttcatcaactacttgattgtttagatttttaaaattattttaaaaaatttagcaatgaatttgggggttaaaaaaatactctgatcgtgaattagagctctgattatgcatgaaccttcattttcgaaatccattaagcatcaaattaattgaattttaatataatttaaaaaattgataaaaaaagcatagaaacagcagatttttaattttgcactttttttcttaaaagtgatcagcaaaaatcaatcataagcacctgcctaaacctaaaaagataaataaaatattcactttttattacaaatataaaa

SEQ ID NO: 26439 - DNA, 1925 bp, Heterodera glycines
  unsure (1)..(1925): unsure at all n locations
aatgagtgggttcgctcgctttcgaaagtgtctactnttcttctntaagagtgttgtctcctctgtcncctctcttgattgttgagggatgtcaaaaaaaattttttgaattttaaattcgttcgaaacacacaaatttttcaattggtggtggtgtgacttctcaagacacttaatcgctctcgagttctgactcgagaacaacagcccgagttgggtcttctcatacatactgtgtgtataccgttaccgtgtcaaatgccactactattagggatgtgtgccaacgccctcaaaaaatttcggaaattgcggcattacgttggcaatcggaagttcaacccaaaaacgttgggaaatcggcatgccgacggctcaaaaaatgccagaaatcggcatgccgacacttccctggtgactgtggttttcagtctcggattttaattttaattcctaaaaacttgaatcagaatatccagggtcccgagaaaatgtcgacaaaatccaataaaaattttatttgttgaaggagagagctgataaaaaggtcccataaattcctcattaaaaaaagttataaaatttgaaaaaattttacgatcctctctttctctctctccattttgcttgctcagttttgattatgaaatgggagtagagtgccacgggaccgggaccgggccgggaattcccggtcatccggtcccggttcccggattttgaaaagctcaggtcccggttccggtagggcaaccgggaaaaacaagcactggtaagaatggtggtctgagtgaaaaattagagatgaaaattagagttaaagggaaaaatttaaaaaatatattaatatattctttaaaagtaacactgccaagtgtgcaaatggcctagtggcttttggacaaatttaagtcagaaataaggacccgaaaaccttttggatttcacgaaatccgagaatcctctcgctgctattacataagatctaataagattttaggccttttaaaaatacagttaagtaaatgcctgtttgaatttctttcctatggaatttagaaatatttattttaatttaaaaaatagttttttgattttttagtattaaattcaaagcatttcgtattgtgggaatcggtgaagtgtaaaataaaatgctggccaaaatgaccgacttttagcaaaagttggcatttgtccctggggcaatttgttgccggccctttgggcacaaaagcattgaaaaatgttaacaatggcattgacaaattaaagaatggaaatgtggtgagaaaaattagagctcgaaattttgaaaaaagctggacttggattccgtattggacctggacacggatttcctggacaaaaacccaggaaaatccaggttatccaggcttatcatggcctgtatcccctggcatggacctggatttttttaaatttattttaaaaagcaaacaaatgattgaaaaataaattaattgtttagtaaaaaggtatttaatgacaaaaattatatttttaatttatttaataatttttgataacttgatacaaaacccaggaaaaatccaggtttccgaaaaatggcctggacctggatcgaggaaaaatctaggcctaaatccaggtccaggtcgagccctagataaaagtagcaaaaatttttagaaattttcatttaataataaaaagttggaaattgttatcagggaaaatgtaaaaaaaatgtaagtaaatcatacgaacaaatgccacttggattttacgtaccttaacctgtgaaattttggaaaatttcctaatttcttatgaaaaaaagctgtccaaaaaccaatggctcttttcatggcaaaatttgccgaaatanaaattctggaaatgtgagtgagtaagtgggtgtgtgctgctgtgtgagcatt

SEQ ID NO: 26440 - DNA, 1465 bp, Heterodera glycines
  unsure (1)..(1465): unsure at all n locations
gttttcggggcagtccccctgaaccgatgcgcccagatttatggggagaccgaatccttccggaatagcttcactatagcctgtactttaattctgcgttggatttttgctccccataattgtttgagtaccccaaacggacacttgaaaaaatcgatttatttttgttttcggggcagtccccccgaaccgatgcgcccagatttatggggagaccgaatccttcgggaatagcttccctatagcctgtactttaattctgcgttggatttttgctccccataattgtttgagtaccccaaacggacacttgaaaaaatcaatttttttgttttcggggcagtccccccgaaccgatgcgcccagatttatggggagaccgaatccttcgggaatagcttccctatagcctgtactttattctgcgttggatttttgctccccataaattgttgagtanccccanacggacacttgaaaaaatcgatttttttgttttgggggcagtcccccccgagcgatgcgccccagatttatggggagaccgaatccttccggaatagcttccctatagcctgtactttatttctgcgttggatttttgctccccataaatggttgagtaccccaaacggacacttgaaaaaatcgattttttatttcataaatatttttttcagaaagtcatgcgcacccgtccgatctggcaagttaagcaacgattgctgactagccaaaaggttcggtgccgtgatgaaacgaaccagcactgcttaccccgcggcacccggcacggtcccccgaaggaatggatttaattaaattctctccttcggggatttttttccattaggtcgtccgttagcgttcgattgctctagtcaatttttcaaaatttttgttgaaatatttgtcgtgctctgaagggcgtgggaggggggggggcgaaggcccaccacgaggccgcgaagaggccgagtgagtaccttcggtgcaggaaaattattaaattttaaaattttttaattgctttttaaatatgccaaaaaatgtaggcttaacttttttagtgaaaattcgatcactcatattttttgctaattgagcagaagcgtaccaaactttgcagggatactccccggtaaaggactaacttacactgaaatgagcgccgagctagctggctcaaaaaaatttttcgaaaatctgagtctttcgtttttatttatttgcaaaattaattcataaatattttttcagaaagggttctgaaacgcaccaaattttatttacatgttagtttaggcactctgatgctttttctatcaataatggaggtgaataaaattttaattgctttttaactttgggaaaaagtttaggcttaactttttagtgaaagtttgatcactcatatttttttaaaataatgtactcaaaacggttcagaattcaataaaaataa

SEQ ID NO: 26441 - DNA, 2303 bp, Heterodera glycines
  unsure (1)..(2303): unsure at all n locations
cgggagtgtacacaaccaccatctttcgcgacaggtaaaagtttgaatataattattttttaaatttttgatcgctttagctacaagctgatcccgatcaagcttgccaattttgtcaagacgttcggccttgaaattgagggagtggacaacaaaaagtacttcccccacaaattcaataaggtaagggtaatttatgaaattaattaaaaaaaaatcattaaaatttaggcggaaaattacggcactgttttggacactctcccgccaatggaggactactacccgggtggtctcttccctgccgaacgcgcaaaattcgagcaatggtacgacgagaaccgggaaacagggtttgagctgaacgaagtgatcgccgactactgcaaaacaggtaaaagttctggaaaaaacatgcaaaaatattcaaaaaaattttgaagatgttcaaattctggcacatggtctggtaaaaatgcgacagctgttcttatctgagactcggcatgacatcaccgattcggtcaccatcccatccggctgcatgaagtattgggttcaattggcacaccacgacaaagagcgcgtcgccattattccacatcttggctatgagaagcgcggaaaacagagcactattgccagaaaatacttgaaggtgtgccaaaaaaaattaaatttattttaccttttcatttctctctcagtggcgtgccgaagaagagttgcgggagaatggccgagtcctccgccatgtcgaaagccctggaggggagttcaaattcggcaactacagcttggacgggatgatggagcggccggacgaggagaaaaacttggccattgaggtcaatgggtaaggaaaagaattccgaaaaggtgccaatttacccattgaaaaaggtgctattggcatggatgcccaagctgctttcccgatgatgcggcaattgtgggcggaggagaaacagccggggccctcagggcccgggacgccaaaacgaacccggntacattgcgcgggagtttgaggtcgaagtcgtttgggagtgccacttgaacgcaatgctggaggacaacacagccatgaaggcgtacttcgacaactgcccggactccggaccaattgacttccacgacgccttctttggcggtatttttgggtttaaatttgcaaaataattttgggcacaggtcgaacagggcccgaatatttgggcgcttcggtgatcaaccctgagacgggcgactggaagagccgtacgatcaaagtgaaggactttaacagtctttatccgtcgcggtaagaaatgtcggaaaaaaatgaatagttgaaaaatctttggcactttaaggaatatgttcaccaattatccggttggccacccgaccgtggtgcagtttgacaaggacgtggaatggaggcgtccagaggacgttgttggcgacgacggcatccgccttgagggcatcatcaagtgcttcgtagtgccgccccgccactgccactacgatatcccggtcctgccgtaccggctcaacaaccgcacgctgtttcccctctgccggacgtgttccgaaatgtacccgcgcggcttgatcgaccccgagtacaattgcaatcattttgaggactctgaaaggggtgagtttgaagcttgtaattaagcaaatattttttcttaataggcttttcgacaacagtcacacacattgagctgcaagccgctctccgctcgtggtacaaggtgacgcatgtgtaccgtgcctatatctggcctctggcgtgcgattggagcaatgggctgttccactcgtacctgctgaagtttctcaaaatgaaatttgaaggtaaaatttaaaaaaaaattaaaaaaaattcattaacaaaaatttaagcaagcggatatccagcgtcttgtacggaggcgggcatcagcgaggaggagtcggcacggcggaagcaggaccacatcgacaaagccaaacaaaaggcccaagtccaccttgaggcggatcggatcaagcacaaccccgggctccgctacctgtccaagctgtgcctgaattcgctgtggggccggttcgcacttcggtaaaatttctttaaaaaattatgaaaaaaaaatataaaacgtacaggaatcggctcacaaaaaccgaaatagtcgaatgccattcagagctggccaaactgctcaacgaccaaaagtttgaggtcaggaacatccacccatctnncnnaaaanttttnaatcctttaatgcaaggccaaagatgagcatgtggtggaacacagcacg

SEQ ID NO: 26442 - DNA, 1302 bp, Heterodera glycines
  unsure (1)..(1302): unsure at all n locations
ttggagattattgggacttatcagctcggtcctccgcaaacactgattcagtttatatntagaggataaggagttgaaatggtggaattccaaaaaggtgaccaagaaaattgtaatcgaatattattgacgattatcagctcggtcattccgaaaacactgattcagtttatatttcgcgaagaatgagctgtaattttgcgaattagacaaaaatgatcataaagtaacaaatgagagaatttcacattctgctaattaggctttaaatataaactgtttaagtgttgcagacggatcaggttgataagcgccaataacctcagatttactattttcgcgaccccactttttgaattctgacattttcagctcattacgctctaaatataaacagcatcagtgttccggaaggatcgatttgaaatcgccaataacccccaaattacaatttcctactgtaaacttatacagattacatttggatataagaaattgaaatattgagaatatcacaaaagtgatcatgaaaattgtaaattggagattattgggacttatcagctcggtcctccgcaaacactgattcagtttatatttagaggataaggagttgaaatggtggaattccaaaaaggtgaccaagaaaattgtaatcgaagattattggcgattatcagctcggtcattccgcaaacactgattcagtttatatttcgcgaagaatgagctgtaattttgcgaattagacaaaaatgatcataaagtaacaaatgagagaatttcacattctgctaattaggctttaaatataaactgtttaagtgttgcagacggatcaggttgataagcgccaataacctcagatttactattttcgcgaccccactttttgaattctgacattttcagctcattacgctctaaatataaacagcatcagtgttccggaaggatcgatttgaaatcgccaataacccccaaattacaatttcctactgtaaacttatacagattacatttggatataagaaattgaaatattgagaatatcacaaaagtgatcatgaaaattgtaaattggagattattgggacttatcagctcggtcctccgcaaacactgattcagtttatatttagaggataaggagttgaaatggtggaattccanaaaggtgaccaagaaaattgtaatcgaagattattgacgattatcagctcggtcattccgcaaccactgattcagtttatatttcgcgaaaatgagctgtaattttgcgaatagacaaaatgatcataa

SEQ ID NO: 26443 - DNA, 1193 bp, Heterodera glycines
ggcgaagactttcctgtcgttgttcccaggaaagtggtccattgccaccgtcggttgaccacacgcattcacgacgagaaagtgatggttagtgcttagtttttactatttctaaacaagttttcattatgacatatttggtaattggcaacaaatttaaaaaatgagtttgtttgcttttattttgaagcaatttgctcaaaactgtggtgtcccgtaaatataaattttttctgtccggcgatccaccgtcttttttatggtccgtctaacttcttaaatgcatttctattaaaataattcattgtcttttttcagtttttcgtcactgctacatacagaggctattgtcctgcccacgactctttcctgtacaaatcttggcttggcatgctgaatttgacccgtgcccaactgaacgacggagtgccggaccaagaacacccgaaaagggagcatcaatcgccacaaaagcaatatcatttggacgtaccactagaagaattgcctcagcgattaaaaatgtggattgtgccgtccggggccggcgatgtcaatgctgatgggtactttcaggtcaagcgcattgacgcacggatatgggtgagctatttgaatttatacctaaaaagcgtcacttcacagcacgttttggtacattcgtaaatttttgggcaacaaatcgtcgttttttaatttataaattaatcaaaatttcgatatttacccaatttttactgaaagtttcactgcctgtcaggtttccaatgagccggaatccgattcggatagcagcagtgtgaacggagatgccacaagcaacggcaacaacaacaaagtgccattgtcgcattccttcgcggcatggtttcacgaaatggtcaccaccttccaccattccaacatcctgtctgatgaacgaagaacgtccatacagcaatttgttgacgaactgcaacagggctttcgcaccgagaccggcgttgactcgttgcaaattaaactgttcggctccgttctatccgggttcggctccaacgactgtgacattgacttgtgcctgatcaacaccggcatcaccaagcaggaaaaagtgcagcagaacggggtcatctctcaagaggtttgaacaaaaaaatgttatgagaggggcacaaacgggaagagctcgtttctcccccggctcattttca

SEQ ID NO: 26444 - DNA, 1110 bp, Heterodera glycines
gaaagaaattcgggaaaaaaatagggttcggcgctatcattccgaaaatgtggttggattcttcagactgatgatcagaaaaagagatagacgtttttccaaaattttcgacatcaaactcgcccagaaagaaattcggaaaaaattagggtcggcgctatcattcggaaaatgtggttggaattcttcagactgatgatcagaaaaagagataggcgtttttccaaaattttcgacatcaaactcgcccagaaaaaaattcggaaaaaattagggtcggcgctatcattccgaaaatgtggttggaattcttcagactgatgatcagaaaaagagataggcgtttttccaaaattttcgacatcaaactcgcccagaaagaaattcggaaaaaattagggtcggcgctatcattcggaaaatgtggttggaattcttcagactgatgatcagaaaaagagataggcgtttttccaaaattttcgacatcaaactcgcccagaaagaaattcggaaaaaattagggtcggcgctatcattcggaaaatgtggttggaattcttcagactgatgatcagaaaaagagataggcgtttttccaaaattttcgacatcaaactcgcccagaaagaaattcggaaaaaattagggtcggcgctatcattcggaaaatgtggttggaattcttcagactgatgatcagaaaaagagataggcgtttttccaaaattttcgacatcaaactcgcccagaaaaaaattcggaaaaaattagggtcggcgctatcattccgaaaatgtggttggaattcttcagactgatgatcagaaaaagagataggcgtttttccaaaattttcgacatcaaactcgcccagaaagaaattcggaaaaaattaaggtcggcgctatcattcggaaaatgtggttggaattcttcagactgatgatcagaaaaagagataggcgtttttcccaaattttcgacatcaaactcgcccagaaaaaaattcggaaaaaatttagggtcggcgctatcattccgaaaatgtgtggtggaattcttcagactgatgatcagaaaaagagataggcgttttttccaaaattt

SEQ ID NO: 26445 - DNA, 1254 bp, Heterodera glycines
  unsure (1)..(1254): unsure at all n locations
ccatgggctgaatttggtccaatctggggaaaacaatcaccggcngagttcacttactggggaaatcaaacacagacgccgagaaaaagagaaatagttcactggcgaaatcactcactgcgaaatcacatttgccaaaatttgattaatacccgaccttttttagtctttacgaaaaacattttcaaatatccgttcggcgcccagctggcaaaacggtctttttggcatgccattgcccgccgacgattttcttcaaattaaattgtaaggccatgagcggaaaaactttgtgcattttttgagttattttcaaaaattttcattgaaaactttttgaattagagaaaaaagctcatctcagtagcaacttgcgcagaaaattttttatacaaaaaggcattcggacgcaaaaaatcagcaaagagagcagttcaaagacaaacaaatagcatcaatcaacacaattcagcataaaacctaaaaatgatcggtcatttctcaaatggtcactcattctgctgatcactgggcccaggagtcgagaacatttttccgtcgctttgatctggcggagaaagcggcctaaatgaagcaaaatttgaaatagatgagaagacttttacaaaaatagagtcaggaacatagaaaataactcggaccagggtttaagagatggaccagcaggacaaaactaaggactgaagccctgttttaacatacctacctagttttagtgaccttaaccgtatacgggtccgtatttttcctggatacggtttttacggagtaaaggttttccgggttttaatccgtaagtcagtagtccgtatggatgccaagtctgtaaccctggtccttatccgtattttctcaaaatcacgctctctagtttcaaccatcagtttttgccatttttaaaaaaaaattctgggaaggacccgcaggagaattttttaacagatgtaacattgaagattcacgccaattttgattttatatacaaattatacatatatataatcattagggtcgggatttctagtgaaaaacttttttttttgcccaattgttttgaaggagctcaaaactcatttctgcgttgaaattttttcatttgaacgtcatttttcgtcactagaaatcggcgggtccgtatcgttttggcgccgacgttttggcgccgacgttttggcgccgacgttttggcgccaaatatataataaaaaaaagaaaaacacccanaatttaaaa

SEQ ID NO: 26446 - DNA, 1368 bp, Heterodera glycines
  unsure (1)..(1368): unsure at all n locations
aaacaaacagaaagaagaaaagataaaattaaataaaaaataaattcgatgaaattcagacaaagaaaacactcaacgaatttggcaacaaagtgatttcggcggaatggaaaaagttggggaaaatgcgaaagctgtattatggcattggcaatttcaagacggaccagcaacgattttacgaattgctcaccgaatgcatttctctgctgactgaaacggacacttccaacgtttagacttttagactttgttttcacataaattgttgagaatttataatgcataaaacagagtcagtgcaataatattttcttattttcttttaattttttaaccatttccaaaaacataaatatttatttacctctgaataattaaatatgccattttcttcttccattttcacagtgcataattatccgcccagatttatatgttttacccttttttcgggtaattagcatccagtgactgtcgcgaaagatgtccttttttcacttcctcagccaaaaaaaatttctgccctattttcaaacaaaatttcggaggaaaatagagagtactggttgaaaattttcaaaaatttcattttattttcccggcggcgcctacggacaaaattgaacgtgttcaaaaagctttaaaagaaaagtttttttttaatataaattagaagaaagaagaaaaattactgattttttaacaacagcttttaaaattacaaaagggttcaccagaggcttaatgcgggaaaagtttcttttttcggcagaaaggcccaggggcctttttttacttttacgagtaaaaagcgccacactatcaaaacataaaataatttttcaacagattagtaaatttacactaatcgtctgtgaattttaacatttcactgcatttactttttattttttatttttacggtatttaattttgtattttttgttccaatttctttatttttttgtcacatcataaaagagcacattaatgtgcctttagttgctcgataaattaaattaaattaacatgaaatacattttgaattattttcattttattgcattttgttgtgccatttccttaggcaattggtaaacaaaacaggaaataaaaaatcgtgtcaataattaatgttattcccatgtttaatgcccatgaaaattgcatgacagcaattaattataattaattacatgggtttaaaaagcaattagtgaaaaagaaaaagaaaaattataaatcaaattcattaaaaaagtattttttttaaattaatcagtctcctaaatgataatgttccataattnttgttgctgtctataatgacaattttatttgtccttttaaacggcacaaaaatta

SEQ ID NO: 26447 - DNA, 1322 bp, Heterodera glycines
ccccaaacggacacttaaaaaaatttttttttttgttttcggggcagtccccccgaaccgatgcgcccagatttatggggagaccgaatccttcgggaatagcttccctatagcctgtactttaattctgcgttggatttttgctccccataattgtttgagtaccccaaacggacacttgaaaaaatcgatttttttgttttcggggcagtccccccgaaccgatgcgcccagatttatggggagaccgaatccttccggaatagcttccctatagcctgtactttaattctgcgttggatttttgctccccataattgtttgagtaccccaaacggacacttgaaaaaatcgatttttttgttttcggggcagtccccccgaaccgatgcgcccagattaatggggagaccgaatccttccggaatagcttccctatagcctgtactttaattctgcgttggatttttgctccccataattgtttgagtaccccaaacggacacttgaaaaaatcgatttttttgttttcggggcagtccccccgaaccgatgcgcccagatttatggggagaccgaatccttccggaatagcttccctatagcctgtactttaattctgcgttggatttttgctccccataattgtttgagtaccccaaacggacacttgaaaaaatcgatttttttgttttcggggcagtccccccgaaccgatgcgcccagatttatggggagaccgaatccttcgggaatagcttccctatagcctgtactttaattctgcgttggatttttgctccccataattgtttgagtaccccaaacggacacttgaaaaaatcgatttttttgttttcggggcagtccccccgaaccgatgcgcccagatttatggggagaccgaatccttcgggaatagcttccctatagcctgtactttaattctgcgttggatttttgctccccataaatgtttgagtaccccaaacggacacttgaaaaaatcgatttttttgtttcataaatatttttttcagaaagtgctctaaagcgcaccaaattttatttacaacttaattttagcactctgatgctttagtatcaaaaaggaagatggagaaaaaattttttaaaaaatttttccttatattttggttatatcgttttgcttttggtggggtgcttggaacagtggaatcatgcgcacccgtccgatctggcaagttaagcaacgattactgactagccaaaaggttcggtgccgtgatgaaacgaaccaacactgcttaccccgcggcacccggcacggtcccccgaag

SEQ ID NO: 26448 - DNA, 2128 bp, Heterodera glycines
ttccaaatgaaactcaaagcttaaaattttgcacagaaaaaaaatacaaaacgagaaataaataccaaaattagaaatacacctttaaaaaattgagatccctaagtgttcctctattagcctgcaaaaattttgaaaaatttgggttaaggttcaaaaaaattatggctgttcgaacaaatagttttttgaatttttatttatttgcgctcgtacgaaaacgactccgacccctccatttaataatatttctgttttgaaaaccaagctgtatcgatgaaaaagcgtgtaagaattgccccgatagattattcgaaggttgggaatttcatgggctttgtttgggttggaattaatcgagtggcgggaaaggtcagtgattatttaaattaattgaacacattaattaattatgacaaaaaaggaaacgagcgagccaccagcagttgaattgccaacgattaaattggatatacatatttatatgttgtttaaaacaaactatttcaacagctttctaacccatagaaatctttaatttttccattgaattgtttaagaaacaaaggcaaaaaaataaagaaagtataaaagaatttttggccaaaaagcagccatcaacatttttaaattgcgtataaatctcgcaaaaatgaacaaattgtttataaattagagtccggaggaactctcgactcaaattttaatttagaaaataaaaagtccacaagaaataaccaagtttgtcaggttttttgtaaaaataagtacagagttaaatcatagaatagaaatttctgcctggataaatatttttgggtggaagagacgcaccccataatcttgtacaaaattctctatctgttgcacattttgatattatttttttattatatataaaatggagattaaattattattttttgggtcatcgttttgcctttaattattattttatgccctcgccaccccatcataaatataagtgaaccatgccatctttcttcatttaactcttctgcaattacttttttgttcaataagttcccttttaaatatatatttgttaaagaattgttatttaaaaaagagaattcacaatttggcaatttgtgattttagtccctcaaaataacccggcaattcaaatgttattttggcttgttccaatttcataattcgaatattatttttactggggtttgttgctcatcagtaaaataaattcattttaaaggtttgttacaaattttgaacatgggggaaagtttattttctgatgatctgatgggcttcaatctcgatttccattttcaaatttccacaaaaaatgaactaaaccggaattttaaataatttatctcatttagtttccaattattttattgcataaaatagataaattacgaatttcacaattgtttataatgtcacaatcattggttgatctgatgaagcatttgttgagcacgggagaagacgcggatgtttattttttggtgggggacggagacggaaaagaggcgagtcttcttcaaatttgaaatttttttattattttttaaattaattttagtgaattgtcctttttttgtttgatttttacttaaattttaatcctcttcagcttttgtcagcacataaactgattttgaagcacacttctgaagtatttgcggcaatgttccgttttgatgctaaaaatgaaaaagcggaattcggtaaaaaatattaattataataaaatcaaataattaattggtaaaattgcaatgtttctggatccaggcctaagaacaacgggaaaatggtcacataaatcaataataaaaaaaatcaatcagattctactaattatattaattagttttcaattaaccttgctcattaccataattatttctcaattagcctctgctaattgccccgtggaggtcactgatgttgaagtggcagcgttcaaagtgatgttgagcttcatttatacaggcgatttggccaaattgaacggatacatgcaatggcagtgctttacgccggtgggataatttttttatttgatttattaattatttttttattagccaaaagtacacatccctggctggtcgagcatctttgcaagttc

SEQ ID NO: 26449 - DNA, 1593 bp, Heterodera glycines
tattcaaaacggaattttccatcaacagttagagtactcacttgagcaatttcgttgtcatggtggggaaatttgagatcaaatccgccggcgtgaatgtccaatttgtccccgcaaatggccccactcattgccgaacattcgatgtgccaaccgggccgacctgaacagaaaacaaattggaaaacaggtgatgtggaataaatgacatacctttgccccagggactttcccagaagggctctccgtctttggaggctttccaaagcgcaaaatccgacggcgagcgcttttcctacaaaaactgcaataaattcgacaattaattaattggggaaaaaggggtgcagttgttgcgcactttcaaattgtccactgtcacgctgagttcgccttccccctctcgcaaatgtttttctgcactttctgcatcagcatacgcctcggggaggagttttgcataggaatggttgggttttgatgcaaattgggcagtgttaaaatacacctaaaaggaataaaattgggtaaaaagaaaggccaaagaaacatttataaaaggatcactgtagagatcaaatgcattcaaaaaaaaaacttactgatccatcagacacataagcgtatccgttgcggatgatttgctgcacataatcaatgatttcgggaatgtactcgctgaccctggtcaacacgtccggctcaagaacatttaacgcattcatatcgcacaaaaattcattttcataccttaaaaaacatgactcaaataaaggcatattcggatttccttactttctggccaatttcgcgaaaatgtcgtgtttagtgaccgtatttccccgggtaacgtccaaccaatcggagagcacttccttcgcactttccaacaatttgcgcaccaaaacagtgcgaacatcagctgattgcccattgtctggctgggaaatacgcgttttgaattgaacgagatcagtctcgaatttggcaatctgaaaatttacggattagaaattggaacaatcaaataaaggcaaggcacagactcgaataatccgacacttaatttttgaagtgttcaaacgaaataatctttaaaattcggcttccactcactgaccgtatccacaaaaagttttcttttgtcggtgtcgggttcaatggatgcctttttgagataatgctgcagtgctgcttgaagatgttgttccaattcctcaaatccaaccgaatcaatgccattcaaatattgctcaaaaagaaagttttggcgtgcccttaaaaaggcaaaacaaataatttttaaatatatcattaaagttcgtttatccaaaatttaggggaatcggaaaagaaccttttgatgattttgtcgtcaatgtccgttacattcatcacatagagcacgtcgtaattaaaataatcggtcagcactcgccttacaatatcaaaggacagataagctctcgcgtgtaggcatatgggtaggaatcgtacacagtcggtccgcaaatatagcaggtctcgttatcagattaaaagaaatgattaatgttctttgcttccaatggaaaatcgcccacaatgcctttt

SEQ ID NO: 26450 - DNA, 1123 bp, Heterodera glycines
ttaaaacgaattcgttttggttggccattatgataccgaataacattcggaaattatggaaacaaaattggagaaattcgaataattttttgacttcaaattttttcccagttttcgaataattttacttcaaattttttcccagttggttttaaaatagtagtttggttcagaatttttccctctacaaaaaaaaaattataatagaattttttattattaattcgaaatcgttaatttatttgacaaatccaagacttaaaattgggagaagcatggggctgtggctgaggacccaaaatggggccccattggggaattaaatatgatttctgaaaaagtccctgaaatgtcgatttttttctttccatagcttcttgtagagctcgagctgctctttccaatggtcttatcccggtctcgatccgtgacgaactcaaaaagttatgaagtgaaatgtgaaatatgttttcaccacacgggattttttctgaaacccatcggaaccaaaaatctagggtttggtataagcgttttagaaattgcggagaaaaaagcttcgatattgagaaaccaagtcaagtccagaaaagaatattttaaaacgaattcgttttggtttggcattatgataccgaataacattcggaaattatggaaacaaaattggagaaattcgaataattttttgacttcaaattttttcccagttttgattgggttttaaaatagtagtttggttcagaatttttccctctacaaaaaaaaaattataatagaattttttattattaattcgaaatcgttaatttatttgacaaatccaagacttaaaattgggagaagcatggggctgtggctgaggacccaaaatggggccccattggggaattaaatatgatttctgaaaaagtccctgaaatgtcgatttttttctttccatagcttcttgtagagctcgagctgctctttccaatggtcttatcccggtctcgatccgtgacgaactcaaaaagttatgaagtgaaatgtgaaatatgttttcacacacgggattttttctgaaaccatcggaccaaaatctaggggttggtataagcgttttagaaattgcggagaaaaa

SEQ ID NO: 26451 - DNA, 2050 bp, Heterodera glycines
cctcgcgccataccctatcatattccgaaaagagagccaaaaattgaagaaacactgccacggcaccagcaacctcctcctgctgccccacaagtgccgcctgttcccccacctaggagagggaccaaacgtcgccaccccccggaaaatggtgatgagagtggtgagctgcgcatacgtaaacgagtgaggcaagcgcgaagagtacgagtgtattactcaccagagccgggtccatcaacatcagcacaaagcgatgaacaacaacaacaacaacgtgaactgtttgccattccgtcaaatcagctgaccatggcacagagaattgagctaatatacatcaaatgcaaccgttatgccgatcgtatgggtgtccggggaaacgcaattatcaacactcaaaatgcacaaccattggtgcgaagcaatttgcgaacggccatcaggtatataattgacagaagagcgggtcgacctaccattagaccaccgggagcggaccaattggaggagcggcttaggcaggacccaattttgtattcattgacggctccaccaaagagaccatcgcagagcacaagcagcaggacgtcaataaagaaggaatttcagccgaaaaaatggaaatgatcaacaccactcttgacaagctgtacaacgatccatcctctcctgctgcgtttgccggtgttagtgcactgtggaaggaggcgcggaaaaagttaaaacaactacggaaaaaggatgtacaacactatttggagggacaccgcacgtacaccctgatgcgcccccggcgggtacgatttccgagagcaaaaactgttgcagcagggttcatgaccgacgtccaagtggatttggctgactttcaagcgctttctcgtcacaatcgcggtcaccgatacctgctggttgcggttgatgttctctcaaaatgcctgtttgttgtcccattcaaaaataagaaggccgaggagatgttggaggtattcaaggagcttattgagcaaatgccaatgatcccacaccgtatcttctccgacaaaggcaccgaattcaaaaacaaattgctcaaggaattctttgaggagcatgagattaagaagcatgagcccgtgcattcgtacttacaccccgcttccgtaaagatgaatttgtgcacatgagcagagagaagggccagttcgagaaggggtatttgccaaactatggagacgaaatcttggaaattgacgaggtgctgaaggcggtgcgccccatcagatacaagctccgggatgatcgtggtgaaaaattccggggcaccttttatgagcaggagttggcccgcgtgagaaaagatgccgacaccagttacagaattgaaaaagtgtacagaaagcgaagaaaaccggatggaaccacagagatgctcgtaaagttcattgggtatcccgaacgagaatggattgacgagtctcagattgtataaaagcgtttgaatttttgtgtatttctcatcagttgaataaatccataatgtcaaatagtttctttgtgtttttgcctagcaatgtgacggattatccggacaatcagcctaacaaattccgggtccggcttccaaaacctttgcatttcaacgggtcttgggtgtgtgggctgcacagcattagctacccatactcgtggtcaacaattggtacattggatgagcagtggatagacatccacttcacggatattggggttcctgaagaagacaaacaccgcatcgtacgcgtgccggtcccaaggtcttcacagaatcgagttgaacagctgagagactttttgacgacaacgctgagaaaccatgccaatgctaaactaaagccactcccgcgagaggaagaagcggaccgtaacaggacaaaaccactttactctccgccgcctgcaaaacgtgcccggagatctctagcgctctcttcgcctcccagacatgaagaagctcctgcacgaccactttgatcgcctcctttgtatgacgagccaaagctgcaaaaaacacaaaaaacacccgaaa

SEQ ID NO: 26452 - DNA, 1567 bp, Heterodera glycines
ttgccattttcatccgctttcatcatgtcttttattacccccggcactttcacgttccttttaaaagactatggggaattttcgactggacattttgacccaaacagagcatacaacccaaattcacttgcagacctttcgtaatggcatttattttgcttccattatctttcattttttctttgtagtcaatggagaaaagagtttctggacggccgatacggatccaaacaaccaacccctccttccacccctcgtgccccatcacccagcttcccaatcccggtcattgttggtaattttaatttgttttttggattttgcaaatatctatcttggcaggaaatcgtccacaggatgaaaattgtttgggtttccacaaatatcttgtctgattttttctattttagggcggcagatgttccccgatgacgatgggtacgaatcggaagatgatgaaattctcttgccacctccgccgatccccccgcaacttggccaccctccaccaaatgttccggtaatttcggtttcgcttttcgttgctttttctcaaatttccgagtgcttttttcaggcagttcgtgttcaaccaatgcatgttgggcagcagcggctgccgctgagagacttgccacaattcgaggaccatccgcaaaatgtgccggtaattttgggtcgattttcgctgcgttttctcaaatttctgcgtgcttttttttcaggctgttcgggtccaactgatgcaacaaccattgccgctgagagacctgccgcaaattttccaccctccaccaaatgtgccggtaattttgggtctttctttcgattgctttttctcaattcccgagtgcatttcaggcaattcgtgttcaaccaatgcagcaacccgtaccaatgagagccgtgccacaattcctccaccctccgccaaatgcgccggtaatcttgagtctcgttttcggttgctttttcaaaatcccgagtgcattgtttttcaggaaatgggtgtgggaccaattcatgatgggcaacaaccactaccactaagagcgttgccacaattcgcccaacctccaccaaatgtgccggtaattttggctcgtttttttttgttgcttttttttaattcccgaatgcttttttcaggccgttcgtgtccaaccagttcaacaaccgataccactgagagacgtgccgctatttgtcaacccaccaccaaatgtgccggtaattttggctcgcttttgttactttttttcaagatcccgaatgcattttttcaggtaattcgtgtccaaccgatgcctcaaccgttgccgctgagagacatgccgcaaattcaccatccaccgcgaaatgtgacttcaattcggatcaaattgtggttgctttttctcagtctctgggtgtttcttcagggaattcatgttcgacaaattcaacgggaatacgcagtaccgcaatttgcccatccgccgccaaacttgccgtatcatccaccagaaaacgttccggtgagttgggtcatgtttttcgtgcgttttccgtattttcggatgctttt

SEQ ID NO: 26453 - DNA, 1108 bp, Heterodera glycines
  unsure (1)..(1108): unsure at all n locations
tttttggtgtttttatgattaaagatntaaagtcgtataaaagtgattcgaacatttacagtagagatcggaattctcaaacatgccggaccggaccaggctgatatttcagaagcagccggttttcggggcccgcctcccccccaaacccgtcaaccggaaaagcgctgaaacctgattctcaaattgccgggcccggaaccggtttggtaaaaatttaaaattctcaagtatttcgaccccaaaaatgaccaaaaatcgtgccaagtagttaaatttcggctctttcatcataaaattaaaaaatcgcttaaaaaaatttaaaaaattttttaatgaggttttgttattaaaatttttttattttttgaaattcttttgaaaattaaaaaaaaatttcgaaatgaagtgagtgcataccagataggcaccaacgtgaaaaaatttttatttaagtgatttcataaccttttgcaaaaaaaacgcttttggttttagattaaatcttttgccagaattgtgtggattcttgggacacatttctatagaatttaccgaaaaatttgtaaattgaagatgaaaagcaaaaaaagggcttgcttagccgggtccactgcgtttcggcgctcgcgtttcggcgctcccgtttcggcgccagcatatggccacgcttaactgacccagtccggccaaagtaaccgtgcccgaaattgaatctccccatttttagtttgagtttgtcggtcactgcaatattcgttttttctaattttgttatatttgaaaatggatgataaagtaattaaacttgcttctccctaataatgtagagcatagtttagttgctgttgtattttcggcttttttggcatcggtatcaaaagttatcagaaaaaatctatcaataagttgtcaaaattttaaaagttcaaaacaaattccaaatgatggtaggagccacaaacttttttaaaatgacctgaaacaaaatctcttattttttggtgtttttatgattaaaaatttaagtcgtttaaaagtgatttgaacatttacagtagagatcggaattctcaaaaatgccggaccggaccaggctgatattttc

SEQ ID NO: 26454 - DNA, 1347 bp, Heterodera glycines
aaattttaaaaaattttaatcatcttcccttttgatagaataagcatcagagagccttatttaacttgtaaatagaatttggtgcgtttcagagcatttctgaaaaaaataattatgaattaattttgcaaaaaataaataaattgtgaacctttaaaaattcataggaaatttaaattcataggtactactgctaaatcaacgcagagacgcctttccttgacctttttaggctcctgcaaaacctggtgcacttctgatcactactcgtaaaattatgagtgattgaattttcactaaaaagttaagcctaaactttttgactgtttaaaaagtaattaaaaattttaaaaaattttaatcatcttcccttttgatagaaaaagcatcagagagccttatttaacttgtaaatagaatttggtgcgtttcagagcatttctgaaaaaaataattatgaattaatttttcaaaaaattggaaaagtacgcaatattgcaatgtctaaaatttttaaagaaacattatgggacagttaaataattatatgaataagcattcttctcagctgttaccctgcaaaacctggtgcgcttctgagcactactcgaaaaatgagtaaattaattttcactaaaaagttaagcctaaactttttgacttgtttaaagaggaattaaaaattttaaaaattttattcatcttcctttttgatagaaaaagcatcagagagccttatttaacatgtaaataaaatttggtgcgtttaagagcactttctgaaaaaataattatgaattaattttgcaaaaaataaataaattgtgaacctttaaaaattcataggaaatttaaattcataggtactactgctaaatcaacgcagagacgcctttccttgacctttttaggctcctgcaaaacctggtgcacttctgatcactactcgtaaaattatgagtgattgaattttcactaaaaagttaagcctaaactttttgactgtttaaaaattaattaaaaattttaaaaaattttaatcatcttcccttttgatagaaaaagcatcagagagccttatttaacatgtaaataaaatttggtgcgtttaagagcactttctgaaaaaataattatgaattaattttgcaaaaaattggaaaagtacgcaaaattgcaatgtctaaaatttttaaagaaatattatgggacagttaaataattatatgaataagcattcttctcagctgttaccctgcaaaatctggtgcatttctgatcactactcgtaaaattatgagtgattgaatgtcactaaaaagttaagcctaaactttttggcctgtt

SEQ ID NO: 26455 - DNA, 1366 bp, Heterodera glycines
atagtcacaaaaaaacttttttttactcccaatatctaccagttatcatacaaaaaggcaatagttaagctttgagatataaaaaaatcgtctagaataattatctcaacaatttgtcgggaaagttgaataaatttcagttgcaataggcatattggcacaatacataaatgtagagcaggctcaaaatagaggaaataccaaagattaaaaaattcgtgtttatggcccactctgctttggctggacataactcgccagagagtggagatagaccctttgttgatacatttgaaaatgtagagctcggctagcgcattcgaataacacaaaatttgttttcatttgcccccaaacaatccgcttatgacgggccgaaagaaaattcacaaaaatttggcaccggaaaaactccattttttatgggccagcataataaagtaaacccaaaatgtaagggaatttaaattggtcatgtgagatgtttagttttttatttgacccatccgttttctgggaaaaaacttttcgagaaaagctgaaaaattttccaattgcatcagaagcagactcaaattcttcaacaacataatgtaaaaaatattacgcaagaaattatttttacatcctttttagaaatgctgcataaatttttattgtaaatagtcacaaacaaactttttttcactcccaatatctaccagttatcatacaaaaaggcaatagttaagcactgagatataaaaaaatcgtctagaataattatctaaacaatttgtcgggaaagctgtataaattctgggaaaaaacttttcaagaaaagctgaaaaattttcaatcgcatcagaagcagcctcaaattcttcaacaacataatgtaaaaaatattacgcaagaaattatttttagatcctttttagaaatgctgcataaatttttattgtaaatagtcacaaaaaaacttttttttactcccaatatctaccagttatcatacaaaaaggcaatagttaagctttgagatataaaaaaatcgtctagaataattatctcaacaatttgtcgggaaagttgaataaatttcagttgcaataggcatattggcacaatacataaatgtagagcaggctcaaaatagaggaaataccaaagattaaaaaattcgtgtttatggcccactctgctttggctggacataactcgccagagagtggagatagaccctttgttgatacatttgaaaatgtagagctcggctagcgcattcgaaaacacaaaatttgtttttatttgccccccaacatccgcttatgacgggccgaaagaaaatcaacaaaatttggcaccggaaaaactccattttttt

SEQ ID NO: 26456 - DNA, 1667 bp, Heterodera glycines
taaggaagtgatttcccactcttaatttataaaatcaaaaaacttcaaaaataaaaaaggaatcgaaaatttgttaaaatataaaaaggaaacaatcaaaattacaacatttgatttaatttgaaattttattacctcaatttccactcgaaacacaaaaaagattttgttgataaatgatttgtcgcccatttgcatcatatgcttcagataatctttcaacgttctttccattgtttccatttgatagggttgaggaatttgctttaacaaaaacttttcgtcttttgtacgataaattttgtttgagcttttccctttgatacccaggtcagctaagtcatccgatagaaaagattcctaaaaattttatttaaaaatattttttaccatttataaaacaataaattttttcggtcttttaattgttcatagtttcaatcgaattttatcattaatgtgtttaggatatgtggataattaccgctaatttcttgtaagtaattccaaatttctcccgcatttcgcccattgcttcttccgcataaaattgaacatcgtccaccgttgtccaatcaaatttgcaatttagctttttgggatccttttgcttgtttttttcattttctttcatgtttttgcaaatatatttgcccaattttgcttgaattcgttctttatcgtccattttaaagtgcgcatcgtctttcatttcatcagcatcagccaatgccaaaaattcaatgcaaatgttgtcattttcatctttcaaatggcaaaatttaattatatttaatttaatttatttttaaatcatatagtgaattaaataataaatcaatattttcgttattcacctgtcatatcaatttctcttggcatcagttcaatttcttgcccttcgaatttgtgccatttcccaattggcactttttcatctggcactttctcaattggttgcacgttttcatctttttctttgtataatattccggccgcataaaagttcaatttgccgaccattttttctgcgtcaatttcaacaccaacaaatgcacctccgtcaagtgcgacttcttttcgtgccttacttgtttcacctgcgatctctggtcgttttccaacgttatttggatatctgagttttcgcatttttaatctacagtttaacctattagtatttatgtaattttaaatgttctaatgaatgatgttacaataacgaaacaattggcaaaatgtttggcctcgggtgggaatcgaacccatgcattcagccaatgtacgtgggcaattctaccattaatcagctgccaagtcccacctgcccttctggcattataatgccacgcttttcgcgttttaaccggatcctttttgactgacgtcattaattaattgtcttccgattcccctccaatttttaacaatacagcaaataattacttgaatttcacatatttctcatatgcctccggaaaccgagttgggttggcattttttgcattttccatgcgcgacccggcacctgacacaatgtatttggtgttgatacggtaatagctgttgctcaggtcgacatgcttcaggctgtgggaatgaccagcaaaataggcttgcactttgaagaagcgcatcagtgccatcagacgcggagcgcacggaaa

SEQ ID NO: 26457 - DNA, 2105 bp, Heterodera glycines
gggaatgaagcgagttatggctgatcaagtgtgatcaaaactaaacaacgaaaataaggcactgaaacataagtaaatattatataaatttaatttatcattttattatctctaaaaaatatctattggcttttttgaagtggattggaagcaatggcctctgattaggaattttatcaatcataaagtcactttgttttcaattgaatgcattggcgttttgttttttacgccaatgaccttttgccgctttttttcttccatgctcctccagactcctcccaattaattaattagtatcaattaatcatcactaattatcacccccatcccatcggtcggcaacttcaaagggctgcatctctgccatagtatttttcgttccccccctttttttttgcatttttttgtttgtataatttgcaacaaattttgttttaatacataatattaatttttgttttcatttcaatagaagcatataatgtctaaccagaaacaattgtttttattcgatgggagtggacttcttgaaaggtttttttttgaggggggggggggggagggtttccatgactttgttacattttcggtttcccagcattttatgaaaagaaattttggttatttgttagagcttttgactcataaaatgccaatgaatgaactgcgaaaaacgatgccattgaattaaacactatttaaaattgccaaaatcatttaggacgaatgaatgtgcggacaaacggaacaaaagtgagcagcaattgacctctacacttcaacaaatcccagcggaccaaatcaaacaaattgcggtcggctcaacacacgtcgcttttctgttcacggttttaatttttgggatttttaccatgttcatttgagggccaaagcgggtcttaacaatgaactttttcgtctagtggacttttgtggggttttactttgcgaatttggatgaaatatgggaccaaattcgggttcgaatgcagaaaaattttctggattttacgcgtcacttgaatatttatgcgtaccaagctcacgaatttcttgtattttactgaattttgttttttccgtccaggataacaccattggacgtctcgcattcgaacttgtgaccaatgttgttgagacttcagctgcaacggacaaaagttagttgtttgttgctttcatcctgttaaccatgaccaattttttgaaaattccaaacaagccttggctcaagaaacaccacccattttaactatttttcgaatcgaactcgtacaaaagcaaaatgatttgttgatttgaacaatttttggcaatggtgtggaattgcggtcccgacgaaaaaaaatgttaaaaatttcgctagtgttttttgcccaatttttcgcatagctctcaaaaatttttagtgtaattttaatcctaatttttgactatggcgtgaattaaaatttaaattctgtttagacgagccatcagccagttcagcccggaattcgggcgcttcgtcaaccgatccggtgtccgctgctgcacaggcggctgtgaacgcggccaatcggacagcgaaaatcagggttttttcactattttaaaaaaattttttatttttgttcttaaaaatccttacgtgtccacgacttgcatttcttgacagggtaccattttggtataaaaatgttaaaaaaaatcaaaattttcccatggcacggaccaaaaaaaaaagagttcccgccggggctagaattcaatcctggtaccgtccctgtgtctcttggacgaagacgacattaatgcgactctgagaatttcctggacatttttaatatattccgtttttccatcaaaatgtctgacaatgagcgaattatttgttacttgtcaattttagatggttttgcaagacaaatcgcgagatgtgattgtgcgtgagttgcaacagaccaattttgatgcgaacgaggcggtgaacaacttgttgagccgggacgacgacgaaatggaggacttgggcgagacgtactgcacgttgggagttgttgtccttgctggacgccgggctgcgctctgatggtgatacgggtgcatttacatgcattttt

SEQ ID NO: 26458 - DNA, 1568 bp, Heterodera glycines
  unsure (1)..(1568): unsure at all n locations
ttttctcccccagtaaacctggggttgtttcgacgctgttccatagcctcgactgggtccagaatgtacaactggccaaagccaggaatctgagttgtaccagcctgcatgctgcttatgcggcgatggaattctccgttaagaataacggccatcggaccgccagcagggcttggtttgttgccagcggaaacgctcgcaaattggaacaggttgttataacgcgacatgtgtcgcacaaattcttttccttcacgggattgcttattccccacaatcagctctttgagctcatcaggatgcgggttaagcattggcagcacaactcttcccttccggcagcaaatactactgtcttcatgtgagaagagatgtgcaccgcaatcggcgcattttttgtcaccgagtttcccggagtcacaatattccgggaaatgtttggctgctgctgcagcgcattgccaccccttgtgaaatgcagagcaacgccgtgtgatcggcgttgccactcccagcgaatttgctggcgggggacgtttcggcgccggtgaaggcgaacggctaacagaagctgaaagccttttttgaacgcgcattgatcgccttggtggcgtcttaggtctgatgaaaattacatcatcagcctgcgcgattggttcttgctggacaattgtgtccgcaacaacaccgtgggtgtcagcttgattttcgccgatcactggtgcttgcgcaagaacagcagtatcttccgaggaaggaagcactgctgaatcatccacttccattggcattatgaccttggaggaagtttgcgctacatccccattgtgatgagacacaacagcgaaagatgttgaaacaccttcccttggatgaaacggcacaatatcagagccgtaaagctcatttatgtgccataaaatgcgcttcttctcataattgatgttcaaatccggcagaacaaaagtgcaattgttcataagccaggattcagcatacaggcacacaaagtacccgcagctatttccatcatgttgtaccgtaagatttaccgcattaaaaatcccggtcaacactgctgacggcaaaatgtcagaaatgatctttccaattttatccgtcagttgccaatccaacctgccatagggggtaggcaaagaatcggcaaaatgagtaccccactgaacatcatggacaattagagtccaatgtccagggaaatgcactggcaaaagtatgacttctgccggaacattagggttgtacccaaatgtcatatttttgtaaggcatgactctgtccaagccatttctccataccattgggtcaacaacgaccacttttcgttgtgaaatgctagccaaatatgctaaatatgtggcagcaaaaccgtcattgagaaactgagtcagatcattccaacaggtctcaatgtatcttgnngcagagctcngggcaagcgatgtttcgccatcacngtcgtaaaggccattgctgcccatttnccaatttacnagcaaattccgcgtggntgcgaaataatttgcactgtgctgaaatttattttt

SEQ ID NO: 26459 - DNA, 1078 bp, Heterodera glycines
  unsure (1)..(1078): unsure at all n locations
tttttctatccttgtggactgagtcgcncctgaaatttatatatcagggaacccaacactttcttggaatttcccagtacgggtttgtccgtgaaaatttgaaaaatatttccaaaaatccctatttcttttttctatccttgtaaatttgaaaaatatttccaaaatccctattttttctatccttgtggactgagtcggcccttgaaattatatagcagggaacccaatacttccttggaattttccagtacgggtttgtccgtgaaaatttgaaaaatatttccaaaaatccctatttcttttttctatccttgtggactgagtcggcccttgaaattatatatcagggaacccaatacttccttggaattttccagtacgggtttgtccgtgaaaatttgaaaaatatttccaaaaatccctatttcttttttctatccttgtggactgagtcggcccttgaaattatatagcagtgaacccaatacttccttggaattttccagtacgggtttgtccgtgaaaatttgaaaaatatttccaaaaatccctatttcttttttctatccttgtggactgagtcggcccttgaaattatatagcagggaacccaatactttcttggaattttccagtacgggtttgtccgtgaaaatttgaaaaatatttccaaaatccctatttcttttttctatccttgtggactgagtcggcccttgaaattatatagcagggaacccaatactttcttggaattttccagtacgggtttgtccgtgaaaatttgaaaaatatttccaaaaatccctatttcttttttctatccttgtggactgagtcggcccttgaaattatatagcagtgaacccaatactttcttggaattttccagtacgggtttgtccgtgaaaatttgaaaaatatttccaaaatccctatttcttttttctatccttgtggactgagtcggcccttgaaattatatatcagggaactcaatactttcttggaattttccagtacggggttgtccgtgaaaatttgaaaaatatttccaaaatccctatttcttttt

SEQ ID NO: 26460 - DNA, 2443 bp, Heterodera glycines
cttgggtttttagcttcccataagtcatgctcatcatcatcactttcaatccgtgccatccctttcttcttcttcttcggcacttttccacccacgcgtgccgtccgtccttttcgctttgtgccgtttttctttttgctcctttcattggctattatttacttgtctggcccaatttttcttcttttctctgcaaaatttccttttctttttcctttctttcttttttatacgaaatgatgtgtgactttcttcaaagaaaaaatttaaaaacgaagcaaataaatcaacactctctctttgccatcgtttctttgcctctctccctttttcattttttctctctcttctttcccccccccccctctctctctctttctctctcttccttcgccctttctctctctctctctctctttcttaaaagccgatggtacccaaacttctcacttttcccaccacctctcacccgctcgccgagggaacgctgtctccgatacgcttttatgcttttcctgcgcgttggcttttgtgcctcagggcattttgtcttgttctctgtccctttgaagccgcgggtcatacacacggctttacactttctctccccttccgcttctcttcctgtcccatttatttataatttacgacttttctcacttctctctgctgcccaccccatttggcccacagatatcgacgcgtttattatttgtctctccgcgttgcccggcgtttccggcaaggcacagtcccctctcaccccctccctttcaatgcttggccattctgctgggccgggtaagaaagttggacggatccctccccttccccccgccctccgacagtgcctttttttgccgccattcagaaacaaatgggtgggcgtcgtcggtggacggcacggggggggaggagtgccatttgaggaaaagccattcccggcaattgttgactgtcgttgcctttcccccagcggcggatgtggttaatttgccccccccccccctcttctcgtcatcttcctcttttcctcttcatatgtattcgtcgcccgttgaagtgccattccgtccattgaagcggataatgtgcttcgtaatattcacttgccattttcgattattcttcggcacttttccctttttcgtaaatttcaaaatttattttttttttttacatttctccatttttatttttgttccctgacaaaatttgccatttgaaaaaatatatttttcttttgcctttgaatttctgatggaaatgtcttcgctaaagcattggccaatgaatgaatgattaatgggttcctttcttcctctgatcactcactgtcatattcattcaaatcaaatctcttttttcctgtaattttgaatttatttaaatttaaatttaaacaattcgatttattttcttaggatttcctttttaaggcaattctttcgtctttaattggttttttaataaaacaatttctataatgcttaaattaattaaactctaaattaattagttaaagtcattggtgccataattcttcataatattattcgtcaaaattggattttcccattgttttttttgtttatttttggtattaatttaattcatattcaaatgccaatgttattcgcgtgccgtgccgtctttcacatttgaatttgcccattttagctttggtttggcagggtgttgggaggtgatttggcattcatttcccatttggtcgcactttttgctacaaattcattttaaaatattaatttatccttagcctcctttttggagcaacaactataatcacttttattcagcgtttgtttcatttttcattttgccattgcttccggcctcccaactcatccgtcataatccctcaggaaattaggaaatctctgttgagggagtccgaggcaacaacagaaagaaacggcaacaaaaacaacccttggcaaagcgttcgttggcattttgccttttcgccgtttgccctttcctccgacatttctcttctgctgatgaatgagtgagtgctgcttcgtcttcgtcttcgtctccgtcttcctcttctgccactgcttctgatactgctccgtcttttcttttccttttgctccgctgctgaacaaaaatcacaacgacgcctcacatactgaaatcggcagaatcgttcactttgtgtttcggcaaaatgggctgcacaatgagtcaggaggaacgggcggcgttggaacggtccaaaatgatcgagaagaatttgaaggaggactttgtgcatgtgagcaacagaagaacaagcggaatagggagagaagccaaatcagtgaaaatgggaaacaaaaactgatcaaacggagcaaaaagaaaaaagaaaaagcgattttggaagaatttcgaaagataatgacaatgaatgtgcatattggaacttcatttt

SEQ ID NO: 26461 - DNA, 1841 bp, Heterodera glycines
  unsure (1)..(1841): unsure at all n locations
gaaaatcacatcagaagcattgaaccattcgcatttncgcaaaactcgagcatagtaatgnaaaagcacaatattataatgtgattttctgcccttctcaggccgttttgatattggaacagaattggatgaccgaagtgaccaaagacaactttcgcccgcttaaacagcttcagcaactgtccttgaaaaacaacaaagtgagaagcagcaggcagcactttttcgttttaaacatttcccccgcccaattcgatattaattgcttttcctttttaattaatttttccattcgtttttagctaaggtccgtggacgtagcggcctttcaggccaatccatcgctggtgatgttggacttgagtcgcaatgagctgattgacctgtcgccgggcactttcctctcccaactgaaccttctcctcgtcgatttgagcttcaacaaaattgtcagaactccgttcggcgcttttggccgtcggattgctaccgtattacttcaaggtaataaaataataactacagtatacgcaactaataattttgtttagaaaatcctttggtttgtgtggaacaaattcatatgctccaacagggaaacggcgtgttcattccgaacatcgaagacaaaatctgtggaaaggattcgacaacaaaatccacgacagtttcggaaattgaggcaaattaaaagcaattacctaaaataattatgaaatttatttcaaatttaacttcctttttaagtcactctccgccgatcaaatcgaagacaacgcatcggaggagacggaagcagcagaagaatccgcatttgttcagcaacagagcaccacgccgcccaagggatcgaccgaccaatttgctgagacaattgaaacaacgatcaatggccataaaatgggcaaaatgccaaacatacgcccaattcaaatagggcacaaacaacggcaaaaggcggcaacaacacaagtaaatgccgtagttaatttggctgtaataaaaagcaattattgcttttaattattaggtgccatctgccgatggttttgttgctgaatcgtcgccttccgccgaattaactgagcaaaatgccaaattaatgcagcagaatcagaaaaacaacggagctgaattggaccaattttcacttgaaggaaatgaaattaggcaccagcaaagaaaggacagcaaagtaacaaaagtcaattcaattaagctaaattagcgttaattatttattatttgtttaggaaataaattcgggcccaattcctctcaacgaaaaaattgaaaatggcgaaggaatttcaaaggtgagagaccgtaccgctgaaactgagtcacagactgcgaccgatacggtaattggagaactgaccgatgctccctcgtcgactacggtagacccgcgcaacgatccggccgtcatttacccgcacccggtcccatttttggccactgggccgaaacttcacacggcacacagtgtaaaaagaattttaaaatgtatacagtatttaagaaatattatttgctttttatagataaatagcgaagaaaatggcagcaattcgatgctgactttgccgccgaacattgttatggcgggaggggaagaagaacaaagtttgtcgaggccaactgaggacgaaaacgaagcggcaaaaaagggggaaaaaggtgaaatcgaagagaaaagcaaataaacaaatgccaaatgatgacacttaatctaattagtaaatttttaagaaaatgggcaaaacttcgcaaatatttcccaattgaccaaagaaaatggggaggacggacagaaatgggaggattccaactgagga

SEQ ID NO: 26462 - DNA, 1329 bp, Heterodera glycines
cagaaaaaacagtccagccagggctaggagttttcttgggttttcagaaaaaacagtcaagccagggctaggagttttattggattttcagaaaaaaaaataggtccagccagggctaggagttttcttcgattttcagaaaaaacaggtccagccagggctaggagttttcttggattttcagaaaaaacagtccagccagggctaggagttttcttgggttttcagaaaaaacagtcaagccagggctaggagttttattggattttcagaaaaaaaaataggtccagccagggctaggagttttcttggatattcagaaaaaacagtcaagccagggctaggagttttcttggattttcagaaaaaaataggtccagccagggctaggagttttcttcgattttcagaaaaaaacaggccagccagggctaggagttttcttggattttcagaaaaaacaggtccagccagggctaggagttttattggattttcagaaaaaataggcccagccagggctaggagttttcttggattttcagaaaaaacaggtccagccagggctaggagttttcttggattttcagaaaaaacagtccagccagggctaggagttttcttgggttttcagaaaaaacagtcaagccagggctaggagttttcttggatttcagaaaaaaggcccagccagggctaggagttttcttggatattcagaaaaaacaggtccagccatgggtaggagttttcttggattttcagaaaaaacagtccagccagggctaggagttttcttgggttttcagaaaaaacagtcaagccatgggtaggagttttattggattttaggaaaaaaataggtccagccagggctaggagttttcttggatattcagaaaaaacagtccagccaaggctatgagttttattggattttcagaaaaaacagtccagccagggctaggagttttcttggattttcagaaaaaaataggtccagccagggctaggagttttcttcgattttcagaaaaaaacaggtccagccagggctaggagttttcttggattttcagaaaaaacaggtccagccagggctagtagttttattggattttcagaaaaaataggcccagccagggctaggagttttcttggattttcagaaaaaacaggtccagccagggctaggagttttcttggattttcagaaaaaacagtccagccagggctaggagtttttttttgtgttttttttaaaaaaaaaaaagccaaggccccgggccgggggggtttttttttttgtttttttttaaaaaaaaaaaa

SEQ ID NO: 26463 - DNA, 2554 bp, Heterodera glycines
tgaaaatcagaacaaatataataaatatttgtagatcgactttttaaaatgaattttttattcggtaaagccgaaaacttaaatgtgaaaaaaatcagaatatagacttacaaataattcatgatagaaatgattataaaaggaataagggaaagcctatttttatcttcattatattctctcggttctaatgaacatcaaggaggccttgaggccggaatcggcacgcttattcaatcgcaaattgcgaaatggccgaaaattggctttgctctgcttttcaacaaaataataaatgacaaaaaggataatgagcataaaattatgaagtttcaaagaattagaagcagcacataattctggaatgatatttttatcatttaaattaaataatattcatttttacgggttttaacactctacaataataataaatataaaatttataataactcaacaataacctaacaaaaaggaaaccaataaattaaatgataaactgaattaaaatgaatttattgttccggatcgacagtgatgaatattttactttcgatcagatacttacaaagaaaacatatatttcaataattaaaaataatgaactcatctgacaattcaaaaagtaaattgcgacgtggaacgaacaattctcgaaacaaacaatttcatattcaactttaacataaagataaattgctcaagcactgcaaaaaagaggaaataaacaatttcaaagaattgttttaagaaatttcaaaattacaactaaacaaataaaaaataatcttaaaaatcagtaaattaagaaaaaaagtaatttggttcattgaatctattagtacaatttataaaaaaataaaagaactaagaaatttaaaataaaatttggacttaaaatttcgatttagctttgattctaaaacaatcgattacaattttcgttctaagtatttataaatgaatgaaaaataaagaaaaaatttccgaaaaaaaatattaaaactcctttgcttgtttgtttatatttgtttgatgtgacgcaaatttaacattgcatataaattatggtattaaatgttaagaattttgccatttttaaattacaaaaattcaataattattagggattacatttttaggcaaaagcctattttttcctgtctgaactccccgtggcctgatgcgcacgaaaaacatatttttttgggctgttgttaagcggcttttcgagtttttagtgactattttctaggcttttatttttagcgcctaaaaagcctaaaaaattttgaaagaacctatttttgcctattttggcgttttgccgaaaatttgttaacaaaaatgcaataaaaacgaaaaacacacccctaagaatcgacccaaaaaattttcaaaaaatgcacccctaagaaaaatttttcaaaaattcacctcaaaatttattttttatatattgacaagaatttgtgatttaaaaacatttatctcaatactgatttgggttaattttgttacctttttggataaaattttaaaattttacacccctaaaaatgggttttttagtgcctattttgcatttttagtcctattttttgggtttttagagcctaaagcctacctattttggcggtttttagagcctaaaaatgtaatccttactaattataaacattggtgctgaactttaaccctgctctattttaagcattaatctgtattaaaattttaacattttttcgtagcgatagtattttttgaaatgaataattggctttgttttttgggattgcgtccccaagcgaagcaattccattgattttggctggatcctccagcggagtttggcagagaatgggctctatgggctatattgactgaagaaatgtgaaattactcaaccgacgaaaaacttcaaaaatcaaacttggtttatgcagttgattttaatccgatttatgtataaagtcaagaaatctttcgaaaaattaaaattaaataaattattttacttctaataatatgattttgttgatcggaaactttagttttgagtaaacaaaaaatgatataatgtcaaacattaagtaatttcattaacaggcttaaaaagtttgataaatcctaaaagatttaaagtcatttttatttatcatttaaattcgattaaagaatacagaaaatgcagtgatcatagccgctgaaatttgaattttccgcgagatgccgttgattttctatacatagaaaattaaaatttcttgaaaaatgggcaatgtgcgcggaaatgaaacgcaactcattcatatttaaataaaattataaactttacaattaccagttaagagtcaagttttaattattgaaaaattatgaatctttttaaaaaattataaaagaaatataaagtttaaaatagattattcttgacataaaaatagaaaactattaaatatataaatatattttcatttattttaataagcttacattttacgagtaaaataagtgataaagataaattattatatgtgtacatatataaaga

SEQ ID NO: 26464 - DNA, 2569 bp, Heterodera glycines
tcacaattatgtactaaaaacaattatttaaacaactaactaccacactctttcgatcatccgctgtacattcgacgatcacagattggaatttttcatctaggaacaattatcgcaaacgaatcgtcataaatactattaaaacgtatttttaattatttttaatcgatgaaattgatttgcggtcgctcgaatttcgtacattttttaattaaattttttaaattttttctttaaaaaattaatttttcaagtttttctagcaaaaaatcattcgaaaaattttatctgttttccatttcattttaagaagaattttatactaacaaacttatattttttttttgctcattttcattaaaaaaattttaatttgaaaattttttttattccgttttattttaaatttatttattaataaaagttttattttttcatattataaacacaccaatagcgtccaacttcgtctggatggcacgcgttcaaaaaggcggcaattttttgtttcgattctgcaatatttccatttgtatggtccaacactgattgtatcatctaaaaaaatgaattttattaattttttgtatgctcatggatctaaaaattctaaaatatttgtgtaatttttatttaaatttcataatgccaaatttttggagtgcaactttaaacacattgtgtcctgatctgatccctatggctcggaaaaatatcattttagaatcggaatccggtttccgaattttgagccgtctaaatgccgatttccgaaatgtttttgatggcgttggcacaaatgcctacccgccctggactttcaaaactggcatatatccccgccggttggactgcttgaaaaagtgtggcaccaacaatcgcaccacccaccttgttcacttgctccaatgccttgaattggtgctgatcacgtggcgtttcaattgatatgttcacagtattgcacctggccaaaattcgttgcatgttcaacatcagtccgtcacgttcggctgaaaaaaaattgggaaattttttagaatttaaaatttaaaaaaaaatttattgccttgcgaaaattgcgctgccgtcggcttaatgccagccgccgatgatgctttgatgttgttaattttgtccagaattgtctccttctcctgctccaatttgatcgcattttctcttaaatttttacaaaattatcggattaaatttttagcggttttttttcattttaaaagaacataacttcaaggaaattttgaaaaattttccaagcgattttttttaattttaggatgaattaaattgttcaatcttcgaaaaaagtttctaagattttttttatctaagtttgaaattttttgtctggaaaaagttagtcagagtattttgatcaaaataaaaagtacaaaattttaaaaaagtgatcagggtatgtatcatacccctccgtttttcgatttcaaaattttttagtcttcttcccgctcatccatcggctaaaatgctaataaacacctaagttgctcagtcaagtgctcagtttcatcaagaagttgtaggaggtcaatgtcgtcagcagttgtctgttttatgccataattgtgttgcttctcctccacatgttcatcaagttcagcacgttcacatgcactattacgatcattatcaacgacaacaacaacatttttatttgcttgattcaatgcttcgttattttgatgttgcgattggtgttcgactgctgaaattttgaaaaaaaaatatgaactgctccaggtcgccgaaaaatgatctgggccagtaaccaggaaaaacccaggcctgagtccaccaagtcctggcccaagctcttgtcaatttaaaaaattgctgatttcctattgccgaatttttttgagggcatcgatcaacatcacctaatcgtcacgatcgatatgatttcgatattttattatcgatcggtcgtcaaccattttttcgggtttttaagtggaataatgtgtgccgtgcgtgcctccgaccaaaaacctaaacacggtaaactacggcttttttccggatctgttggttccagggatgtgtcgaatgccgatttccgatattcttgggcacggaaagcccaattttcgattacagaagagctctgctggtctacaatttgattatcctcattcatgccttcaggtgctggcaatggaatggcgggtgccggcaacggaattgcggcacccattttgccgccattaaccgcctcattaacaccagcatcattgttgttgttgttattgttggtagtactgtagtcatcaatggtaatgttcggtatggacggagcacgacgacgataatggtgagcaccacaaactttgttattcaccataataccatcatcattgtctataaaaatgagatttttttggttttttttcttagaaaaatctcggtcgataaaattgagaaaaaattgtaaaattgagacgaaggttaactcagtgcccccaaggatttaccggaattaaatggatgtcatttcttactaaataaatttttttttgatttgata

SEQ ID NO: 26465 - DNA, 2471 bp, Heterodera glycines
  unsure (1)..(2471): unsure at all n locations
attttttggaaaaaacgccaaaaaaggcaccaaaccgtcaaaatgccaaaaaaggcatttaaggcacgaaaatcccgaaaaggcaaaagcatttgtctcaaaagtcggtctcaaattatcatcctaaaaatttatcttttaccatctgataaatgtcttatgtccaattcagttttctcaagaataaaacatattgtcacatcatttttcattcgtttttctgagttttcactttggcattttctttttcgtattggcatttttacacttttcatttactttttttttcacctgttctttccgtgccaaatgctttcgctttgcctttttacttggaaagaaagaaatgccattgtgcgcttttcactttcattcgcgttaaattaattttaataattgccatgtgcaaattctcagtaatccaattgtgcctttccaactaaacactgcacgaaagtgccgaaacgtttttcatttaattttacaagaaaattatttttgctttagaaaaagttttcagttttacgactaaattataatgttttatgaagttaatttcagtaaacaaaattattaatgttaaataatcattttctctattactattttttgaaaaatattccatttttaaattttcgatttatattacgatcgggaataaactgggattttccaagaaaattttttttagaaattaaaatatttttccccaatgttaagataaattaaaaaatagaaaaaaaatcaaaacaaaattaaattaaatttttgttaaaaactcctcaaaacttttctatctttgatttttaaagctggaaaaattaatgtcacatcaattttcagaaattttttaaaattttctttaaaaacattttacaaatgaaaattattaatcttgaatatatcttttttacgaatgttttatttaaaagattttaaaatatataaataatatcacatatgaaatcatttctcacataaaataacgaaattgtcaaattaaatttattaattatattttatttccttttttcttcgcccattttcccattgcttttccaatttgagtcagtataacaagttcttcattaaacaaatggagctcatttgccagtacattaggcctttctgacacttttttcccctgccgttccgtgcactaattaatgactttgtcaatttgctgcttttccctaattgcgtgtccattcaaaaaatacgtttttcatgaaattgtattttgattaaaagtgcctaattgccatcatttgatttatttttcatgaagagtttcgggtttgggttcagcaaaattaagcaagtaaaatgccgtgatttcgagtttcgaaaaaacaaataaaaaagggcactgactgctgctcgagactaaaaatccaagactcgagaccgagacgaaaaaaacccgagacttttctcgagtcgagtctgagactcttgagtgcgactttttgcgccgtcggcactacgacggcactcaacttttgaattttgcatttttgggttgcaaaaaggcttaaatattaaaaaaataaattaattaatattatttcattgttggctgggaccatcaatgctttgaaaaattctattcttttcttcaattaacactttttctgtctcccgtcattcgcctgagtttttcccacccgtccgtctgctggcggcactgaattgtcccacgcttaggccgcttcatcgcggcaaatttgccaccaccgccgttctgtgccgtgccgtgcgtgtgcccccgtccgattttgctgtgccattgtccccccccccccccacctcaagagcccattattttatccatttctttgtgtgctgcgcttaacgcggtgccattgtacaaattgggcaaatttgtccttggcatttccatccattcgctcattcattcgcatttttcgaatagcaaaacaaaaacagaaggattaacacacaacacaaaaaagaaaggtgaagcagactaagcacaaaacgacaaaataatttctcttttgcgtttccttcaattaaaatatttgcttagcttttacatattttataatctaaattttacttttatgaaatttcttttggcaaaaattcagtgttaatttgggcgtatttagtaaatatattaaaatagagtatttttaattaaataataaatttaaaaaatatataatacatgttatatatataatttcaattcgatttttatatttcttttttattagaaattaatttataaaaaaaaataattgaccttattgaattttaaataatttttaggtatcagaaaaaactattttataatcaaaatttttacttcgtatgaaatttcttatgacaaaaattcagtgcccaatttgaattttagtatatatattaaattgaaatattttaaattaaataataaataaatttcgatttttttatttctttttctactaaanaattaattt

SEQ ID NO: 26466 - DNA, 2060 bp, Heterodera glycines
  unsure (1)..(2060): unsure at all n locations
ttttttaccagtatgaggatagttttttgtggcaaaacccttgaacaatgctgtaaagtcaaaaataagacattaattaaaatttgcatttttattctccgatttgttctccttcacccttatattttttctattccttgtttcatgttggaaatgttggtggcattgtaaccggtggaactggcggcactgacgggaacagactcggcggaagtggaggcacttttggggacggactcctccgaagtggaggcacttcgggagacggactcggccgaagtggaggcacttcgggagacggactcggccgaagtggaggcacttcgggggaaagtggaggcagtgggaccggtggtactggcggcactgacgggaatatactcggcggaagtggaggcacttttggggacggactcctccgaagtggaggcacttcgggagacggactcggccgaagtggaggcacttcgggggaaagtagaggcagtgggactggtggtactggcggcactgacgggaacagactcggcggaagtggaggcacttttggggacggactcctccgaagtggaggcacttttggggacggactcctccgaagtggaggcacttcgggagacggactcggccgaagtggaggcacttcgggagacggactcggccgaagtggaggcacttcgggggaaagtggaggcagtgggaccggtggtactggcgtaaatgaacccagaggaaatgaaggcaatgacgggaacggactcggcggaagtgggggcactggctaagggaacggactcggcgggatttgaggtgattagagaacggcgactgatttgatgaaaggaattaaaagagaaattccccttttcatgttaaatcaatgttgatcaacgacaaataaatctttttaaatttcgtattagtaaaaagtatcatcattagtaggaacatagtgtacccaagaagttataattcctcacatcttaggtggaagggtcgactcaatataatataactaaactagaagacatatgtaagaaattcgaatatataaaaacaaaatattctcagcccgacaattaatacaatcaacttaatgaaatcagataggtaatagataaaaaaacagccttatttcattcaaatgcgcaagcccttgatgacttctaggtctgtctccataagcatttcctgagtcggccaaatgttgaggtggtcgtagacaaattgtgccaacagaattctgttagtatccaactgaacatggcttgtcttctctgcccgtgccttgacaccagccgaacaaactcaaacagaaccgtttttgatttattccccaaaagacttcaccttccggcacaccaaaaccgcccaacgaattgcctctctccattttattggattcgacgaaatctgtgcccaaaaaaatgtccgactgtccacgttttgagtcggcagtgctgtccaatttggacaaagttccttccacagacgctccactcacatcgaaaagctaaaaaattcaagggtaaagtgagtgggaccgattgcccaaaaattaccatcccaatttgactcgcattcggcaattcctccagcatttctcccttgacactcagctcttcactgaaactggcctctcgggaagagttgtgcgggaatttggccataaaacggtcaatgccacgtggcgacctcaggggtctgtaaattttggattgggactgctgaaagcatgcaatggctttacttgggtggacttttggactcgcgaggacttctcagctccggcacgcaattcatcgttctcagtttgagcagcgcttcgctggccgagtccctcctcagtttgcccatgctgtcccgcgcactggtgctcatcgaattgctacgcaatgacagaatggagtgcagcgacttctccgacggtttgaaggtggaaacgatgtcctccgaaaacacttcttccgcaatcgaatcgtccgtctgttgttgttgctggtgttcagcgacgggttccacggcgaccaccatccccttccnagatgacatggtggaaa

SEQ ID NO: 26467 - DNA, 1270 bp, Heterodera glycines
tgcctaggctaaaaaagtgtttttttcttccataaaccacttcccgaattttttctgcttgttgcttattgtgtcaggggttgttccgaattccattgcttttgttgtgtagagaattccgaattttttgagcctatcggaccatttctgcttcacacactatcatcaagaattctttactctcgtagtcattctttgttaacatattatttaattttacgatccttttaccatcattcatcatctttcatttttcattaattgatcaaatgaggagacatgtgagttctgtctttttttcaattaagagaaattttttcatttttgcttttcgtcattccgttaattaattaccaatcagagtgattgtaattaattcaacctctcaattttcattcctttcaaaaatttagcccaatcatttgaataaagtttttcataaatttcatcatctttaaattatgacagggatgggcttttgcctatcattggcttatagatgtgctaacaaataaaaataaataaaaaactacaataagagatcatttatgccgtttttcaaccaaatatgctaaattcgaaaatttggactttcgactttttgtccgagttcgggtccggggttcggaattggccgaaatggatacctgagcatggtcagtgcccccgaaaacacacggacttgtttttatggcaataaaattttcactaacgcatttccactgacccattttccgggcgccctttttggtttctttttggaaaatgatcacaaaaaagagaaataattcgaaaatttgaagcaattaaagaaaagttgaaggaaaaaggtaaatacaaaagcaaagaccaatacaaaattgagagaaaaattgcaaaattattaggaacaaatcggcaattaataagtaaatggaaaaatgaattgaatttaaataaaaataaaataaaaaaggaattttatgagatgaaaaagagtgaattcattgaacgatttgatgaatttaaagatttatatggccaaggcaaacagaaagaatttgtgaaggaattgggcatttgtaaacaaacatttataaaatggaaaaaagaattaatgccaaaataccacaaaagtaagagaaagaatataattttaatgaagttaaatctaatttttgtttaagaacaccataccaatgaggccaaattgatgaagatgaagcaatattttgaaataaaagaagcaaacacaaaagtgaccgacgaaataattgccgaaggaattggg

SEQ ID NO: 26468 - DNA, 1237 bp, Heterodera glycines
cggagggacccggagtcgggatcccgactgaatcccgatcccgatcaatcccgaacattttcgaaaaatgatcgggacgaatcccgaccgaatcccgatcccgatcaatcccgaagattttttttcgggatcccgcgggattatcgggatttgctaaaactcatttttttaatattttgtgccaagttttgttcaaatgcttatataatatttataattaattgatcaattcgattgagaaaaatagggatgggaattatatcaggtttttatataaatttttcaaaattaaaatatcatgcccaaaaagagattttaggaccaaaaattagaacattaacatcatagcattaaatagttttttttacaatttaataaattactattaatttttgtattttcgcctcctctgatcatttttaacaattttgaggaaagttagcaaatcgtaagtgcaagtcgtcaaaatcactaacaaaaatgacataaaattaaagaagaaaatgccaaaataatttaaacacacaataatatcacatgcatccgaatctaaaaatccgatttttaaccattttttgcagcgaatttcttcaaaaactttaggggaacaggggggaggccggcggtgccgataggcgccgccgggaaaattttgaaaatttggaatgtaatttgttaacagaatttatccaaaaacagtctatattttgtgatttttttctcaaaaatgccaaaaacttcgaatcataccgagaatgtgcatttgcttcaaaaaatattttttaaaaattcattgccatggaacggactcgaacctgcgcccattttccctttattatcttacaaaatcaacttacccacagttatttggtactgcggctcatttccagattaattcaaaaaaaatataaatttatatttttaaaaatctaagtttggtgtcgcattttcagggagccgtacagaatgaccatttttgaaattccaatgattttaatcaattttagaacaagaatgaaaaattttaaaaaatttgaattttcaattttttgctcgaattcgggttcggggttttgaattcgtataaattgatgtcagatttgtgatcagcaacctcaaaatcccccagggaaggagttttacacgactttttgaaatttttattttttcgaaaaatcggggggaccaagcacattaaatataattttttttaaaaatttcaggggggtgacaaaaa

SEQ ID NO: 26469 - DNA, 1024 bp, Heterodera glycines
atcattgatgaaatggactggatcaatattaacttaaataaaataaaaacaaagtgtaggtagatgagcagtcaactcatatttaaaattaataataccctttctcatcggaaaccttaattaaattaattataatctttatcaaaaattgtatacaaaatttattaaagttttataataaaaccgaaaattgtaattatttttaaatttttttagtttttcaacgtttgaccggtgaccccccgctcggcttcaaaccgagtttaagtcaaaaaagccggcagtgtacatcgaaaagattgaaaaaagccaatgataaaaatgaagaaataccttatcagaattattactttttatttacttaatttttcaattatcataaaatatccaaatttaaaataatagggacatttaagaacaaaaattgttattgcaatgaaaaaagattgatatttgaatttactcaacgaattgaaaatatagtttaaaaatcgaaaaaaataatatattagtacaaaaataagcaaagcaaactaaataaatctttatagcatttgctctaaaaatagtaaaaaaaaaactctgaaaacacagctatctcaaaaaactggccggaaaatgttaatcttaaaataagtattttttaccataaaatgattttcccaagcattattatcgatcaattctatcggcaattataaaataaaattattttgaaatactaataaaatatataattaattaataattactagggatgggaattttatgcacgaaaaatgaccaaaatatgcacataaatatgcaaataaaattgccaaatatgcagcaaatatgcacaaaaatcgtaaaatatgcacgaaatatgcattaaaaaattgaaaattaggggtgcaaattcaaaaaaaaaaaatttttttttagctacatttcttttaaaaaaattctctttagcaaatattgacattttttaaatcaaacattttctcatgaaaaaaaatttgggagaagaattttgagaaaa

SEQ ID NO: 26470 - DNA, 1505 bp, Heterodera glycines
  unsure (1)..(1505): unsure at all n locations
gaggtataaaatttctcaaaaaaagagatagccatttttctgggatagagtataaatataaaaattccctcaaaaataaaaggtaaattgcgcaccgccctccnctatcatgctcgagagcatttgtatgtgtataaaatttatcaaaaaaagagatagccatttttctgggataacctctaaatataaaaatcctctgtgaaataaaatggcgattgtgcacagccctccgtctcatacgcaagcgcttttgtgaggtataaaatttctcaaaaaaagagatagccatttttctgggatagagtataaatttaaaaattccctcaaaaataaaaggtctattgcgcaccgccctccctatcatgctcgagagcatttgtatgtgtataaaatttatcaaaaaaagagatagccatttttctgggataacctctaaatataaaaatcctctgtgaaataaaatggcgattgtgcaccgccctccctatcatgctcgagagcatttgtatgtgtataaaatttatcaaaaaaagagatagccatttttctgggatagagtataaatttaaaaattccctcaaaaataaaaggtctattgcgcaccgccctccctatcatgctcgagagcatttgtatgtgtataaaatttatcaaaaaaagagatagccatttttctgggatagatataaatttaaaaattccctcaaaaataaaaggtctattgcgcaccgccctccctatcatgctcgagagcatttgtatgtgtataaaatttatcaaaaaaagagatagccatttttctgggatagagtataaatataaaaatcctctcaaaaatagaggggaccacgaatgaatgaatgaatgtgtgtgatgtgatgaatgaatgaatgtaaagggcggcggaatggtggcgaagggatcgatggaactgcggaggggtcgggagagatattggggaaatttgagagaaaattggacgaaaaagcgacagagggaaggctgaatttttcgattggatttcgagaaggttgagattcgcttttctgagatttgctatttatgatagtgtcggatatttaaattgggacatttgatttgtttaggtatcccctaaatccaaattaaagtcatttaatgtttctttctctacacattccgctcggtttcagcgtttctttccaaatttatatccaaaaaactccttttttttttgctgtgttcacaatttgtgctgctctttgttcatttgccgccgcccattaagaaatcgagaatttgtgctgtgtcgtttcgagaattctcaaatttagcccattcaaaaggcaaattcttcgcacgttttttcgcgcaaattctgttcgtaattgagctaacaaaaagcacttcgattcattgtagttggtggggaaagctgtgaaatacgcaatagagaagagatttatgggtgggggtggtgttaagtgaaaatgtgtgagaattggggcgggggagggggggggggg

SEQ ID NO: 26471 - DNA, 1231 bp, Heterodera glycines
  unsure (1)..(1231): unsure at all n locations
cattatgcaaagatactttataagatccggcgccgaaaaatgagagcacgaaataatgttactacaccacagaacgtcgtagtttgtgatacaaggaacaattggcctgatcaggacataagcattgtgcattatgcaaagatactttataagatccggcgccaaaaaatgagagcacaaaataatgttactacaccacagaacgtcttgttttggtaatacaaggaacaattggtctgatcaggacttaagcattgtgcattatgcaaagatactttataagatccggcgccaaaaaatgagagcaccaaataatgttactacaccacagaacgtcttgttttggtaatacaaggaacaattggcctgatcaggacttaagcattgtgcattatgcaaagatactttataagatccggcgccaaaaaatgagagcaccaaataatgttactacaccacagaacgtcttcgtttggtaatacaaggaacaattggcctgatcaggacttaagcattgtgcattatgcaaagatactttataagatccggcgccaaaaaatgagagcaccaaataatgttactacaccacagaacgtcttcgtttggtaatacaaggaacaattggcctgatcaggacttaagcattgtgcattatgcaaagatactttataagatccggcgccaaaaaatgagagcaccaaataatgttactacaccacagaacgtcttcgtttggtaatacaaggaacaattggcctgatcaggacataagcattgtgcattatgcaaagatactttataagatccggcgccaaaaaatgagagcaccaaataatgttactacaccacagaacgtcttcgtttggtaatacaaggaacaattggcctgatcaggacttaagcattgtgcattatgcaaagatactttataagatccggcgccaaaaaatgagagcaccaaataatgttactacaccacagaacgtcttcgtttggtaatacaaggaacaattggcctgatcaggacataaccattgtgcattatgcaaagatactttataagatccggcgccaaaaaatgagagcaccaaataatgttactacaccacagaacgtcttgttttgatatacacaggaacaattggcctgattangacataaccattgtgcattatgncaagatactttataagatccngcgcccaaaatgagagcaccaataaatgtacta

SEQ ID NO: 26472 - DNA, 951 bp, Heterodera glycines
cgtctgaggcctcggggcggctgaatgcttcccacaaaattaaaaacgggcgcgaagcgcccgtcttgaggctgcgatcaattgctaaattacatcactttctagcgacgcggcgaagccgcgtcccctgagcgcgaagcgctttccccacagcaacagaactcaattgaaatacaacaaagccaactgtgcaccctagtttatataccttagaacaacagtgcaactcattgctaaaacaaaaatctcgggaacggctaatcggggggacctgaaatgttgacattgcttaagcaactttttgaggcgcatccaggaaaactataggcattccggtccggtggccaactgagcgccggcggcgctgaaacggcttttcgtttcagtctcactgttacgaaatttttttcttttgctttgatcaaaaaatgcttgctgggaggattttaagttgaagtgtgccctacaacttcgcttccaatcatttttctctacggcctactgtattccgtgtacagtcgtggaaaaattgcttacttttttggccatttcagcgccggcggaataactcgtcggggttttgagggaggatgtcggtgtaagcggcttttttgtacagctcgacgagctctatccaaccatgtttttgtatttctgaaattttcagaaattttcgagctaggccccctcgtcacttttgaggtttttgaattttagtattttttgcagatttttccggggaaaacggagaccactttcaagcaaccgtttttcatgctctatcgattggtgtcattttcagaaaaatttttcaaaaattttttggaaatagaaaatttttggttgctaggcctcaatttcagttctggcgcaataagtcgtcaggagttgaatttatcaaaaaatcgtcaaagagcttttttgtagagaattttaagccccaatctaatg

SEQ ID NO: 26473 - DNA, 1674 bp, Heterodera glycines
  unsure (1)..(1674): unsure at all n locations
ccaaaagacaattggggtaattagaggcaattaattaactttttgtttgnttcacttgatttaaagattggtcattggattggaacaaaggcttttgcaattcggacaatcccaagaaacttttccccgaacaaatttccgcagattgtcttccgtccgngcctttgngatgtgtcgcgttgtcagcccggtcgggtcgcnccgtcccttttccttttgaattttggaatttgaaggcgaaccgccagttgtcatcagtcagccgaactttctgtacgcgccggaattcgttcagaaatcaatcgacggacttcgtcagcccgtgcaggaattggaccaaattgaggtgggcattcattgaatggagaattgttttgaattgaaaatgttcagattgacatcgaacctcggctgggcactcttttgcaggcccatcggcgttttctcatttccatttcgatgtggcacggcgtcaacattacgctgtcgtaagtgccattccatcgatttttgagtttttaaaaaaaatatttagcgatttgaaaaacttccgaaatagcattgtgcctgtgctcgaagttgatgaacatgtaaaagataaaattggaaattgaaactcattgatttgattagtcaattgcttttggcagattcacatcgatgagcccaatttgaatttgatcaaaacgaaattggtccaaactgagaaattcgtctcttccgggtgcattttcactgccattctttcgctggtggcaattgccgtcgtttccgttattttcatccggcgtcaattggttgctctagcaattagcattggttaattaacaattatatgctgaatttatttccaggggagctccgactccgagaaattctcttcgcccgccggcgtcgctgccgatggaaatcgccgttcgggcgccgtttcgccgattcctttgtcagtgcccaaatccaatggcacggaccttcgccaatgattcacaaaacgaaattcgctcactttcactttccattgattcgatttgtgctcaatctctcttttccatgctttgccttacgattttcgttattcgttttctccaaatcagtcgattaatttgatttttctgattcgcaacatcaaaattctaatttcatttgtcaatcgggtcatcatcgccaatcgcaaaatgacatgtccgtcagaagaccttacaacataattcctttttatttgtatttttatttttatcatttttatgttcaaattaggagtatagtgctctgaaagtaacaatttatattcaatcggatattaattgttttatttgtttttgtaaataaatttattttcaaggattgccgcaatttttcttagaagcaaccaaattaaacataacgatctctatgcttataaaagttcaaaattttgcagggtttttagggtcgctggtcagtattaattaaaggatttttagtgatatcccaatataattattaattaaataaatagtgacaaaaaatgccaaatagtggcgaaaagccaaatttttaattatgtattttaatttgaaaataatttaaattaaaggcaacatttattcatttattgcagttacaaatgagtagagaccgacttttgaggcatatgcctttttttgcactagttccgatatatgcataaaaaaa

SEQ ID NO: 26474 - DNA, 1243 bp, Heterodera glycines
ttcttcaacaattcgctggtgaaaaaacggcccgacttctcttcagtcgctgccgctaatcgcaaattgcgcaacgatgtcgccacggaatgtgccaatgtcgccattcatcgccagcaacagcagcagcagaagaacggaagtgccatcatcatgcaaacttaagcagaggacggacgagtgggatgaagaatgatgatgctggtgccaacaaacattcaatgcgatgaaatgatataaagcataatatgtatttctcagctgtattccattgtattgtatattccattatatcgcctatatgcgtatgcatggtctcaaataaactcacctagaattcggatttaagaaaatgcaatagacaaaaaaattatgcaagtaagacaatttatcatttcatattcgtctttgaattaaccgacggagaaatgtcttttaatgtttttgtcgcggattatgtatggaatagttgatagatggagcccctagactagtgggaccgagacttctacgagattttactggattcccgctcctgctggaaatttcaaattttctactttgttcgaattcgggtccggggctcgaaataagttgaaatggatgtcaaatttgttatcaacgaccctgaaaactcccgtatttgccccgcgggattccaggtcacgctcccggaaaattttaaattcgcccgtaaattattttttaccggtctctagtatgcttaaatgtacatatattgtggttgcctgtattcaattttggcacatttattatcaggtttattacacacattgaacaatgaatacaaacactgtgcatacacacaaatagcgaatatgaagcagcacattaatggatattatacatacatacatattttgatcacattaggaaggtcgctctgatcacatggaatatgtacaaaatatggggaacggacttcacacaaacaacagcaagcagtaggggggactgatcgtgaagggggagaggtcgtcgtgcaccgtcgtcgttctcatcgctggctattcgtccgcttgggtcgtctccgctgtgctctgttctccggcgttagctgctggctcggcggcgtccttcttcttgtcctttttgtccttcttcccgtgcttgtccttcttggaacggcggttgctgtcgtcgctcttcccctcctttgatttgtgtttgtccttgcgcttctcctccttcttgtccgccgcagctgcgccgtcgcctttct

SEQ ID NO: 26475 - DNA, 961 bp, Heterodera glycines
taatctactcaaaacggttcagaattcaataaaaataacattcacggtgcgaaaaatggggtttgaaaagtttattgtgaaaaaaagactttacaaaataatacccctgggagaagggagtgggaaacatgatttcaaaattttcaattttttatagtctaatctactcaaaacggttcagaattcaataaaaataacattcacggtgcgaaaaatggggtttgaaaagtttattggggaaaaaaagactttacaaaataatacccctgggagaagggagtgggaaacatgatttcaaaattttcaattttttctagtctaatctactcaaaacggttcagaattcaataaaaataacattcacggtgcgaaaaatggggtttgaaaagtttattggggaaaaaaagactttacaaaataatacccctgggagaagggagtgggaaacatgatttcaaaattttcaattttttctagtctaatctactcaaaccggttcagaattcaataaaaataacattcacggtgcgaaaaatggggtttgaaaagtttattttgaaaaaaagactttacaaaataatacccctgggagaagggagtgggaaacatgatttcaaaattttcaattttttatagtctaatctactcaaaacggttcagaattcaataaaaataacattcacggtgcgaaaaatggggtttgaaaagtttattggggaaaaaaagactttacaaaataatacccctgggagaagggagtgggaaacatgatttcaaaattttcaattttttctagtctaatctactcaaaacggttcagaattcgataaaaataacattcacggtgcgaaaaatggggttgaaaagtttattggggaaaaaaagactttacaaaataatacccctggggaagggagtggaacatgatttcaaaatttcaatttttctagtctatctactc

SEQ ID NO: 26476 - DNA, 1134 bp, Heterodera glycines
aaaaaaaccccccggggaaaggggggggggaacaaagattttaaaattttcaattttttttttttaatttcctaaaacggttcaaaattcaaaaaaaaatcctctccgggggaaaaaagggggtttgaaaattttttggggaaaaaaagcctttccaaaataatcccccggggaaagggaaggggaaccagaatttcaaaattttcaattttttttaattttattttcttcaaaacggttccgaattccataaaaataaccatcccggggcgaaaaaaggggtttgaaaaattttttggggaaaaaaaaaccttccaaaataatacccctggaagaagggagtgggaaacatgatttcaaaattttcaaatttttctagtctaatctactcaaaacggttcagaattcaataaaaataaccttcccggtgcgaaaaatggggtttgaaaagttttttggggaaaaaaagcctttccaaaataatacccctgggagaagggagtgggaaacatgatttcaaaattttcaattttttttagtttaatctactcaaaacggttcagaattcaataaaaataacattcccggtgcgaaaaatggggtttgacaagtttattggggaaaaaaagactttacaaaataatacccctgggagaagggagtgggaaacatgatttcaaaattttcaattttttctagtctaatctactcaaaacggttcagaattcaataaaaataacattcacggtgcgaaaaatggggtttgacaagtttattggggaaaaaaagactttacaaaataatacccctgggagaagggagtgggaaacatgatttcaaaattttcaattttttctagtctaatctactcaaaacggttcagaattcaataaaaataacattcacggtgcgaaaaatggggtttgaaaagtttattggggaaaaaaagactttacaaaataatacccctgggagaagggagtgggaaacatgatttcaaaattttcaattttttctagtctaatctactcaaaacggttcagaattcaataaaaataacattcacggtgcgaaaaatggggtttgacccctagaagggggaaaaaaagactttacaaaataatacacctggga

SEQ ID NO: 26477 - DNA, 1044 bp, Heterodera glycines
ttgactagagcaatcgaacgctaacggacgacctaatggaaaaaaatccccgaaggagagaatttaattaaatccattccttcgggggaccgtgccgggtgccgcggggtaagcagtgctggttcgtttcatcacggcaccgaaccttttggctagtcagcaatcgttgcttaacttgccagatcggacgggtgcgcatgattccactgttccaagcaccccaccaaaagcaaaacgatataaccaaaatataaggaaaaattttttaaaaaattttttctccatcttcctttttgatactaaagcatcagagtgctaaaattaagttgtaaataaaatttggtgcgctttagagcactttctgaaaaaaatatttatgaaacaaaaaaatcgattttttcaagtgtccgtttggggtactcaaacatttatggggagcaaaaatccaacgcagaattaaagtacaggctatagggaagctattcccgaaggattcggtctccccataaatctgggcgcatcggttcggggggactgccccgaaaacaaaaaaatcgattttttcaagtgtccgtttggggtactcaaacaattatggggagcaaaaatccaacgcagaattaaagtacaggctatagggaagctattccggaaggattcggtctccccataaatctgggcgcatcggttcggggggactgccccgaaaacaaaaaaatcgattttttcaagtgtccgtttggggtactcaaacaattatggggagcaaaaatccaacgcagaattaaagtacaggctatagggaagctattccggaaggattcggtctccccataaatctgggcgcatcggttcggggggactgccccgaaaacaaaaaaatcgatttttttcagtgtccgtttggggtactcaaacaattatggggagcaaaaatcccacgcagaattaagtacaggctatagggaagctattcccgaaggattcgatctccccataaatctgggcgcatcggttcggggggactgccccgaaaacaaaaaa

SEQ ID NO: 26478 - DNA, 1335 bp, Heterodera glycines
tgataattttagcgctcataaagggatgtataaaggcgattgtagaaggaattggaagcgctaaaattgtttgagaaactttttgagcgtaatttcgatttttacttagaccattttttttagggttagatctcatgcgatttttggcactctgataaatttagcgctcataaagggaagtataaaagggattgtagaaggaattggaagcgttaaaattgtttgagaaactttttgagcgtaattacgatttttacttacaccattttttgctaggcttagatcacatgcgattttcggcactctgataattttagcgctcataatgggatgtataaaggcgattgtagaaggaattggaagcgctaaaattgtttgagaagctttttgagcgtaattacgattttacttacaccatttttttctaggcttagatcacatgcgattttcggcactctgataattttagcgctcataatgggatgtataaaggcgattgtagaaggaattggaagcgctaaaattgtttgaggagctttttgagcgtaattacgatttttacttacaccattttttgctaggcttagatcacatgcgattttcggcactctgataattttagcgctcataatgggatgtataaaggcgattgtagaaggaattggaagcgctaaaattgtttgagaagctttttgagcgtaattacgatttttacttacaccattttttgctaggcttagatcacatgcgattttcggcactctgataattttagcgctcataatgggatgtataaaggcgattgtagaaggaattggaagcgctaaaattgtttgagaagctttttgagcgtaattacgattttacttacaccattttttgctaggcttagatcacatgcgattttcggcactctgataattttagcgctcataatgggatgtataaaggcgattgtagaaggaattggaagcgctaaaattgtttgaaaagctttttgagcgtaattacgattttacttacaccatttttttctaggcttagatcacatgcgattttcggcactctgataattttagcgctcataatgggatgtataaaggcgattgtagaaggaattggacgcgctaaaattgtttgaggagctttttgagcgtaattacgatttttacttacaccattttttgctaggcttagatgacatgcgattttcggcactctgataattttagcgctcataatgggatgtataaaggcgattgtagaaggaatgggagcgctaaaattgtttgaaaagcttttgagcgtaatacgattttacttacaccatttttt

SEQ ID NO: 26479 - DNA, 1302 bp, Heterodera glycines
tggatttgtagcgacgtttggatggacattctgccatcgcttgaccatgcccaacttggcctcaaaatggcattgcttatcgcttcgatgttttggttgacacgcattttgatggaaaaagcgaattgacaatttggaaagcaatcgaaattcgcaaggacgaaggaccaaaagcgaaactatttgtgggaatcacggataaatttgtgggcttttctttgccggaccgtccgctgcccaacaaaatacgctttaatcacattcggattgagtaatttaacattttgtaacattcctgcctctatcgcattttgttattcctttttcaggtacattgatcactctgtgctcgcatttctccgttccaacaagcaaatttgggacagaattggcactaatttggaattgtttatatgggcaaacaaaacggaggatgatcacccaatttgggatgttttcgcccatgaaattttgccaatttttgcgacaaaccttcgccagttgggctttaccagtggcgatgctttggacaatttgtgtcgccgcacttcaccgacaaaaagcattttttaaaaaggtgtaaaaaactgaatattatttttttcttttttttttttaattttattaatttttttaatttttttttattagtttagagtacggaggtgggtgcggctgattatatggtttaattaagatcaccgttaatctcactgatcttgatcagttgaattcgatcgatttcgctcttatgtgctctgacatgattgacaatcaaattctgtccaaatggttgcacacgccgagcaaagatggacagccgaagcaattgtgttttcgtgcttatgttggtctaccaaacctcgaatggctcaacaatttccgagaggtggtcgcccaacttttctacattttcattaatgactaattgattgatttaattgccctaaatttacgctttatttttgtttatacattccgccgtgccaccacttctgtcagttacaatattcaactttattttcaagtggaaccaataccaattgaaccatttgaattggtgaatggacggaccaatgagaagctgacactgaaactgagcaaagaatacaatttggttaattggctgttgcaacggtgcccaattggggagacggcgacggcgccagttaagtggaaaaaacgtgaaaattcgggtgccaattctaactatatcagatttgatctacggtatgccaattattcgggtgctaatttgaacaatatccgatttgagttgtggggtggaaatagttgcattgg

SEQ ID NO: 26480 - DNA, 1143 bp, Heterodera glycines
gggggaagcgtggggggaagggtggggagccacgcatgttgtggtacacgcatcgattatggaagccgcgcatgcactagcaacgaagtcctttgcgcgaagcgctcatgtcagcgcccgcccatatataccaaaagtatactgtctacaccgagcaattactgtgcaaagcatactgtctacaccgagcaattactgtgcaaagcatactgtctacaccgagcaattagtgtgcaaagcatactgtctacaccgagcaactactgcgccacaacacgctagttactatatatgttatattgacaaggagtttcgttgctaaaaccattttctcccggccgaaggccgggagcgccctgaaaatagtggaagggtcttacaactttttgaggcgcatctgggaaaactatagaaaaaaattcagcgcggacgactgagtcccggggaccgatttctcactttttcttgcgtttgaaggcccctaactttttttctaaaacccgaatcaaaaaatgtctgctgtgagggggctaagttgaagtgttttctaaaaaacaaaaaaaattccaagcctctatctgcaataggaaaggctgtaggttcgtgaactttttcagtaccaactttgtccagttcagtcccggttgaataactcattagggtttgatctgggcggggagttaccagcagacttattgtagagttttgaaagcccgatttttccaaatttaaaaatttcgaaaattttcaaaaattttcgagttaggcctaaaaaacggttttcgggtttttgaattttaggattttttaacgatttttcccagagaaacgaagaccacttccaaaacatagtttttcgagctctatcgattggtgatatttttgaaaaaatttcgatttttttccggaaatagaaaaattttttggcctgagcgggacatttgagtcccgggcccataactcgtcaggagttgatcttatccaaaaattgccttagagcaaaattgtagagcattttaaatgctatcgaatggtgtactacatgatgtaaaattttcaaaaattttcgagctaggccccctagaaaatttcaaaaatttttttggggtcgaaaaagccggtggggaatttttttctggggta

SEQ ID NO: 26481 - DNA, 1462 bp, Heterodera glycines
atgccttccttcgcctttgggagggaggcctcgccgctctacttttgcgctttactcgccgtcatccgaattttgaactcagaatcaccggccactcaatgggtggcgcattggcagcattggccgcctctttcattgcccaccataaactcatcgccagtggagccgaattcaatcgacgaattcggctctacacattcggtgcggtgcactgcggagaccgtcggtgggcactcgaattgaaacgggcggtgcccgactcattccgagtaattaaccattgggacatcgtgccacaaattgcgagaagcgttcgcatcgattattaccattatggaacggaggtgaaggaaccaaagggaaagaaagggcaatcagtgcttttactttgtcaggtgtggtacaacaatttgatgttgaaagggcacccattccgacaatgccacgacggccaatccgccttctgttcggtggtcgttcaccctttgctttggaattggcttgatcatttgttttattttggcacttttgtgttcagttcttgtcaattgtgcatgatggcataacaaatgagcagacaaacacttttttttatttatttatttattaagcatttaaatttgaattttaaatgaattatatacaattaacatttgcattgtgtgtgttttattcgtatgctttccttcccctttcaatccaacgaaaatcaatgtttactttttctatgttctccaccaaatactcttttttaattttattgttgcaatttgtctcaattttttaaaatgttttttgagatacaaaatgtccaattcttttcgaattctttccttattctgtccgctgtttctgcttctctttgttcctgagacttcacgagctctctattttcacatcgctgagactgagaaaaaatgtttcattgaggaaattccggacgagacaatggtgatggggcggtacaaagtgcaactgtacgacccgaacacgaaggcatatggggactatccaacaatcggaatgcatgtcgaagctaaggacccggaagaaaaggtcggcaccattcgctgacaaagagtgacgaatggttttgctaattaagttgggctttcttaggttattttgagcaaattgtacacgagcgaaggcatgttcacgttcacatcccattcccccggcgaacatctcatttgtctctattcaaattcgtccgcttggttcagtggcgctcaattgcgcgttcatttggacatccaagtcggagaacatgcccaggactacgagcaggtgactgactcttctcttcagttttgatattttgggaaagcctggtcctatatttatggacgaaaatccaattttcaattgattttgtggaaattgcaatttttgactttttctttgggttcggagtcatataatatttttagggggatctgttggggctacaatgtaaagg

SEQ ID NO: 26482 - DNA, 1422 bp, Heterodera glycines
ttatataaattttatttggcatttctatcactttttttaaaaaaagatacaaaaataaaagtgattttgggattcgggaccaaaggggggtgaccaggatttttgagtgggaaaatttttctcacaaaaatcttccaaaaatatgtatttaggggttatttgggccgctgatcacgaatacgtgatcagattttacttttgacatcgtcaagacctcagaatccctgtgtgattggggattctgaggcatcattttttgggggggggcggcaggttcgaatccggacggtgaacattatttttctatgcatttttgggttatttttcagtgcgtttaatttatatttaaagatttgttatttttcaaaatatgctcctatgaaatgaaaaaaattttcccaaaaatttactttcttggcaaaaatttttaattttaaaaatttttttaggtaactattttgggttttttggtcttaaaaatcgcagtcctactcatttgcaactgcaaatagtgaataaaaattatttttgctcaatttttggctgaaaattatgtcactattcgtcactattttggacttttttcactattttgtcactattttggcactttttcgtcactattttagttactatttcgggatttttcgtcactaaatgtcccggccctaaaaattaatttcatattaatttaaatatccaattcttgtacatttcaaaattctctttgtaattaataaaaggaataattaattttattttttaaagtttataataaattgcattcaatttttgtacctcttctaatcagttttgtacctcttttatcactgttgtacctcttctaatcagatttgtacctcttttatcactgttgcacctcttctatcactgttgtacctcttctaatcagttttgtacctcttttatcactgttgtacctcttctaatcagatttgtacctcttttatcactgttgcacctcttctatcactgttgtacctcttctaatcacttttgtacctcttttaatcaccgttgtacctcttttaatcacttttgtacttcttctaatcacatttgtacctttttaatcaccgttgtacctcttctaatgacttttgtacctcttctaatcacatttgtacctcttttatcactgttgcacctcttctatcactgttgtacctcttctaatcacttttgtacctcttttaatcactgttgcacctcttctaacatttgttgtacctcttctaatcacttttgtacctcttttaatcaccgttgtacctcttttaatcacttttgtacttcttctaatcacatttgtacctttttaatcaccgttgtacctcttctaatgacttttgtacctcttctaatcacatttgtacctcttttatcactgttgcacctctt

SEQ ID NO: 26483 - DNA, 2587 bp, Heterodera glycines
  unsure (1)..(2587): unsure at all n locations
tgatgataaaataaaaagaaaagaaaaattattaactattctgtattaaaaggaatgaaattaaaaatttcttaaattttcattaaatctaacattattttttaaaaaatgaaaaaataattaagttattaaaaggcattttataaaattcgtaatgataaatgataactgagcaaagcaataatttattaaagtaaataatacaacgttttataataaatttacaaaatttaaaccgtcaaaataaatcgacaataaccagaacgcaaaccgagaaattatttaataatgattatattaaattaaataaagtaatgcaaaaattttcgcgtaaataaaaaactaataaaatttaaacaataacgaaataaaattatttttaaaattttatttagttagttttgcttttccaatataaattaatagtttatgaaaaagtttactaattttacacaacaaataataaactttaaaattattttctttaaaatattttagtttactgatattctgtttttatttataatcgaattataacaaaggacaaacaaagaaattgctataaagtcaaattaatgatgcaattcacaagaatataaaaaataatttttaaatgaataaacaaaaataattaaaccaatcatcagtaaggtccgtcctgtagccgagattagtgaatattaaaaatggttataacttactttctgtatgaattaataataatttgaacgcctcaaatgtgcagtacaactccaagaaaaaataaaactattttgtaatctatgacatttctaatataatacaataaaatcaatttgaattgaaatatgaatgttcttaatctaaaatcttaatgtaagaatcaaaagccaacaattaagaaaacatgaaaagaaaaatataatgataacccaatattaaaatttgaattattccaagtaagaattattacgaacaaagagattcaaataatatataaaaatgataaatcattttgtttttacttatgaactaatttctttttaaattatgattggaaacctggtaaagtataacgaactngaatctagaaaataataattaattaatttttggagaaatctcatagtaattgttgcattaagatatctaaaaatataagtatatattttatgaaaagggcccggatacaaaaaataataataaaatatccttttttaggaaatgaaattatataatcttaaataagtaatttgaataaaaacaaataataaataacaatcaataagaataaataaatcagaaatatttaataaaaacctttaaattttgtgttgttaagtaattatttactaaaaacctcaaaaagttcaaaatatttgccaaaaattgaaaaaaaaactgataaaaaaatacatgaatttctcattaaaatctcaaaaaatatattagaaaaatttaatcatgtaaatctgaaaaaaataattacattagatcataaaattcaaaagaatcgcgaaatttgacaggaaaatagttttgtaaaaatgaaataagaaaaaatattttaaataaaaaaatttttcttttaaaattgtgggtacaaaagaaggaaaattaaattttaaattatcctaaataaataaacgaggattgaaataataaatatggttattttatttgtattttcctaaaagcagaaataaacaaaacggaaaaatattgtaaaacaccaaaattcaagaacaatatttttccctgtggtgccgacggcaccgccggacctcaagaaatccttattctcttaaaaattgaccaaagtcgcaaattttaacatttttggaccaaaagccgtaataaaatgcactcaaattttccaattttttacaggcgttgcctatcggcatcgctggagaaatagatatcttattattattaatatttgtctgtttgcacaatgaaaacagaaagaagcatcctagaattaaaaaatatgtcaataatagaaaataaaatatatgcatattatcaattaattataaaaatagaggtaaatagaaaatttacattgaataagtaaacctttttaattaaattaaaaaataaaatttatcataagttttgttgttatatttaaaattaaataattaagataaaaataaatataatgattatatttcgttttataacataataaataaattacaaactataaaccacaccaaaaatttaaaatgtttttaaaattaaaatatttattcgggttttgattacatatcaaattattaccgtattggatgagctgaacaattaatgaccaagcaaagaaagacggtcaatagagaaaaggagaacactggataattaattaattattagaatttaatattaatactatttaatttatttactattaaaaatgattttatttattttatgaataaatatttagttcccaaatgatcaaatgaaatgaatgaaagtggtaggatggaattggttggtgcagtgaattccgtcgttggaccaatcactgaattttctgtgtcgacgtgtaaaaaaaagtgggggaaaagcaaccagcaaaggcgaaaaagctgacaaacga

SEQ ID NO: 26484 - DNA, 1329 bp, Heterodera glycines
  unsure (1)..(1329): unsure at all n locations
aaattcagaatatgtggacaaagtgttgtccaagcagcatcagatgtacgcggatgcgagcgaccacatgctgtgtaagttcagcgggacactcggcggatgcggcgactattgcaaaacgggatattgagaagggacggacggaagggaaggaacactttctcattagcatttagtcgtcctttgttttagttaaaatggtgcgctttttctctctgatttattgcataaataaaaaattttaaaaatgccaattttattttaatttttctgtatgacggagaaatttttgcgggtatatttttgaataaagttcaagaattatggaaaagtgtccaaagaattacggaattgaggaaaatgcagaaaattaatggacaaatgatcaaaattaaaattatttggtcataattaggaaatgaatcgcaactttttgagccatcgcaatgtgctcgtgcgtttcttaaattcgccaaagccaagaaaattaaaaattaacacatgtatcaaattgtcaaaaggaaataattgttttattctttttgattcgatagcccaatggttactgtattattttgaaatccaaaaatatttaaaaacttctgatcgacttaatttgatcttttggtgcaaccaaacttatcatttttgatccttgaaaggacgtcaaggcccattgacaaaccaacgttggaagcatccatgcctcgaaaaaatttaatgtttttttgttcaacttaactgaatattccgcttacattcaagtcacgggtctcgtgtttttttgggcctcggtctcgagtctcgggaaattttcggtctcgagcattactactactagggttgtctagaacagggttcctccgcctgaatcccgggtcggccgagcctttttttactccggaatcccggatccagatccattgaatttggctgtcccaagcaaaatcccggctttttttctcattccgaatcccgaatctaatcagctgttccccttacatcctttgatatgttcgacgccttctccggtcgaagtcgacacactgttgcaacacaattccacgagattcgaacagtgccatttcagaacactgacctgaaccgcaaattttgatttatgccataattaatgaaaaaaataaaataaattgttttgagtttgttatgacgctttaggaagcaacttttgcagccttaattattttaattgaatttcataaatatttaaaaatttctattttaatgcatttanttttaaattattattcgtttttttattttcctgcatatttttgacgtaatgtttcgaatattttttgaaaccca

SEQ ID NO: 26485 - DNA, 2311 bp, Heterodera glycines
  unsure (1)..(2311): unsure at all n locations
ccctattctttaccctgaacgatccagggacagcaacattactgacatttattataaaatagcctcctttgaccattcctacttgaataaaattaatcaatctgaattattctcaatgattgatgaaattgttgaaaattttcaactttgtaatgtagaagaaacgaggtcattatcgagatgggtatactgtatgctactagttttgctatggatagcaattgttatgacaggaatttttctctattttaattccttgattcgaaatttatgtaagcttatgcatatatgtagagacggaaatggacacaacgacaataaatcggattctagcgggaaacacaaagaccagagaacactacttgggatgcttcccttgcgacaaactcccaaacataatcatcaggtacccttcaacactggtggcgaataatgacccatcgaataaggaaggaacgcattggatagcaatgttcatcgttgataacaagaccgtctactattttgatagttttggtaggaaaccgaacagatgtatcagccagtttttacggaattatgaaaaagtgatttcgaataagccagctattcagtcagtgtttagtgagaattgcggctactattgcatttattttgttcattttatgtgctcatttggggaaagaaattatgagagtaattttgaaaaaatgacaaaaaagttgataggagaagataatccagatttgtttgtcgtgaattttgttaagaaactgataaaaagtatttaaggaatttttcattaactcatttataaaaatggaccgattagacacaataattgcatctctccttaactgctctgcacgtaatttatgtgatcgtcttaatcacccggatgagattcaaaaagttgaaaaatacctcaaaggaaaaactctacaaacaacatacaaaaatcaactaggtgagtgcaaagattttgagtacggtggaattaccaaagaatgtgcccgtaagcagatggcttacaatggtttcaagaatgtgaccgtcgaccagcatttttatgtacggcaccgcatttgtcttcgctattcaagcaatccttgcgtaatcgaaaaacacaagaatggcaatgaacgtttctacccacttgaacttgtgaaagtgaaggacaatgatataatttatttagggcaaaattttcctaaacctttaattcgtgatgataatatgtttattgatgatcaacaatatttgaattggtaacttaatgtttaaaattacataataatgaataaaatttgttaaatacagaatctatttctgtctttgatttacttccggttatattcaattttccactcgagaaaacaatgatggagactttggggcttttattccgatagacaagaccggggaatagttcaggagtgaaggaacaatatttggcgcgtagaaagtcggacagaggtcctaagcgtatatgaaaaccaacgtctgctgtcacaatcaaattcttcaccgcaaattcgtggattcgtgcctcgtagtacccacattgccttattcgttcggtgacttgctccgcagcttgcctacattctttctcattagctgctcctgtacatacgaattttccagttgagaaaattatggcggtagcatttggattatacactttcataattacagcatgaattttacgtggattatattttgtggatggagatattaaataaattttttcaatatcaaggggtattttgaggtctacaacagcaacgcaatttttgattattggaaaaaacattttaaatgaataatgggagaaaatttttaggtatttatactaaaataaattgaatttagttatattttattcctaaattaattttaaacttttaattaatttttatttaatttactttaatttatttttatttttatgattttaattaactggcatatttagataatatgaaacatcgttaaaaatgacccgcccctctcctaaaagtcatttagccgctcagcactgcacaaaaaggcacttcaaccatcaccgcttagcccattttcggctttgttttgcacatttggatgaaaaccctcatcattttcattatttttatttattttatattgtttattctttattttctatttctattaatattttattttcactttttagattttttanatattttttanaattttcacctcctcagcggatntaattttacttcctccgttttactcctacttgnngtttantatttttattttacncctttagatgttttttctatttttacctcctctg

SEQ ID NO: 26486 - DNA, 1794 bp, Heterodera glycines
cctcccccctcaaatgatgcctcagaatccccaatcacacggggattctgagggcttaacgatgtcataattgaaatctgatcacgtattcgtgatcagcggcccaaataacccctaaagacatgtttttggaagatttttggtgaaaaaattttccaactcaaaaatcctatgctcacccctttggtcccgaatctcaaaatcacttttatttttataaaaattcttaaaaaagtgataaaaatgccaaataaaatttatataatagagcaaaaaactgcggatttttgtagtattttatttttccagaataacttttcagaaccgagttatgaatttttttctgaaaattcgaatttttccagaaattctggaataacttttttccttttttagatagaaattccaaataaagtccataaaattctcctgatttttctctatttttaaggctttattcctgtaaaattgatcaacccttcgatttgttatgaattttcaaatattaggccaaaatcccaagggccaaaaaattgccaaaaaataaagaatttttaaaatattccaaaaattctgaaacgtaaaacaaacatcatattcgtgctcagcacctcaaaataccccagaaaaaaaattttcacccccattttggcccacaaaaaaaattttgaaaatttctagggggcctagctcgaaaatttttgaaaattttacatcatgtagtacaccgttcgatagagcttaaaaaactttacaattttgccctaaggcgttttttcgataaaaccaacccctaacgagttatgggcccgggactcaaatgtcccgctcaggccaaaaattttttctatttccgggaaaaaatcgaaatttttccgaaaaaaataccagtcgatagagctcgaaaaactatgttttggaagtggtctccgtttctctgggaaaaatcgttaaaaaatcctaaaattcaaaaacccgaaaaccgttttttaggcctaactcgaaaaattttgaaaattttcgaaatttttaaatttcaaaaaatctagctttcaaagctctacaataagttcgctggcgaccccccgctcagatcaaaccctggcgcggtattcacctggtactgaagtgtactttttgagcacgcttcagttgccattttttgcaggccagggggtgtgctcaaaaaaaattttaaaaaataccagcatttagaggacaccttgatggagtgccctcacagcgggcactttttgattcgagttttacaaaaaaagttaggggccgtcaaacgctctcaaaaatgagaaatcagtccctggtactcagttggcccttggacctgaaaacctatatttttcccggatgctcctcaaaaagttgtaagacccttccactactttcagggcgctcccggccttcggccgggagaaaatggttttagcaacgaaactccttgtcaatataacatatatagtaactagggtgcccagttggctatggtgtgcatgcgtggcttggtaatatatggccctcatttgttattttaaaacatacaaaacattatcaattgagttctgttgctgtggggaaagcgcttcgcgctcagggacgcggcttcgccgcgtcactagaaattgatgtaatttagcaattcatcgcagcctcaagacgggcgcttcgcgcccgtttttaattttttgggggatattcggccgcttcgcggcctcaggacgggtgcttcacccccgtaatgtaattttttgcgttacattgcgtcgcttcgcggactca

SEQ ID NO: 26487 - DNA, 1176 bp, Heterodera glycines
tttttaaaatgggaatgcatttttaataaaaatggatcgtttatcctcgtcgttctgatcagccgtacatttgcgcgatcagcagggtcgtcctcctcgtcccccagactttcacccttgcggaagccggcgccgcgtcggttggcgccagcgggcgccgccgcgcgcggccaaccggcgccgccgcgtcgccttcatcaccgcgtgcacgagcgccgagacgagcacgaaggcagcagcacccgccagcaacagttccagcggcacgcgcttgtccccgcccgcggcgtttgtctttaaaaaaatgtcggtcttgaaaagaacggtaataccgtaaccaatgcattaatagtgagtacggtattccaaaaatctaaaatattcaaattttgtgcccgtgaatacatcaagcaatgctatgaagagtcccagctgttcatttgagactgtggcacttttcaggacactttcccagagacataggctcggattgactcgcaaatttgggggaataaagcctgccattcttcggcagaaaatcaaaaagcgtatataatttgggcgctatttttccaattttttcttttggcattttgactcacttttggcacggcactttttgtctgttgctgttgttgttgcttctgtgcctgttgctgcttgtgctgctgattatcttctcagtccataatgctccgcgggggggggccgaaggcccccctcgaggccgcgaagcggccgagtgagtaccatgggcgcaggaaaattattaaggaggagggttcattatttattgatttttgcaaaattaattttttattattttttgtgaaacttatcagaagcgccccaaactatgcagggatactgaaaggaaaagaattaacctgttttatcacattatcgaggccgcgaagcggccgagtgagtaccatgggcgcaggaaaattattaaggaggagggttcattatttattgatttttgcaaaattaattttttattattttttgtgaaacttatcagaagcgccccaaactttgcagggatactgaaaggaaaagaattaacctgttttatcacattagcttgtcatcagtttttataaaaaattttcaaaattctgagtcttctattattttattttttttttcaaaattttgaaggcgggggggggg

SEQ ID NO: 26488 - DNA, 1647 bp, Heterodera glycines
attcaataatttttcttgaaataaaaaaattcagaaatttttttttgtaaaaattcataaacttggtaatttaaaaaagttttgtgggggggggggggaggggaaaaggtgtgagggggatgaaatttcccccccgccagtcccctctttccccaaaaatttaaaaaatgcactagttgtcaaaaatgcaaaaaaattaataaaaattatttttgaaattttggcctagtctcaccatcactgaaaatgtgagaaaaaagacgagaaacgacctctttgaaactgttgatccattcaaagtttcttctgcctgatgcatacaaacaatggtttaagctacgcaatctcttcggttggccgtcttttctcggagagtgcagccatttggacaacgcttggccagcagaagaagttgcagttggtggcccatcatcatcagcaagttggtcgggaaacatcacatatgattggattgaattcagccgggcgaggtcagagaaaattgttggcgaaatgagacgaagaaagttgtccaagtgatcagcaccgggggaaatgttcaagtggcgaatgtttggcccaaaaatgggccaaatttgacgcacaaaaacatcccaaatgggcgtgacatcagtttttgatgaaaatatgtccaccgctaaatgggtggatttatcaaaaatgtgcggattggcacgaagaaattcgatgacggagtgatcgatgaaactgaaatggatgttttctatgggattaattagagtgtttcgggttcaaattactcaatctgtagctccctaaaacggattttcttgggcaacggacgatccggcaacggaaatggcaccaattcgtcacatacacatacacaaagtatggcattttcagcctcagtgtttttccgaatttcgattggtctccaaagcgtcaattcgcttttgccattgaaatgtttgtccaccagcgcatcgaaacgtggcgaaatcagtgtcaatttgaggccgagttgaggacgaccaaagaatgggaaaatgtccatccaaaggtcgttgcacacccaactgaaattggggaacagaaaaacattgggtgccgtggacaatccgtacaaagacttaggcttaggcataagcttaggccttatttattattattgtatgagttgccattaactcactcagacattggcacgttagtgccattaaaatgccaaatttggctcattttttcaccaaaattcgatgattcaattttttctctgtccgcaaaatgagtttgctttaacacaaaaattttgtgtgcattaaaattcctaatttattaagaatttaaaaaacaattaagtttttcaatgaaaaaatcttagtaggccaaaggaaccaaaaaaaaaaattgttttgttttttgccattcatttttctatttgaacgaaattttttcaattttgcagacctttttcgaatagtataaagtttttgaatgggcaggaaatgatttttgagtgcaaatccaaaaggataccaattaaaattcatattaattaattaattaccatttgactcacattttcctcaacttcggttctccaaatggtgtcataaataaagccaaccaattgttgctgattttcaccaattgtggcagaag

SEQ ID NO: 26489 - DNA, 1763 bp, Heterodera glycines
  unsure (1)..(1763): unsure at all n locations
ttttcgtcaatattttncgatttgatatctcttaggatanaatttgaaaatgcctaaaataaatccaaatctgaatgggtgcgcgagtgggtcaacagtgagtttcactgccgaaaaccttgagaaatttttgatttacaattgtaaaaacaacctatataatttatgaggaataaaattttttaaattaatttgcacccctaattttcaagtttttttgtgcatatttgatgcatatttggcaattttatttgcatatttatgtgcatattttggtcacttttcgtgcatattttttgcagccctggtgatttgatttgttttcatttaggccattttttggcattttgtgactatttcaccctttagtaagaatttttttttccaaaaaataatcattttaaaaaagcagattttttgaaaaaaaggaatccagttttaagagcaaaataaagtgcaaaaaaatctttgaaatttttcgcgtttcagccccaaaaaacgagttgaggtaataaaaatgagttgggacaaaaagaaaattgtgtgtcgtccgaaaaataatttttttaaaaactcgaaattcacgggctcggtcgttttgacgccagcccgagtttttggattgtaatttttttgaccaaatcctgataatcttggttcattcgaaagcttaatgtgaagaagctgtttctaggctattgcttggcgattaggcaattaataaaaaaggttataaatttaccagcgcttcttatccagtcaattttatcattagcattgcacattggctttcggcttatgacataagcagctaaatgggccttttaatctgatcaatgcttggaccggggagcgattggtatgaaacaattgatgatcaaaatattttgttaatccgttgtccaatttcacgcgatgaacacaaatggccctatggggggaggaggcgattgagttcgcattttattgacaaattgaacagaatttgcttttaaattgaaaattcaaatattattcattacatttgttatctttaaaagagccatattaattgaaaatttttgacaaatttagtttcataaaataaaaagctcaaacaaaggtcaaagcatattttttctcaaatatatggatttttgtgaagccaatcaccaattttaagaataaatatcgccttaaaaatttatcctttacatatttgggcaatttaggctaaagaaaaatgtgaattttataataccgtaagaataaattgggccactagcgcaggatacggtattgggcaaacagagcagagaaaacatagctgcagaaaatagtagcaaaaagtgagttggtgagtgagacaagcagagaaaaaatattttacaaaacagagaaacgaatcatacaaagtggggcagagaactagaatatcaaaaaagaatgtggtgaaaagagaaaaaaagatatataaaagatttgtaaatattatatgtaaaatagtaaaaaaaatccatatctggtataatttccaaaacaatttttctctgatgaggtaagaaaacagtcgtacatggccgaatcgtacagtgccgatcgaaatgctgtcacgctaattaggataattagtaatatatttccgagtctataagttgagggtcttagtatgaatacaagtgtaggtttgcggtaatacgaattggccttgtacaaatcgtccgttccaagtccttcttcccactgatcattgatctagaacagatcagattcattgatcagct

SEQ ID NO: 26490 - DNA, 995 bp, Heterodera glycines
cgaaatgcgaagggaaaagcactgacagcaaaagccatgaagaaattgggaaaacataagggagagagtgatatcacttatcaaacggaaaaggacgaggccaaaaaagaacaaaaattaaaggaaagggagggaagggaagaaagcaaaagattattttcatgttcaaaagaaagaaaggcaattcggcacccatcggcggacggtgccataaatcggccatcaaagcctccttttttgggtgacaaaagtgcggacttttgttcccatttggcttggtttttgcacaaaaaatttttcgagtcgttttcaaacttctaaaaatgttctaaaacaaaaaagaatatgatgaagttatttgaaaccaaattaagaaaaaatatttaattgaaacgccccttttatccgaccgaaaacgacagaaaataactgatttgcagtgcatttttccgctaatttagaaaattttaggttctgccttcaccccctcaaaaaatgttataattccgacaaaggaaaacactttttgggtaatttaggcgcttttaagaattgatgtcaatagcataaaacccaaggcgctacgtcgctaatcacgaatctgacatgtattttgactaatttctaatccctaacccgaactcgaataaaaatcgaaattttgaatttttcaaattatgattttttgttcaaatttagattaggaaatcggaattgaaagtttcatgatcggggaccccaaaaaccccagagaataaatttttatgactatcacaaaaaaattttgcaaaacaaaagagtttggatcattcttttttttattcatcacttaaaaaccaaataaattccgttggctggcgttttcttcacttttacaaatcatttgtccaccgagtgacgtcattgccattgccattgccaattaccttcgctttgagtttccgtcggtgcctcccccattctctctcccgtcgttcctcccactctcttccatc

SEQ ID NO: 26491 - DNA, 1827 bp, Heterodera glycines
  unsure (1)..(1827): unsure at all n locations
tgtttatttcaatataataaatgacagatttgagttcattaattatttaagttataaaagatattttgtattgtaattgaaatcgacaaatattactatagtaacaatatttttnaaagaattcgaatttgttgtggtgatgacttgtttttattggcattagtgattgcttattgttctaatcattcatggctccatattatttattggagtttaatttaattgtgaaaaatgaaaacatattaaattaatattgacttttataacaattgaaattgttgtattttgccttccattttggttaatattatgtgtttcttcgtgaagaatttattttatattattttcaaaatgagatattttaataaatttgtgctatttgttgattttattcaagtttattctttcttgttgatatatttctgataactagcgggtgtgtgcatgcgagggtggcgcttgggaaagcgctgcgcgcttcttgagcttcgctacctaggcgcgttttagtctgttagggtctttgcgtcagccgacatgcacttggtttcctccaataatttgagttgacacatcgcataatgcaatggaaaccggaagtgccctaacgttgcacgtcatggccctcctccctcccttagtccaggcgttggcacgttattgggctgagcgctaaatggcaattcacctgtaggccctaaagagggctgaccggtccatgtcccggatccaagcttctcaccattttcgcacccaacatagtgcagatgggaatgggattggaatctctccaaaaaccatgtgcccaactgctctggactattgctcatttactgtaatttgagcatatgcgtggccacaataatcagcactttggctcggcctagggcatcaatttcccggttgggagcatgaacacggacattgtttccgtccgttgcccgagagaaggccgtatacaattgaccgtgggaaaatacttccttttccagatcaatgccgacagtgcggattgtttggccctgacctttttgaatggtcatagcgaatgcaggctttattgggaactgcaaacgctcatattttatgccgccaggcgatttgtcttcatagacatttcgtgttctttcaagaaagaatctcacttggccgccaatagcattgctattgataacacgaccaatgaggcgatcatcgccaagttcttccagaactatgcgtgtgccattgatcagtccttccttatcacttttattgataagaaggacgacgacgcatccgactttaagccggagactgtgcgggggcatgcccgagtctgtgcgccggttcaacgcagccacttcggactcgatctcatcgatgtccagtgggcggtcgtcaaggggcttatccgtggacaagtattcccgcacttgacctggcacattcgccatcatgatctcgtttacttcatcacacgtgtcaatgtgcggagcgagaatcaaacgattgagcagctctttgtcattgccaaggagttgttggaagttaggatagacataatctatcagctcttccttgctcttaacgaggaactgcggaggaatccagaagtgctctccggtttctccgagcccgatttggcggcacatttgcaagtacgcttgctgaccttggcccagtctctggttgatggtcaatttcatcgtggtgaattgaccaaacaacggagacgtttgaaaacaggctgtcacctgagcggttaagccttcatgaggcacgaccggcagcgactgtttgaagtcaccgctgaaaatgaccgtttttcctccgnaagaggagatc

SEQ ID NO: 26492 - DNA, 1496 bp, Heterodera glycines
ccccccccccctccaattcaaacaaaaggggggacacccccgggggggtaggaattggggggactgagcagctggtcgcatttggggataaagacgaatgaatgggggggggggggggaattgtgacagcttttgcccgtccgtctcattattgtcaccaccaccccgtccgacttcatcatcatttgcgccgtccttttgctgttcgttcggacatcacacatttgtgcccattacccccccccccccgcctttcgccctcaaaacccattcaattgaaaatgacaacaaacaaacaaacagaaacggggggggggcatttgcgctttttcttttgctgctttttcgcctttggtccgacagatggccacggcaatgacaaaacgtttttattttgcgtcgttttttcaaatgatcggatcaatgaatatctttggatttgatcacttttccttcttggcaaattcccttcctattattaattcgttcgttcgttcatttttggtggtgaaacttcattcattaggccacaattaataattttaaatagggtaaaatttaaaaggaaaactaaaaaattaaattaaatgcttaattagcaacggttcattgtttgtgtttcgtttctcaattgtccaattagaagcaattagcattttcatggacagctgttcttcccctgctgctgctgatttatttacctccaaacaacaaaaaataaaatatgtcgcgataattgtcccattataattgtgcaaaatacggccaattttggcaaggaatttcgacggacgaagccgagagtcgccctaaggccccttcccttcccggggctttaattgttcatttgggcaccgttcagcgcattacgcaacggtgccggagggggggggggaaattaagtggcataacgcaatttgctggtgatggacgggaagcaatgaatgaacgaaaaatgaaaaaatttggcacgaaaataatatttcaaattattcgaagaaatgtaatattaagaaatttggaacaaacaattagaaattatcaaaaatgacatatttttgttttcagaatgtctccgtccatttgtccgtgctcagtgccaacaacaaacttttgcttttctcccgcttttcctcccaaatgccatcgccggcggagggcgaaaatgcgcaaacatttcaatacgtaagaaaaaagcaaacaaacgaaaggcgggcaaaaagaaaacatttgcaggtcaactacggcaatgtgctcatttttcagctgagggcgaaatgcgccgacggatcggtgggccaaaaatgcacggaaatttgtgcaccaccgaaggcggggtcagccaaaagaaaataaattgggggaaatggcaaaaaaagaatggcaaaatggggggggggggaggggaatggcattaaataaatgaagatgggggaaaggcaaaatgggggaggggaaatgaatttgacacaattttgctgttaagaggccattac

SEQ ID NO: 26493 - DNA, 1526 bp, Heterodera glycines
cggccgaatgtcccgtcaaaaaattaatattcgggcgcgactcgcccgtctgaggccgagaagcagccgaatgcttcccgcaaaattaaatacgggcgcaaagcgcccgtcctgaggctgcgatcaattgctaaattacatcactttctagcgacgcggcgaagccgcgtccctgagcgcgaagcgctttcccctcaaatgagggccatatattaccaagccacgcatgcacaccatagccaactggtcaccctagtttatatactactaaagaaacagatgaactcattgctaaaacaaaaatctcgggaaccgctggcgggagggactcgggatttcgaccttgggggcaacttttgacggcgcatccaggaaaactataggcattccggtccgagggccaactgagcgccagcggcgctgaaacggcttttttaaatttttttttgctgtttttgggattcaaaaattttttaaagtcctaaatgaaaaatcggcctcgataggaaatcaagttgggaggtttggcacaactttttgctcttcaccgacctcgtagggcctaccagtttttccgaaaaactgcgcaaaaattgcatacttttttggccatttcagcgccggcggaataactcgtcggggtttggagggaggaggtcggtgtaagcggcttttttgtacagctcgacgagctctatccaaccatgtttttggatttctgaaattttcagaaattttcgagctaggccccctcgaaaattttccgtttttgaattttatgattttttacagatttttccggggaaaacggagaccactttcaagcaaccgtttttcatgctctatcgattggtgtcattttcagaaaaatttttaaaaatttttttggaaatagaaaatttttggttggtaggcctcaatttcagttctggcgcaataacttgtcaggagttgattttagcaaaaagtcatgcaagagcatttttgtagagaattaaaagcccaatctaatgtgctttatctcatgtttttaccatgagtttaaaaaaagttataaaattaattgtgattttgaaactcaaaaccataggggggaccccatggttttgcatttcatgaaaaatttttttgctcctaaattagccaaaatgcatttttatggcataatttgaggtgctgaatacgtatatacactttattttgcgtttcagactttttggaaggtgtttaaaattttttgaaaaatcgtcaaaatttgagccccggaaaatccagtgaaatttcgaaaattcataactgtcttcgtttttggtcaaatttagtggaataaagtttgaaaaatagcaaaaaattaggagaattttatgagatttatttggaatttctatctgcaaaaataaaaaagttattccagaatttctggaaaaattcgatttttcagaaaaaaattcctaactcccttctgaaaaagtattttataaaaataatatactcaaaaaatccgcaattttttgctctattcataa

SEQ ID NO: 26494 - DNA, 1486 bp, Heterodera glycines
ttcttcacttttggttcgggattcaaggaaggtgtcaaggcttctcagagagtttatttattccaaattaaaaaaagaaacaatcaattttctttggagaagacaaaacataaaactaatgcaactaaattcgaatacaagaaaaggtgggaaaaacggtcacaaataattaaacataatgccaaacaaatataaaaaataaaataaaggtcaaaaagtccaacacccccaaacaatcaaaaaaggcgtccctgcctttagccttgagttccttgaaaaccaaaaggggtggtcctctgagcagatcaacgacgatgggggcggccatcatttcggcgatcggagtcacggactcgcgcaggtccgtgcaaatgtccttggtacggctgatagcgcaccgatccacggcgtccatggagaattcggaacgacggattttggtctcgacgaggaccgacccggtctctcggaacagctgtggtcgtgtccgaacgaggatcggcctgatctctcgaagggactcctaccgctgacttgagcgtgcgcacactcagctcaatgtctccggggaatgacgattgggaaaaaatccaagctttaaggattttgcaccccggattgcgcattttaccgtcatccgtgaccaaatatttgttgaaatgatccccaaaacggaaaatttccaaaacagagcggcctttttctgtgatgcaaattgaaataatgggtccattatttattaaggccctcattttgtcgatcaattgatcatattcagcggatttgttgtggacatacgggggcgggcaccaataaattttgacatgactgaagcgacggcacagctccaccaccatttcgaattgttcggcaatggattcggcagtttctccggcgacaagcgagtcacggcctgtgattataagcatcgcttttactcgacttgacaaaatggtcggctgaaattgtcgaatgatgtctgccattgacccctcctgtccaatgcaaaatgaattggggatatattgtgaaagggcggcagctgatgaatctccgagcaaaacgcgctggtgtgccaaaaagcggcccgctttgtgcacaaccgtcgcccgcacacattcgagggcccaagcgctttggccaaacacttctttccacttcagcttttcggattcaggaagggaattgactccttctggctcctccatttccagcgggttgaatccggtggctgccaaagcctgtctggccacataacatgacccagcccacttctccagggcttttcgctggtcttcctccgttgggtatttgcccgaactgatctgatcacccctctttccaaaatacatgcaaagctccaattttggctgagcctttacaatcacttcaaccaacgtctgtgctgccgtcagcgaagaagcaacgcccgagcgaaggaggaagatgccgaggagcgcttgcagaggagtcttggccaccatcg

SEQ ID NO: 26495 - DNA, 1143 bp, Heterodera glycines
aaaaatgtggtttgaaaagtttattgaggaaaaaatagactttctaaaataattcccctgggagaagggagtgggaaacatgatttcaaaattttcaattttttctagtctaatctactcaaaccggttcagaattctataaaaataacattcacggtgcgaaaaatggggtttgaaaagtttattggggaaaaaaagactttacaaaataatacccctgggagaagggagtgggaaacatgatttcaaaatttttgttgaaatatttgtcgtgctctgaagggcgtgggagggggggggcgaaggcccaccacgaggccgcgaagaggccgagtgagtaccttcggtgcaggaaaattattaaattttaaaaattttttaattgctttttaaatatgccaaaaaatgtaggcttaacttttttagtgaaaattcgatcactcatattttttgctaattgagcagaagcgtaccaaactttgcagggatactccccggtaaaggactaacttacactgaaatgagcgtcgagctagctggctcaaaaaaattttcgaaaatctgagtctttcgtttttattatttttttccataattaattcataaatatcttcttcagaaaaggtaccgagacgtgccaatatttgatttacatgttaggagaatgaggctatagctggttcgatcaaatggctattatttcactgatttcattgctcgtagtcctgcttagagatggaatttttgctctagatatatatctgacaaatgctgatctaagatcccttctcctatgaaagcatacagtgaggacagctctaaatattattaaatcattgccacaaacatcctattcacaatcctcccgatctcacattgaatcttatgacattaaatatggtcaagaaaataataatccatccccttcagaggaaatgaactctcctcaaatagaccgccaaagtgaagctatttgagaatcaatatttatgcttcgactcttatgctgaattaaaagaatttggatctattcctgcaaatgtataccttacgattttcctaattaagattagtggagttgaatttagagctgtagatgatagtgcttcagaaaccccacttgaatcatatagaattctttat

SEQ ID NO: 26496 - DNA, 1045 bp, Heterodera glycines
  unsure (1)..(1045): unsure at all n locations
cggaacggattagcatcggggttacgagatagaaaattgtcctaaaaagagatagccatttttctgagaattaattcacaatttccgcaactcttgcggtaatggaaaaaattttgaagaggctctgcggaacggattagcatcggggttacgagatagaaaattgtcctaaaaagagatagccatttttctgagaattaattcacaatttccgcaactcttgcggtaatggaaaaaattttgaagaggctctgcggaacggattagcatcggggttacgagatagaaaattgtcctaaaaagagatagccatttttctgagaattaattcacaatttccgcaactcttgcggtaatggaaaaaattttgaagaggctctgcggaacggattagcatcggggttacgagatagaaaattgtcctaaaaagagatagccatttttctgagaattaattcacaatttccgcagctcttgcggtaatggaaaaaattttgaagaggctctgcggaacggattagcatcggggttacgagatagaaaattgtcctaaaaagagatagccatttttctgagaattaattcacaatttccgcaactcttgcggtaatggaaaaaattttgaagaggctctgcggaacggattagcatcggggttacgagatagaaaattgtcctaaaaagagatagccatttttctgagaattaattcacaatttccgcagctcttgcggtaattgaaaaattttgaagagtctctgcggaacggatagcatcggggttacgagatagaaaattgtcctaaaaagagatagtcatttttctgagaataattcacaatttccgcagctcttagggtaatggaaaaaattttgaagaggctctgcggaacggatagcatcggggttacgagatagaaaatgtcctaaaagagatagccatttttctgagaataatttcacatttccgcagctcttanggtaatggaaaaaattttgaaagagctctgcgggacggattagcatcggggttacgagatagaaaa

SEQ ID NO: 26497 - DNA, 965 bp, Heterodera glycines
cttggatagaatattcctcacatttctttaccattattttaattaaaattttaatttaaaaaaatattccaacttttttctttcatgttaagcatcctaaaaacccaaaacttaatcaattggtcattttttttacaaattctgttaacaaatcgcattaaaaattacaaattttttcccggcggcgcctatcggcaccgccggccctccttgtcccccaaaagtcttggaaaaaacgtgccgcgtaaaaagcggtgttgaaagcaaaaaaaaggtcattgatttacattaatttacatggccggagaccccttcgcaaaattggaaaattggctgctgaccccttgttttgcaataatctgaattttgaggtctatatctgaattttagtgttctatgtcctgaatttgaaaaaaaaaacttggtcaacctgaatatacatatacttctgaacaattctaatgctaaaaaacaggcactcgcgcgaaaactgaataaaaattttgtatttggaaaattttgtccaaaaatttttatgttctaaaattaccggtttttaccggtaccggtaccggttgaaaaagttggtaccggtaccggtaccggtttttgcagtaccggtcagtaccggtaccggtttttttgcaattaccgattaccgctcaactctaatctaaaacattatttcgttgcaaattagtttcggtttggcattttgtaaacgatggctcattttactcgcacgaaaatgacgtcttgcggattatggcacatcggtccacttaggctatggcattttcttatttttgtgtatttttctgtccgattgtccagtgacgcccaaattgaccatttgctgctgctgcgtctccaattggacaattcgtcccaaaatagcattctgatcattttgaaaccgagtcagttggccaactgaaaccgggcaaagcattattagtttttag

SEQ ID NO: 26498 - DNA, 1432 bp, Heterodera glycines
caaaacgtacaaaaagcagcaacagcaacgaggatggcagaacgccaacaaacggcaaaaatttgtcaccaaaaaaacgcaaccattcacaacagcgtcagcaacagaacgacagcaaaaaaagcgcattgtccacagatttgggcctcaaatcagtggtggtacagagaaagctgaacagccagacgagtaaaaagcaattaaagtgtcaaattaataattaatgtaaaaatgggatatttaattggttggcattgtcttcgggatgatttatggagattttctggtctggttttaagggggaagggaccaaaacgggtgccctggtaatacggaattttattccaaaaagtttgacctcggttttaaaatttcggactctaatacacgtgatatgtgcgctctcgtgtgaatgtttggctaaaacgaatcgataaaatcatttgtgcaaaaacaaataattcttaattaaaaaataggaaattatttgttgtttgttttgttttgcgaaatttattataaaatttaaatcatttgtggggtttgatattttttttgaaacaaatttaaaatcattggaaacctgaaaatttggaatttttttttccaaaattaaacttgtaaatcgatgggtaactgaaaaatatacgttaaatttgaacgcatttaccgaattcatataaaaatttaaaaactacagtaattatggctggttactataaccgggacccacgcgtttcggcgctcgtgtttcggcgccagctcgtttttccacttaagcttttttctttggcatccaaatccaacaatcttggtatcattcgaaagctcaacatgctctattagccttatcaaaaacgaaaagtttttcaagcctgtaaaaattttattaagaaaaaacttcaaaaatttcgacttttcgcaatttccatgcataactgttttgataattgtctaatcgcaaagcaatagcttagaaaaagcttcaaaatagattaagctttcgaacgacaccaacaatgttggatttggtttacaaagaaaaaagttatagccaaaaacatgctggcgccgaaacgggagcgccgaaacgcagtggacccactataaccaaccatatataaatacgtacgtaccgtatcccccaaccgccgtcagattattcactgcgtgcagtgcgcaagaaaatcacggcctccaacgaattggtggtggagcaggacgaaggggtcgcaaaggccaaaccgccgaacgaacaccgctacaaaagagccgccaaagacgaaaatgaaaatgacgcttttggcgaggacgacggggatgaaaatgattacgatggtggtgaagatgagcatggcatttggctaaattggcgcgccaagaaacgggacaaccaaagcaacaaattgggcggtggctaaagttcgcaaaa

SEQ ID NO: 26499 - DNA, 1670 bp, Heterodera glycines
ctgttcggctgaaccgacggtccaacaatttatgccgtacatttggccacccattttgggtttggccaaatttggaatttctttccatcaccgatgatggccctccgaattgttcttcgtcatcatcgtcctgaagcaatgcctcgcaaatttcgcgggctcgaaaggtataacgttgctgctgatgttgttgatggaatctgctgctgctgcttgagagactgaaatttaaatttaaacacattaaattaaatttacattttaaagtggaaaatataattagtgctatttctaaaattaaatttttttttgaattaataaatgaaattgaaacacacaaaatttcctccgccgattttgtcggtggttcaacccgtacaaatggaaacacacacaaattggcgcagttcaacgttttcatcagcaatttacgttccactggcaaaggctcaggatggacaagtttcatgtcgaaactaaaaaattaaatatgaaaaagatagaattaacccagagcttcgatctcaaaattttgaaaatcctcatttcagccgtaaaaaatcctcattattgaattacagaaaattaactttgtcataaagtttttataaaagattacggtttcgtacctgaatacagtaccatcatccgacaactgttgagcctgaggctttatcgtacgccgagaacactgtagctcggccacaattagtgtgtttatctgtggaataatttttatttaattacaataaataaagtaattgcaatattaattttaaatcaacttttatcatttattaaaaatgattatgtaaaatttaacaataatgaattaaatctatgagaaattatctatatgaaatatttttaatcatttttaaaaaattcattaatttatataaattatattgcgcatatttaaaaaaataataatttacaagttttctttgtttttctttgttgttgtttttattacgaaatttgccaacaattttttttttattccaaattttctcccaaattttggcggtctttccccaaaactttgtcggattggtcaacaattcaattacacaaattcagagtgctcctcaatccacgaattccagcacaaattgggtgaagggaataatgaaataaaacaaaagaaaataaggtaaggaatgaaaggaagaaataatttggacaaaacacttgaacatttgctgggcaatgttaaaaaaaattaagtaaaatattgaaaatttttgtattttttttattaggccaggcctaaaatattaattaaatagcttttagggtttgaatataaaaaatgagaaattttgatattgagcgatttttccattattttatatttgaaaattttaagttttttttattagttctaaaatataaatttaaaaacacttctatgtttggattagtataaaaaagtaagaaattttttgctcatatgataaatttttgagagatttttcattattttatatattttaaaaaactttttgaaaagccacaatccttggcacttaaaaattatttttattattttaataattataatattaaaagaaatgaattaacggttattgaaattatgcattttggatttctgtttaacagagaacatccgaaaatatatgcaaattgagcaaaatccgactttt

SEQ ID NO: 26500 - DNA, 2416 bp, Heterodera glycines
atttataacaaaaattttttaagcattttctaaagaggctttttgacttcaatcataattatattgtcaattgtttgaaacgcatctgttgcagttggaagaggccgatggaaaatttttcggcttttcgcgaaaaagttttcccagaaaatggcgtgggacaaataaaaattgtacttttattatgagcaatatatatttcctatcaatttcaggtttgctttacacgtttgccaatgaaaaaatggagttttgtgaatgcaaattttaacggattttctttagacgtgtcataagcgggttgtttcgggacaaatgcaaaccaatttgatgctattcgaatgagctaggcgcgctctaccctttcaaatgtatcaacaaagggtgtcgccaaagcgactaagaaagaggagaaaaagaagaaatgatggaaaatggaaaaagagagagagaattgaggaagaagaattaattgtgttaattggaataatttaatatttgtgattgattttcttattatctaaattgtgatatttcctattcaatgtgattttcgtgcttagtattagtcactcttttttgttgttgatcgttctgtctaaattgctccacctccgcttttcctctctatttaaacacgcacgtttttcgcttcaacacattcttttcatctgacatcttattatatttaccaaataaaacttcttttatttattcggtatttatcccccccttattcaccccgccctctctccctcgcgccttcccatttttgcccccctttgccgcccgagtcaacaaatgggattttttaaaagaaaaaaaattctctatggtaaaaatttagaaaaaaaaaattaattttttctttacttttggtgtgttcgggcacgagttgtagtgcgattattttgttccagaacagtggaacagttgcgcacccttttggcccaacgggacgcaattaaagcggacgaaagcgcgttcaaagcgcagtgccgacaaaggctggacgaattagacacgcaaattgaacggcttgaacagtgcgagcggaatggtgtggatttacaattcagatcccttaaaatttccgggaaaaaaattgaaaacaattttctacaggataaatgccgcttgggaaggagacgggcagggaatgcgatggcttacaaatttttctattaaaaagtgtgaaaaacctacggtttccctctccgtcgaattttttttttctcgtaccaacactaaaaatgggggcgctgtagtgggataaatttttaggacctgattatataatatacttaattcttttttatgtagacaaataatgtgtccaaattgtggaaaagaaatttattcaaaaaaaagatgccgctgatgagcacgttgtcgacggtggcgccgacgaaatcgctgcggccaatgcggcggcggcggcgcaggcactgcacgacgatggcatggcacgggcgcgcgcgttggcggccgaagttggggcaacgaatcggcaaattgtgcgcctcagccggcggttgggtgcccgcccgtcccgggtggagttggcgcagtaccaacgcaaatttgtggagctgtgcaaccaaagtgagtggtgatgaaatgagttttttgcttttgtgctaatttttaattgcggcagtcgccggaaaaaattttgagattttgaaaaattttattaatttttttttttttttgtaaagttccaatgtccatgcaggttcttttattttgggttttaattttcaaataagaaaattcaaaaattatgtcttaatcatcacccgaacattaaattttgtgaaaaatcattttaatgaagcaaacaaaaaaaaaaaaattcatttcatggaatttccctaacaaataagcgccaaattccggcaccatcagggcatttttatttgtatatattcattaaaaatccgaaaattttgtcgatttttccattaaaaaatcaaaaaatttattccataccaaaaatttgaaattgtttaaatttggtcggcattttttttagtaagtgccaagcatggggagacaaaacgccaatacacactgtacaacacgttggtcagcaaacgggactttatccagcgcgaaattcgtctgctgaacagcattgatgaccaacgggagttggcccagcgggaggagtaccgggactcattgctggacaatttgcaacaaattggacgcggtgttgacgacagtcttgacaaggtgttgttgtggatggtctgggtgcactatgtttagagtcccccgaaaacttaaaaaaaaagattatttttttgaaagttttgataaattagtataaaaaaaaatgcaaaatttttcaacaacaaaaaaaaatcgctgaaattttttcaatttttctaatttttttttttgaaaa

SEQ ID NO: 26501 - DNA, 1537 bp, Heterodera glycines
ttaataaattttttaattaaaaaattgtttttcgacccccttgagaatgcgtcgcaacagcttggatgggataatcgcgctgacaaattgtacgaaagtccgtggccaacttaattttattattaattaaattttggcaatgtttttaaaacaaaaatggggaattttggcccccaaatttgcttttttaaatttaatacccattcaggtacataaaaaagtccgattaaatgtgaatatttgatcaacttgcctgcactgcttcctgctccaccatactcgagaagcagctcaatgggctctgttttcgtcgtcctaacgccagctcaacaccgtacatctattaaattaattaccatacacctatgatcacttggccgagaactctaatttctcagttatgatcacaattaccaaaattataaaatatctgatcagctcagatcagtttcaaacatttgtgtaacagtcagcgaaaaaaatgccctcaatttctgaacaaaacctgagaaaatgtgaactttcctaagccagttctcgaaatttcaccgaaattccaggaaaaaagggattaaaattttcaaaattgggttttcgacaatttaaatacggcacatgccaaaattccccaaaacacgaacatggagctgttcacgcagcaatcgtccgccgtccttgttcttcgccttgcgcaaaatgccgcccaaaatggacgcgttcatgcactccggtggtgccagccggcgttggatttccccaactgacacccggtacttcttctggttggacaacagtgtgagacggcccggcacgctacagtacgtctcataattgttgatcggatggaactgttgttgttgttgttgttgttgttgatcaatggtgatcagagcgccgatcggcggcagaaacggcacaatcactggcgacgattgcaactgatccgatgccggtggcatcacaaccacaactgattgtgaggaggatgatgatgagttggatgaggatgatgagtcatcagtgccagtttcctcaacatccgttgttatccatgttgacgaggaggacagtttcgtagtcgttgttgccgtcgttgactgtaaattgtaggacaaaagtaccgtaccagcaggaatataacagtagtcctctccataagaaaagaattatgtctcaaaatttcccaaaaattgatcagcaaacgaaatcctgggtcactgtttctattttctatacattttttaaattggcattaaaatctttcattttttgaaatggaggtactgtggttaggcgctggggagaattttaaaaaattgaatacaaattttaaaaatcataaaattttcctacagtatcgtccgagtccacaacactgtctccgtcctatagttagtgataatgttcataggctggcattctaaatttgatagcatttttcattgctggtgtgaaggactagtttctctgcacaagaatattgaacattataattttatcagtgaacgtttagacgcaacattatagaaacagatca

SEQ ID NO: 26502 - DNA, 1434 bp, Heterodera glycines
ccagcttcaaactggccgtgcatcgttttacaaggatctgtgcgtgctccatgatcgtgttgactcgttgaaaaaggtcattggctgcaacgaccaaattttggaagagtttgccactgaccaaagtgcgcaattggctgtagggagggaaaatgtcaaccgatacgttgaaagtacaattgaacggatgggaatgggtcagaacatttcgggttagttattcttttgcttgccttttaatccattgtttatttcaagctgaatttggaaactgcactgccaaggcgtcctcagaagtcattcgatccatcgctcacatcgaaaatgaaattggcaatttcaacacggcgattgatgagactttgaacacctttaggaaggaggctgagaaggtccaatgccctcagcaaagtttgtcaatatcaaactgattctaacaattgcaggctcaggctaagctccacgcttttgttagctcttgcaataagcgtcttcacagccaacgcggacagatcgaccaattctcagaagcgactttgggccgggttcaaaaaatgaacaatatcatgggagatcaggttggtggtattaactttttgatttaaaatatattttaagaaagagtcgacttcgtctatgcgagtgcatctgaatgccactttgaacgatgctcaatcaatggttgatcggtttgctcacagtgactacaaacgtgttatcgccacgggtaaaaaaatggagtgattattaaaaaagaacatccatccaattataggagttacgcctgtccgtcgcagaaacagttttagcgaggaattggtcgaacttccgccggcccaagaacttatccagtcgcagcagcagttgtgtactccacgtcgcaccagcttttatcggacccgcgactccattttggactcttccgactttctcacctctcttttatcaccaaacacgcttaaagagaacatgaacagcaccaagatggacgaagccggcaaattggagactatcggtgaaagcattgaacggactgcgagttcgaccctcagctgtagcagcagaaccgagaagagagggaaatgatggaaggacaaaagaatgacggcgaaatacaatactattgattttatgtttttctgtataacagtgattagcgtaaattggcgcaataaattctctctctctctctctctcgctgcattttttctagactttgcgtttttatttaaccaatcctatataataaagttgagtgtttgtatctgccatgctttgaattggcgtggcgttttgttattattttgcgttaaaaaatgatttgaaaaatggaaatgttttgttttgcttttttcatatttgttttgtcagtatttgatttttgcaaaagcacagctaaaaatttcttttttttttgtgtcgtatattcatagt

SEQ ID NO: 26503 - DNA, 1585 bp, Heterodera glycines
aagaattggttcatctgtcgccaaaaactttcgcttttttggtggtggctcctctccggcaatgaaattcgaccgttgcaaatgagcgaatgttaattaaacctagcttatgccaagtggcgagggatccctcaggcttagtttttagaatcttaatttttaaaaaagcacatttttcgatttttgggttggggcccaaacgaccccggggcccaaaaacgggggcccaaaaacgggggcccaaacgcgggggcccaaaaacgggggcccaaacgctctggtcccccagtttatgcgtccgatcaatttttatacatcaaaaattttttcaaagcaactcaagtaaacaaaaaacacactataaattcacctaccacaacaattttatatatttttcaccgttattgaaaatgggtaagctcatttgtgagttacagccgacctttttctccgttcgtcggcaaattaatttgagctaaaatttgatcaatttttaacaatttttgaaaaacataactttttgttagaattcgggtttggagttgggcaactccgagtgaaatcgtaattagaactctcgaaagcccccttaaactgaattagagccaaaataaataaatttatttatttttggcacaaatttgaggtatttcacacacaaataaatatttttacataaaaaacagcagccaatcaatcatcaaattaaacgcattaaatatcaatgggatggaatcatttgcggaaaatcgcactgaaaagcacagtgtcatcacgggtcagaaacacacagaacggatggtcagcgacaaaacggtattctttgcccggactgctcgaacaatatctcacattctttgctgtggctgctgcggcgacagtgccctcctcattcacctaaatttcgttgttgtttttctttttgataattacgcttaactattttccaaagatgggataagtaactacaaaaaaattattcatatgttaaaaaatgggaccaaattctcgaattttttttttaaaaaattcgatatctcaaattgaattcaaatcatgagcgatcaacgcacctcaatgaacgccttttgcaccacttcgctgatcagcaacggttcctcggcggaaatgcccccaaaattggcgccgtcggtgaacgcggtggccatgcccatgttaatcaaaggtttgttcagtttgtgcgtggcctcctactccacctgggaaataatctcaaaatcttgtcaacgaaatttttatataaaaaaactttcaaacagtccaaaaacgaaagtgaaatggtttctagcattttccgaaaccgaaaaaaagggttaaaattctttctcacagcaatttttgatgaaattctatttttaaatttattcacggttgtgtttcggcggctgtgttttgtcctgttccggcaccggggaatcctccccccccctcccccgaaatgaaaaaattttcaggaaaaagtcattaaaaattttgtagaccagaaaagcaaaaagaaaaaaaaacggatttttttacctttacagtgcgtttgtaccattttttgatcagttccacaaggctc

SEQ ID NO: 26504 - DNA, 1132 bp, Heterodera glycines
tagtgccacaccttgggcgtgggtgagagtgagcattgagcacaatttgttcatgctcacttcaaagaggtcggtaaccatgtagccgagctgcaacgccctgttgagctccacctcagtgtatgcggtgacccatgagcgctggtcgtcgccgtgccggcacgggcgttgctgtctccgctcggcacacgtggcacacagagggaacgtgaagcgcccgtccctggtccggtagccgagcagtggcacacggacgtgccgtggggccagcactcggaccagcaaaagaccgcggaaggtgttgcattccggtctgctccacggcagaggggcggtcggtggacggagcagcacctcccgggtcagcacccgtgggttcccgacaggaaatgggttgaccttctgcagtgcaatttgtgtttgcgtataacaaaaaaaaaatgtaaacagaccatgacataagggtagaggctgaccacgtcaatgcacaaaatctcctccccttcggcacacacgtggtggagcttgaacggctccgtacgaccacccctcaacgcgtcgctgcgtgggtcaagcggacggggcacaaacacatgctcataccgccccctcagcgccgggtccctacgcagccgctccttccactcacaggcccacaccgtgtgcagctcacagccgtgttggtgctccagctcccacaaacgccgcaccgtccgctcgtacagatcctccgccgtccgaccggcggccaaccgttgttgccggttggggaagcactcaacacatcctagcaataaatttggatacaaaaaaaatgggggctcccaagtgcgcgaccgtgatagtaacagcccatccactcgatggccatcgggcgaaggggcggctcccgacgccaaaggccgtccacccgatacccgctgtcctcaatgtgcgcctctccgacggaccagctcgcacactgcacctgcgcgcccggatgctctagctcaaagaagcgaatgtagcgcctcgactcggcggaagcacgacgtccacgcaggtagccgccctccggggagtggaccaaccggttggctggcagaaagcattgtcgaagggtggccagcgcaagcccggcagcggttgacgc

SEQ ID NO: 26505 - DNA, 2022 bp, Heterodera glycines
aaaaaatattttgtgaaaatgacgactgcggctgttcatcctcctgctgtccgtcacgtccttttttcttctgctccttctcatctttagggttggatagcgctgaaacccgtaaaatatataggacaatacgttacttaaactaaaaaattaataaatttttttgaaaatcaacgaattaaaaatataagtttttcaaataaattaataaagcattaattcatctaaatttaaaattcacaaaaattaatatttttaattaggtttgtaagaagattttgatttaaaatataagttaaccgcttattttacgcgaacaccagcaccacaatttcggcttgatgcataggcctattaataaaaaagattttattttttcagaaaatcaactaagtggcttaaaatttacggacacaggaaaaaattaaattgaaaaaatcttgaaataaaattatttatattaacaactaaaaatttttcaaagaacaataaaaaatttaatttattatatttaaaatacccaaatcaattttattcattgtaataaattttcaacattttattattttgaataaaggatttaataaaaaagattaaaaaataaatacgtcttttaattaatgttgatgaggcacatattttctaagtaaactaatatgtataacaagtaataaaaattgtattttaaaattaacttatgacatagagaaaatggttctgggggtgactaattggtcaaactcacacctattgggggttttttgtgtaaataattaattgattattaattaattggggggggggtgatggaggagggcatggaggcagatgggatgaatggggaggggtgtcagatgaccatgggggccgacgtgatagatgggagtgtcgtttgctgtgctgttgccgtaccgcgggttgtcgtcgtattgtgcatctgagcaccgtttatttgcaggcaaaacacagacgccattttgtgtgaccatgaaatttcaggaaaattttttagccaaaaattttttatttgatgtttacatttaatgagttgaaacattcattttacttttagcaatccgaaaacaaacctaaaaagccagaaacataataaatttgtggaaaaatggtcattttttgggttgtctggctaggcaaatgtctcagaatttatgattttcatttttttttctccacaaagttttctgattttctaggcttccatcgtatggcccaatgtgcacggccgtgaggttgagcagtttcgccaatttcgtgaacaatgcccattcccggcgtactgtcacagcaaattcgaggccgaggagagcattcgaaaggctgcgaaagtgttggggagagaaggtccgtacagagaagtcacaccacaaggggcatcccgtttcgaatttgccctgtttcgaattcgaacattttgatacataattaaatgagtttcaaatgccgtttcaaaaaaactttaccaatatataattggtatcgaaaaacgggggagaatggaaccggatatagccgacatcgcaagaatgtggcatcgattttccggtcatttagcgataaaattacggtttcataaaaaattacaaaaaattttggttattgaattctggatggataaaaaaagacattcaaattggcgacttcctattaggcaaaatcagccatataaactgaatttcatgttttcgcgatattgggtttttccgtcaattccttttttcttttggtaaatccccctttttttctttgtagccatttacagtgtcatcgctcgtgtcggtccgttgtatggggagggtgaccgccgttcgttggtctgtgatgccattttgcttacccatcggttcggcgctgtgccgttggtcggcgaccagggcggcacgcttcaggcaaatttttggttcataatttccgacgacaaaaggtttccgaatttttattcgattgaaaatgtcaatctatgtagagtagttccatgccttttagcaaatagaacccattttt

SEQ ID NO: 26506 - DNA, 1161 bp, Heterodera glycines
  unsure (1)..(1161): unsure at all n locations
agatgtcccgaatttcgaacagaatatnnttttagtgtctttttgcaaaaatgcttcaaaaaaaaaattgcgacccctgctgaaggggacagtggaaaatttttaaatttgaaaattaaaacaaatcataaaaattccaaaaaatttccctccccaccggcccctaaaaatccttatttttctttaaacagatttattgagattcaaatttttgcaaaatgaacgaatggaatgctcatgggggcgaaataatttccatttttggattgactgaattttcaaaaccatcaaacaacaattttttcctcatcagcaattgtacatcgcggtgggcatcagcggtgccatccaacacttggccggcatgaaggacagcaaagtgattgtggccatcaacaaggacaaggacgcgcccattttccaggttggcacagccgaacaaagggggtgcagttcatttcccccccccctcaccccccaaaaattttttttttttaaatttgctaacttggaaatttttcagaaaacaaaatcttactagtagaaattttttcataggaaaattcttagaaaaaaatttttttgagaaatttttatggtgaattactaaaaattttttaatttctcggggggaaacgagctgctcccaacaaaggagggggtcagaaattttcatttacaaaatacctccccgccaagggctggagaccaaaatggcaaagaatagtaattttttaccgaaaaaacggcaaataattttgtaaaatatacaccacccataattcgggatttcaaaaaacgaaaaatacacccctaaaaaccgaatttttgacttcagcccaccaaacagaatttgctgaatttccagaaaaaaatttaaaaaattcatttttttattcccccgaatttccataaacaaaaactttcggattaagctagaccgtcttttttgttttcaatgagttttgcgaattttttcccctttctaaaagatttttaagaatttttttttttttattcatttccgttttaattttctcgtatatttttgactcttcggtaatttttttaatttatcttctaaaggttgccgactttgggctcgttgcggatttgttcaaagctgtgcccgcagctaacggaacagctcaaaaaggcgaa

SEQ ID NO: 26507 - DNA, 1018 bp, Heterodera glycines
  unsure (1)..(1018): unsure at all n locations
ttcctctttctctttctcttcccctttctcttccnctttctgttcttcttccactttctcttccactttctcttcttctttcggttcctctttctctttctctcccactttctgttctcttcctctttcttttccactttttcttttttcactttttctgttctcttccactttctcttccagtttctgttcttcttccactttctgtttctcttccactttcggttccactttcggttcctcttgctctttctcttccactttcggttccactttctgttcctcttccactttctcttccactttctgttcttcttccactttctctttctcttccactttctcttccactttctgttcttcttccactttctcttccactttcagttccactttctgttctcttcctctttcgcttccactttctcttctactttcggttcctctttctctttctcttccactttctcttcctctttctgttcttcttccactttctcttccactttctcttccactttcggttcctctttcactttctcttccactttctgttctcttcctctttcttttccactttttcttccactttcggttccactttcggttcctcttcctctttcttttccactttctctttctcttccactttctgttcttcttccactttctgttcctcttccactttcggttcctcttgctttcttttccacattctctttctcttccactttctgttctcttcctctttctcttccactttctgttctcttcctctttctcttccactttctctttttccactttctctttctcttccactttctcttccactttctgttcttcttccactttctctttctcttccactttttgttcttcttccactttctcttccactttcagttccactttctgttcctcttccactttcagttccactttctgttctcttcctctttctcttccactttctcttccacaatcggttcctcttgctctttcttttccactttct

SEQ ID NO: 26508 - DNA, 2033 bp, Heterodera glycines
aagaggattaaaattattaaataatgaatttttttttcctctaatttctttggcattttattttcccatttcaatttgccaatgtaatttttaggtgctaaaaacatccaaaaaagttactaaaattaatgaccaacattttcaaaacagccgtgatggtacgatattttcgaaaacaataggttccctggtctggcctctctcaatctgctcaaaacggtcaaacaagattttcaagtcgtgcagggtcgtttcgtaaaatccgtcattttagcgaatttttcgacaaaacatggcataactttgcttaaaggcaaccaaattttacattctcacgaagtgattaatctcgacggtaaattcggatgagtctattttttaaagaaaatttaattttatgctattgaataaaaacaatatgaacatctaatttccatttgttatcactagggtcgcaacttttagtgaaaaaactttttttttgctcaattgttttgagaaaaggagctcaaaaaacgtatttctgcgttgcgttaaaattttttcatttggacgtcacttttcgtcactagaaatcactattttggcgacttcgtcactaaaatagttaaaaatcactattttggcgacttcgtcactaaaatagttaaaaatcactattttggcgttttgtcactattttttcactatttcgacattttttggaaaattctttaacaaaaatgcaataaaaccaaaaaatacacccctaagaatcgacctaaaaattttttcaaaaagcactcctaagaaatgaaaaaaattttctaaaaaaggtattttcgtggcaagaattttaattttaaaaattatttttttatgtacctattttgtttttttgcccttaaaaatcccagccctactcatttgcaatgcaatcagtgaataaaaattatttttgcttaatttttggctgaaaattatggcactattcgtcactatttcggactttttgacactattttgtcactattttggcatttttactcactattttagttaactatttcgggatttttcgtcactaaaagttgcgaccctactaataattgaaaatgtgtccgatcaaccgataataaacattgaatattaagtattaacagcacaattatggtgaataaaatgtatattcacgatttttatccaaaaaaaaatttacaaaacaaaagggtcccccctatggtttttgataaaattcaaaatctatcactttataactagcgccaaatttgcttaataggcccaaataattgtcatattcgtgatcagcgacctttaaaacacccgggtacttggtttcaggactttttaaacaaaaaaaaaatttgaccaaaaaaaagttgaaaaaattttcaaaaggttactctttgcaactagcgccgaattttgtcaaaatgtcaatttatcttcagctgtgcggtctggtcgcccttctgctgacagtccaatgctggccaaatccgcttttccccttctgtttgggccgtgtcgtcgacttctttcagttgttcaacgccgtctgtgtccacggcttcttcctggtcggcactttcttcttggcattggcacatttgttcagtgccccggacgcattttaccattacaatttccaacttttggtagttttttattgaatgttcaatttatctatttattattcatttattaatttctgtatctaattgggcttaggaacaattttactgcgctttggcctccgttatgtatttgatgggctcagtgttcgctgttttgaacatgctcaaggcaatattcgcccctctgtggttttttcatttggtaactttttgaattattatttttttatatttttattttaagtttgtaacttttgccggttttggcctctacgcattcgacttttggacacgttggaaacgggacagtcagttgaggaaggagcaccagcagaaccaatccgtctatatcacttgaccaatcaaacgcacactttgcatacattcgcaattttc

SEQ ID NO: 26509 - DNA, 1757 bp, Heterodera glycines
  unsure (1)..(1757): unsure at all n locations
caattcgggcgccaaatgcgtaccaaacgatttgggatgccacaaatggcagtgtcaaattgccgccnaaacacaacgccaagccaaccgcgaccatccatttgccattgattcggtcggcaaaaaagcctgttttaaaatttgaatttttatatttgggtattggaattttaatttagataaaatatttaatacttttttaattaaattggacgaaaatttttgaaaaaaaaattttttttttgttttttttgaatttgtttacctgtcgccaacatgaaaagtgagccaatgttttgtgctgcaagaagaaggccctgaaaatgtgcaattaaaaattctatttgaattatcgaaattctccccctcccctcaaaagaattctcggatttcccggtttaatacgagtgccaaaattaccgaacatctccggcaccactcaaaattctcttctgaaatgtcctaataaatagcctctcataattgcaaaaaattaattttaaaaacagcaataagccaaactccatttttaggccatttctttggccacaattttcgtaattaaaaatttaaaatttctttaactgatacggcacattcagagcttttccaaatgatgccaaaatgttttgacgtattttccaaagaccgtaaaactaattagcgctctaattggtttcatggcactaattgccgcactaattagtcggctatatgtaatatgccagctctatccgtccctctgcttgcctctttgtccgtctcccattccaacgtgccgtggtagccgtgccgcctttcgcatttgatcatgcaaatcactgccacctgtcacgggcatgagggcatttctcactccgctacttagccctattagatcgcatcaattttttgccctaattatcatttatttgctaattaatcactctgtccccccctccctttgtttattatgctacgctaattattgtgctaatgagctttggtcacgctaagtttatcgccgccgccgttaattgattgttttctccatctagtgatcgcgcaacctaattagcgttcacatttgctgctaattaattaattagccggcaattcgccgtcacgctaattagcgttgcgtattgttaattgggcaaaatttgccttacggcaatgtttgacgagctgacggagacggtaatgtacacaaggcaaaggcacagtgccaacagaaggcgcatcgatggcaaaagtgggacctgctgaagggggggggggggaagaaataattaataattattgaaaaatgaataattaaattctttttaaatactttaaactgtgcgagattttgtaaaattattaaaatttaattgaaaacgatagtttttaggttaaaaattagttttccgtgctttttttaaaattatttttcttttattctttcaattttatttattttttattttattccatttttaatttttaaattaatttttaaacgaaaaattttatttaaaatgattcaaaaatgattgaataatatttttcaataacattttattcatttttaagtaaaacaaaattatgcatattcattttttaaatatttaattattaaaaataaaatatttaattattaaaaatacatttaaaattaatttaatttaatttatttttccatgctttccttcttcacctttgaactgcttgttgatgatgatgaggacgaaaggaggtgttcaacgagttgattgaggatgcttttttgttgg

SEQ ID NO: 26510 - DNA, 1839 bp, Heterodera glycines
aaattttgttttctcaggaaatgcagcaaattttactttctcagtaacacctaggttttttttaaatttttatggcaattttgaaaaaagttttatttaattttttttgcggcgacgttacgtccccgcgaagccggcgacgttttgggggtgtacccacacacgagggcccgggttttgaacaatcccagacagcaactgttgctgctgcattcggaccgggttcccggatcaaaatcctattctcgaactgacctttggccgatattctgtgacagttgctcaggtccaacatttccaaagtgttggcgaacattccgccaattcggctcagcacccaatcgtcgatccatcgacagtccctcaggctgagcatccgaaggaattccaagtcgtacaaattgtcgaagccttcgtgtgagggaagtaaaaatgtttttttggaaggggataagtgccatagaaaaaaaaacaaaaacaatcgcgtaaaaaataaaattattagttaaagccaagctcagaaatggggtgcatttcattccctcctctgccccgtcgttttccccacatttttttttatttacaaacttaaattatataagaatttccaagaaaaaaatttttggaaaatttttcaggaacatcacagaatttaaaaaaaagctagaaaaacttggtataatttcctatatctgaaaaatatccgttttaaaatttaaaaaacaaattttcgaaggtggggaaacgtcctgctcataataagcgagaaaagttgtattttgttaaagaattccatcaattctatttccccccttttttcttcggtctgcccaccttcgaacatcagttcggtgccggaagcgtcaattgcctccacgtaaaagccctccgttttggtgcccggcaaatagtaagtgcccgcccgtccctcgcgcttgtaccagtggtcgtcgccgacaaatttgacggaaccatgcctaaaaaggcgacaaaaaggcatgtttttcttttgaaatcttgtgccaaattttgcctgtgcactatgaaatgggctgcggcgaggtcggcgcccaggaaaatcagtcgatctggcaaaaacctaaaaaacggaaagaaaaattgtaaaattagtcgagagatcggcgtgattgatccaattaaagaacaattaaaaatcttgaattcatttaaatatttttttcataaggagaaatttgctgaaaggtttttttacgagcttgtgccgatgttcaatttttaatttccaatatgcctcattaagaagaaaaaacttaaaaatgtaaaactcttgttttttggaacgggaaaacagtaatttttggtcagtcatctttaaaaaatttgcacaaatttttcgacctttggtcgtattgcatggcttggaatttgcggtattccctgcagcggcgaatgttgtccatgctgtggtcaagatacctctgtgaagaaaaagcagacaattgtttatttattgtccatattttgactctctgaattgaaaaaatggaatttcaatttcggaaaatgaaattgcggttaaaaaccctcgaaaagcggctgcatttctctgttgtgagacaaaaggaccaatgctttttttatataaaaaaagtgacgggttttcacatattttaatgcaaaccacaattatggctaggcccgtaccatggagggggaatgaaaattttagttttttcagaaaaaaaggtaatttggccctaagttttccccgaaaatgcctaacggcaccgccggagcccaaattttcttatatttttgacaaaatcttgtcacaaagttgccaattctgccgaaaat

SEQ ID NO: 26511 - DNA, 1307 bp, Heterodera glycines
tatagcacaaaaggattaaataaaatcgctcaatcgaagaaagctaaataattaataaggaaataaaaatttcataatttttgtattgaaatgtaccgataggttgcaatataataatataaatttaaatttattgaaaaataccgaatttttgatgttttctgcaaaattttcggatttttatgtcattaattacattctggtcagataaagattaaaattctgaattttagtaatattcttaattgtttgaaaatagttatttgaagtaaatttattcaaaatgtttataatatttctttacttttggtttttaaaattataaattttcacttgaataatcaaaaattttaatttttccatttttaaacttttttattgggaaaattaccagcttgttcccgtttcacgtcccgggcgaaaatcgaggtgcactccaggtttttcagtcccggcaattcccggtccaggttttggtttattaaattcataaattttcattaaaaaaaagttgaaaaaattggcaaaacgccaaaatatgaattttaactatttaatgacaaaacgccaaaataatcatttataatgacgagaaatgcgttttaccatataaatataaattcgacaaccaacctttaaaataacaagaattttttacgaaaaaaagacaacagtaacaaaaataataattataaaaatacttgcaaaacacttaaatacgtcatttatcaatagaatctttataaaaataataatttatgaaacattaccatcaaacttaaataatatcaattgctataaatgaccttttaggtatggttcgaagcgctcaaacgcgcagtctttttcactctgaacggaaccaattgatctgattgggcattgattgatttcatctaattgtttaaaaattgctgtctaaaaaaatttaaaattaaaaaattattaaaaaatctattaaattttttaaagagaatttaaatttaaaaaaatctaaactttaatttatttgatacggcgtaataattataaatcattacaaccaatcgttaatttattgttttgatcaacatacttaatctttaaagttcgagtttcagatttattagaaagaattcaaaaatgatggaatatataaaaataataaatctattttgtatttaagaaaaattttgatacagagctacttagcttttttttagtaattcaatattattttttcttttatttgataaggtataaatttacgaaattatatatagcgttggaatatcattttgctagataaaatggtgcaccactttttt

SEQ ID NO: 26512 - DNA, 620 bp, Heterodera glycines
attttatacgcaattatttttttcaaagcatgatgggacaacacttatgaccatgactgtatgtcaaacggagccatacacaaaaagggatacgaaaacatgaagcacatgcgaagaacgattgccattttctgttatggcccggatttgaatttttaaacaaacattgaatagaattgcaagatattcgtcactattgcataaatttaaaaaaaggcatttttcgaagacacaaattattgcatttatttatgcctccgaaattatttagttttcgaactatgagcccttttttaaaaactcacgggccacaaaacagaaaagtaccgtaggtttgagatatgtacagactgatcaagggggaaaaaagtaaatatattggtgctatgtcgttatataacaaccatcaaaaagggcgttatataaaaaaccatcaaatggaaattttcaacaaaaaactgtccataacttttgtcaaagttaaccaaattaaacattcttggtatcattggatagccctaacatttctctacaagctcatctaaatttcaaaaaatttgctcaagttgagaaaagttatggacaaaagtacgcaaggcaccaagtttgcacacattttt

SEQ ID NO: 26513 - DNA, 1203 bp, Heterodera glycines
ttgagataatttttttttccgattcctttatctccaagcatgagccttataagtgattgttcatatccttctcttgaaaaaaattgtcagtaaaaaaaacacgttttctgaatattagcaacaaaaatttttagccactttctaaagaggaaggaaaaaaatttttcatttgcttaatatttatttatactgttgatctgttggaaatgcatctgatgccgtcggaaaagctccgattttgtggggaagttttcttctttcagtctcacctcctgatttgttgaggctaatttttttcgccaatttcttttgtctacaaacattatttattgcgtttcatcctgtagtgtgtaaaaaattttcagtaaaaaaaacttgttatctgaatatttacaagcaaaatttaagaccatttccaaagaggaaggaacaaaaatttttgcctaaattttatattatattgttgaattgtttgaaatgcatctgttgtctgccgttttgaaatttttcaacttttcgcgaaaagatttcccagaaaatgcatgggacaaataaaaattaaacttctattatgatcaatttaaatttcctatcagtttcgggtttgctttaaacacgctggcctatgaaaaaatggagttttatggatgtcaaattttgggacttttcttcgacgtggccatcagcgggttgtttcgtgacaaaaacaaaccagtttgatgttattcgaatgagctagacgcgctctacattttcaaatgtatcaacaaagggtctaccgccactccctggcgagatatggcctgtcaaagcagaacggggccaataaatttgaatttttgttaatcttcggcagttgcctttatttcgagcctactctacttgtgcatcttttcccaatatggcactgcttccgaattattgaactgtttcacgactgattgttgagataatttttttttccgattcctttatctccaagcatgagccttataagtgattgttcatatccttctcttgaaaaaaattgtcagtaaaaaaaacacgttttctgaatattaacaacaaaaatttttagacactttctaaagaggaaggaaaaaaatttttcatttacctaatatttatttatactgttgaactgttggaatgcagctgatgccgtcggaaagctccgattctttgcgtgagtttttttctttc

SEQ ID NO: 26514 - DNA, 1931 bp, Heterodera glycines
atctgaggatttttcctcattttgtgatcttttagagggtcaaagaggattttttttttggaactgaggatttgcggatttttgtggtcttttgataaaaaagtgacaaaatatataattgatgtgttatactgtttgcagctgcaccctgtggcttttgctttagccaatatacatattatgtgaacgtcgttttgcgtttctcaaccaaagtgacaacatattcgtttaaagtgacaactgcactttattttcatattagccgtcagatccatactttagcgtctgaacaggtaaagccacacattctctaccattatgaattttcaaatcctctttccttgacaattcttggtcgtaaaatgcgtctgaattcgcaacatttggccatcatatgcatgttctgttctccttttcaaatacgtgtttgcgttgtagaattcagacactgtacccataggcaatttgaaccattcttttctaggaagaaagcggtttgaaggtgataaagcggttgccatcgtatttatagaaagtggctccaatacgataactttaaaatatataacggatgtgttattctgtttgcagctgcaccctgtggcttttgctttggccaatacattatgtgaacgtcgttttgcgtttctcaaccaaagtgacatatttcgttctttttgactcgaaaaaacatcggtcacttgaaataataaagtccaaaattttgtccaggaattcggattttttagcctcgacctgtattttttctagagttgggtaaaaaaaaatttccgggaacgggaaaaccaaaatgaacggggcgggattcgcgaacgggattcccgccttttttcccgttcccgtaaaaatcccgttggcgaaaaaagacgggaaacgggattcccggcttttcccgcgggattcccgttcccgcccaactctaattttttcatatttggcctggaaaaacccaggtccaatatttaaatttacatgctaaactaggggttaactctactgtgtggagaaaaactatgtacaatataataaacatatgaatatgtctttggaggcgtacaacagaacgattatacaataatacagcaatacatgtgcatgggaaatacatattggagtttcttgtcattaaacggcataattcgcgacatcgattcacttaagaaccctccgatgaagatgatgcgtcctctgtgccttcagaagttgcgtccgaagtcccagaactcccctcagagccagaatccaatgctgaatacttacccatatcttctgcatagtaactgagttctcatcgtccaagcgtccagtgtgctccaccgagtccacatgcgctccctccgttgacactgtatactccgatacgaatgatgccaactggccttgttctgcttatcctcacacagccgacttaacctcatcattcttctcatctatctattcaactcatatcttctttgattaaaatgattatgaatggatactccttgaatgcactatacccctctgcgtaatatttcagatcaactatttacttgctctatacttctggctcaaaaaatttagttatatttcaatttatttacctatcgcctttctaatgctgaaaaaataggagattgtgtaaaatttacgtgcttatctttgtaatatactactatttaataaacttactttaaatattaaaatttcactacatgatccatcatttactggattaattcttaacaaatatgcatggtttatatgagactcttctaaatatcctatgtaacttctctcttttgtttgataatcattttattcattacggataataaaatatatttcttaatgtcactcgtatcttttcactcgcttttgtcactattaatttagtttgtagaaagtgtattagtaacaaatgttttatg

SEQ ID NO: 26515 - DNA, 2150 bp, Heterodera glycines
ttgcgagacggagatggcttagattgctaagtaacatgccacgctgagccgaggttaatcctcgtaaattttggcccggggaaggctctgtccttcccttaaatgtcctttgaattttaaaaataattctcttgataaattttaagtgagttgagaatttattttggtcgaacaatcctcaagtgcttaagaatttgatagcttattatttatagaattttaaaattcacagattccgcctgtcgttattttttctcaaagcaatgtcgaaatcatattttacgtttaacgttatcattacatggcgtatgaatagaagagatattaagcaagaaaattggaaatatagaaaaaattttaaaaataatttctcttgataaatttttagtgagttgagaatttattttggtcgaacaatcctcaagtgcctaagaatttgatagcttattatttatagaattttaaactttacagattccgcctgagggtagtttcacatgcagattttgggggttaaatttcagccccgccatttcagtcccactggaaagggacatttcagtaccaaatttaaacctttaaaaaacacctataataaatatatccaatcccagaagaggtaaataattgaaaaaacatctgaaggataaaacccgaggtcaaatcctattagagaaggaaagggaggcagaggatgggcgtcaagggacgcatgccacctgagcgcccgcgtgtgtgccatttaaacgctcgcgtatgccatttgagccccagatttatttttacagcgcagccatttgagccccagagttatttttacagcgcagccatttgagccccagagttatttttacagtgccgccatttgagccccagagttattttttaagtttagccatttcactcccagtgcccacgggatatttcagttctgagacctaaagcctattgagtagtcaaagtctacagagagtcattaacattccttttaagtgcattttgaccaacgctaagcctacggagggtcattaatctttcctttgagtgcatttctaactaatgcctccgaaagtgttataaatatctccttacgagatgtggagtatgttgtgccaaagccaactgagcgccattaaccattcttttgtgaacatgtctgtccaacagaagctagtggtcattaattatccccttgggaattcttttttgtgcatttctgaccgagccaaaaccaatggaatggtcattaataaccccttggacgcattttgattgtataatacccacggaagtgtcaataatatccctattgccggttgactttcagttgtgagtcaatgattaattgtgacagttgtgactatgcaaaacccgacatcagatattctgtgcttgagacagctgcctcttttggcaaagtgccaaatttagccaagctgaaaaatagccccgcctactcggtggagtataaatagcaggtcatttccagcaaaagtgcattttttccattcatttggaaattttgaaatctttcttcaaacgactaacgcgctctttcccttttgcttcctcgctctctgcgactatttaaaccaatttcaccataaacttttgtttcctaccatccctttaaactttttctttcccttttcttcactatttcaacctaattcaatataattccctaatcttccaataaacctaaaacattataattttaaatcatattacaattaaataattaattacaaaaatactttaattttctacgtatccttacatcttttacctacttacccctttttgcttttgcttttcctccttgctcactatttaaacccatttcaccacttaattttaatataaatccctcaatttgaaaaatataaaaactccaataaacttaattaaatcataaaatttttataaaaactttacttcataaaatttaaaaactttcctttattcatatatccatattttacccaatcaattaataaaaactaataaatatgaagcgtgtctctaaagcccaatcttcatcttcctccccaaaaaagttccaaccgaaatgtattcgtaaacttgaccaatttacttcaaaaagcattaaacatcattttattcgttcaaaatctaaatttgttatt

SEQ ID NO: 26516 - DNA, 1075 bp, Heterodera glycines
gatttttacttacaccattttttgctaggcttagatcacatgcgattttcgccactctgatatttttagcgctcataatgggatgtataaaggcgattgtagaaggaattggaagcgctaaaattgtttgagaagctttttgagcgtaattacgatttttacttagaccatttttttctaggcttagatcacatgcgattttcggcactctgataattttagcgctcataatgggatgtataaaggcgattgtagaaggaattggaagcgctaaaattgtttgagaagctttttgagcgtaattacgatttttacttgaccatttttttctaggcttagatcacatgcgattttcggcactctgataattttagcgctcataatgggatgtataaaggcgattgtagaaggaattggaagcgctaaaattgtttgagaagctttttgagcgtaattacgatttttacttagaccatttttttctaggcttagatcacatgcgattttcggcactctgataattttagcgctcataatgggatgtataaaggcgattgtagaaggaattggaagcgctaaaattgtttgagaagctttttgagcgtaattacgatttttacttagaccatttttttctaggcttagatcacatgcgattttcggcactctgataattttagcgctcataatgggatgtataaaggcgattgtagaaggaattggaagcgctaaaattgtttgagaagctttttgagcgtaattacgatttttacttacaccattttttgctaggcttagatcacatgcgattttcggcactctgataattttagcgctcataatgggatgtataaaggcgattgtagaaggaattggaagcgctaaaattgtttgagaagctttttgagcgtaattacgatttttacttaaaccatttttttctaggcttagatcacatgcgattttcggcactctgataattttagcgctataatgggatgtataaaggcgattgtagaaggaattggaagcgccaaaatgtttgagaagctttttgagcgtaatacgattttta

SEQ ID NO: 26517 - DNA, 1293 bp, Heterodera glycines
ttgcttttttatttatttttctcttttttacgccgacctcccgccgctttttcttcttttttcacttcaattaaactcatgtcaaaatttgggtctttagcaaaattaatattcgccatttctaagaatgtttttgcgtcattcattgtcaaaatttgcaataaattttgttggttgcctttgtttttggccacgtctaaataaagcagaacttttagcattcaaattacttttttataatacgtatgtgtctaattaatcattttgatttaacctgctaaaatcgcagcaaattttccatataaatttttttgcttttttttatttgtcaaaaacttgttcagttcagcaaaatgcatcgctttgatcgcttcgatcggttcattgaatttgtccccgctttcaatccatcccaatttgcccttttctcggacggaatgaatcatttctgccaatgcaatttcaaagtttgggtcgtccaatttctttttctccattttttcaacgaatttaaatgtttctaatgaaaaaaaatatttttaaaaaatatttactattaataaatttaaattaccgtcaacaaaactgctgaacataaaactcgcttctcttgcaatttcggtggacagagaatcgttaaaaattcggcaataaaagtacaaaaaatccgcaaattgttgcccatttgctcctccgatgcttctcggttttgattccatccgattgtaccacacaaaaatatctgcggccaatcgttggagcgtttttgacgggtcaatgggcggagagtccaagccaaaaaattgggcataatggtcaagcagacgcatttcattgaaatatgaaaaaaataataatttgcaaaatgtaaaatagcaaaatttgtttttagggctgagaattatatttattaaaaatcccgaatagttaacagttcctaaatagggcgaagatttatatggccaaaaaaaatagacgaaaagcgctgaaatatggccaagaaatacgaaaatatagacaaaaaatttctgaataaaaatcgtaaaccgataaaaaaaaattgcaaaattagtttatcagctgaatataatccccattcaaattctattttcaattgtctttatgttcatttttaattaaaataaaattatccacaaacaaacaatttttgttgatcagtttttggcgcaccgatggcattgcccaaatttgtatcattttgacgtgccctcccaccaaatcgttcatggccaacaacgcgccgtccttttccctgagaatgtgcacgatttc

SEQ ID NO: 26518 - DNA, 881 bp, Heterodera glycines
aaagaacagaaagaggggagagagatagagagacatagagagagagaagagagacgaagaaaatgaaatggagcgatttgaggattaattaataattggggaccaaaattcagtgaatttgactctattatactcaatttttggcacttcgcggactcttccctatttttttttttgtacaaaagttaaacccacgacaaactgtgccaccggcaaaatggtcgagggagggtgaacaatgaatgatcagtgagtgtgatcagtggcactcggagtcatttgccaaatgccatcgatgacgaactgtaaaaagaaaaacattagttatgtgtgtttagtgaatttaaattcaaagtaaatttgaagaattcaaggacagaagaacttccgtcacttccaaatgaatgaattaattaattaattacatctaatcacaatcaatcagcagttgcttattcgattattgcttttccttatcattttatgttcattttcatcatcggactctctgctccaaaagtgagagtttcaacatttgaaatgcaatttgatgactcattcattcactcgaagcgctgatgagtcagtcatcttacattttgtttgctatttaatggactttccatgggaaaacttattaaattttttaaattttcatcaatttaacaggccaatttccaattgaaaatggcgtgaaaatgtcataaaatgtgagtaattaattaattcattactccggcggaataaaatttgtggaatttgaaaaatctgaaattacataaaaattaaataaatacaaaacaatttcctgtccaaaaatatgtaacaaaggcaattgaaatttttcggaatttataagtgaaagcatcgagatggtactt

SEQ ID NO: 26519 - DNA, 898 bp, Heterodera glycines
ttttatttgtcaggtccctaggcttgagccaagtcttgatgccgagataagagatcgaaattattcgagaaacgagatctatcgggccaatgcttgagataagactactctaacaacaaaagacgagaataggtacataagtaagaagttttgacgagaaaaataaggggaccgccgccacattcattaaaccaattggcattggcattcattcggtggtcgaccggacggtccattgaaagcgaaagggccgaaaatttgacaaattgcagggaaaaggagaagagggggcgggaggggaggcaaaggcacacaacacattggaaaaagtgaatggagagaagggcggacgaatgaatgagaatggttttttggaagataaatacgctggaagaaaatggaagtagggagaaaagtgaaagtgaagacagaacgaaggagggaggggggagaaatagtacaccatggaataagaaaaagagaaagcgagagagtggaaggaaaagaagaaaatggtcggccgaaaacgcacggaaattggaaaaatgtatgcgcttccgtgattaatttggtgaacaatgaatgcatacataggccgagatagaggggaggagagaaggaaagagagaagagggagaaagagagatgggaagaaagagagaagagggagaaagagagagggagagagaaagagagatgggaaggacacaacgaagacatacagcactaaaatcagtgatcacattcactaaagcaccaaatcagtgatcaccaatcacaaagcatcaaaatcagtgatcaccaatcaaaccgttggaccatttaaaacaaacaaaactttaagtctaaaaaatttagacaaatagcctaagaagaagaaaagtggtcgtaatagatg

SEQ ID NO: 26520 - DNA, 1478 bp, Heterodera glycines
cattctctctctcttcccctctctctctcttccccatccttcacctcctctctccccgtccctaaaccaaaccgcagattttcttcgtctccgttgtgcttcttctcccctccccgcccccttcgtttgtttggtgttttttgcctctgctcccctccagggaatgcttcttgttgcccgggtacttaacctagtgatttgcctaaaagcagcacattcatttagtcataaatgcgtttattactcccccaaattcaccccccccccccccctctccgttcccattgctctcaaaataatttattaatagtccaaacggagaacagcaaaagcaaagggtgcgaggcgtaagggggatggctcggggagagggtgccatgcttttcatacgtgcttctggtgccatatagtgccgtgccttttatggcgttctgatggttcatgcctttgtatgtgccgatgttccctcatcccttggcatgccatgccattccctcttctttttccatcccttccaaaaatgccatcctttttctttttggctttcgccctgccatgccggatcttctcttccgcgcacattccttcactgtttgggtggggcgtctctttcccgtcacttttttcgtcctttgcctgcaaaaccttttccgaccagcggggaatgatttgcgagatgaattccgagacaaattgttcggtcggcttttttcgaaagctgctgaaggtcagctgacaaagcagtccatcaatcagacaaaacaaacgaaaagcaaagaaaggaaaagcaaagcgaaaggacggcaaagggacggaaaggcatgtcccccaatgcatcaatcactgattcaaagatcggtgactgatcggcgatgatcagtcggcgaggtgacaatgtccgagggtacagaggaggaggagggcattcattttggctttactttcgcgtgctttcgtcagaccaacaaaaaaaaacgggatggatccgccacgtcggacgccccccccccatttaaccccggttattagccactgcttctcgttttcgctgtccattcacgcagaattaccaccggcggaagaatccctccgctgatttgatctgataaaaccgcccattaaatgtttcttatttccaaaagcgatcaaatcattgctgattagtttgtgtttattgttcggtttagccatcagcagagaaaatgaccgagtcggacagtcgcattcgggcgtacaaattcgttgcctattcggccgtcactttctccatcgtggccgttctctctgttgtggtcactctgcccatggtgtacaattacgtagcccacgttcggcgacagatgcagcacgagctcggcttttgcaaggttgggagggaagagggaattggtgccgaatgcttttgggggttggcactggcatatttccaatggcattggaattggaatgccgttggaattgacatttggcattttgac

SEQ ID NO: 26521 - DNA, 1370 bp, Heterodera glycines
  unsure (1)..(1370): unsure at all n locations
ataatacatttatcaattacatttntaatatttgcctttataattgaattttttgcaatttaattttcttttaatttttttacgcatgtcatttttagcattgccatgccattgaaacatttgaacatttggcttttaaatgaaaaacgagaaaaaaaactaaattttaaaactgtaacagaacgaaaaacattaaagaataaaacgaaaactctaaaaagccataaatattaaaaattaatgagcatttaaattgcaatgaaccaacagtgtgcataaaaaatgagcaaaatttcaaattcctggaatttattcaacaaagaaaatagtccaaaaaatggataacagctgctaagtttttagatacatttatcacaaataaagcatcattttatcgaaaaactaaatttatgtaattaatataaaaagaaattttataaaattaagtttatcttaatgcaattttctctaagtccaccgttgtcatgtggacgctgttggaaaaatttgaaatttaatttgagttattttttaaacggttagccgacttttgcgccgcgccatttacgccgcgacacttgcgccgctcagcaaaaaagactcttgcgccgcggacatttgcgccgtgccatttgcgccgcgacatttgcgccgtacagcgaaaaaagagatttgcgctctgattaaaataaatttatgtgctttatagaataagaattgatagatattcattattaattcctttttcgaagcctttcatgtcaattccatattgaagtgcacgtaatgattgatcaaatcttgatcattttggttttcattgggaccatatgcgataacaagccttcgtattgcctgatcattaagcggaggattttaagcgaaaaaaaaaaaggtaaataaataagggcataaaaattgcgaaataatgcgaaaaatggtaaaataggagcgaaaatttgaaaatcagtgcgttttttcaatgaaattaaattaaaatcgatgaaaataacttattgagaaaattaattataaaggaattgaatttcattcctttttcgaagcaaaaaaataattgggggttctacagaaaattcttttttttcggttttttgttagtttgtattcttaatcattttttcatatctttgatgaacctattcaatgttaagattttaatggttaaaattgaatgtcaatctttgtgactaataattttttcgaattttcaattagttatttttgtcgatggcttatagttttagtaaaacttattgataatagtggaatttttatgaatataatatttttgacagcgcggcgcaaaagtccatttttgctgggcggcgcaaatatccgcggcgcaaatg

SEQ ID NO: 26522 - DNA, 1645 bp, Heterodera glycines
  unsure (1)..(1645): unsure at all n locations
agattggaaaacgacacattctttaataaaacagattccaccactgggttccttttcccaggatatccttacaaatgagcattcgaaaaaaacattagaaattttccaatttttcaaattttatgccaatattttttattgataaaagttgcaataaattcctaaatggatcggccagtggcgaccccccccccccccatcggccaatcgtacgaggatatcattcttattgctggctgacttcttatgcacctatgaccttaaaatattatgctaaaagcatacatttttagaaatagctcatttttaatgaaatgtttttttatttgctagtattaaaataaaggaataatttttgtttttaagattttttcagtgaagaaatgatcagtgacgaaacaattagtgaagaaatgatcggtcaccgaaagaaaatttagtcaattttaaaagaaaatcaaaattgtatgctttgattgaaaactgcattttttgcaaaatctttatgctttttttcagcaaaaaagttgttgagctttcgaaaggtgctgagttgattggatttgataaacaatgaaaaaagctatggctttcagcctaattaataattttataatcaaatatcaacaaacaattcatttatcagtcccaaaaattgacagaattatcaacaaatgatttgacttttgtcaaattatttatcaaatcattcggcaacgctttttcatgtctcacttttttgacttggtcgatttgcttgaacttcctccgtcctttttcttgtctttaacaattttaaaagcattagcaattttagaaaacatcgatgactttgcttttttcttttttggcgatgcttttgatggtttgattaatgatcctttatgtggcggctttttccctccgcttccgctaacaattgaaattccactcgtcgatcgtttagccagcactttattgccaaatatggtctgaattttatcaaatgtattgggaatacccaaaattgattattgcttaatttttttatttttttagggtggcgaaaaattggtttttttaaaatttatttttcctcgttctgggccgacggtcccgactttttggtagctcaaccagcttaaaatattgggattgccttcttttaaatctccgatccattcatttcatttgtttaaattttttggtcataattaataaatgcaaattttgcaaaacatcaaaatcttttgaaaaaaagttgccaaaaagtcgcttaaaaatcgttaacgccgccgaaaacaatattaaaatttttggattggagtttattaagttttcaagaaaattcatttttgccaaaaaaatgcaattcttaaacgtgtattcttactcgcccgtggaaaatcccggaaagctaagaaaaatacggagcggatttacgcaaaatcccaacaagattttcgctaaaatgagttttggtctctaatttcattctccaatttttaccgttttttggttgtgcgacaaatttccgattgtgcccaaagaattgagtgattcaaatgcataagaaaaggttganaaacagatgtgaattgacaaaaaaatatggataaataaatgcattattttactanatcatatttatttaataattaataac

SEQ ID NO: 26523 - DNA, 1401 bp, Heterodera glycines
  unsure (1)..(1401): unsure at all n locations
cccaactcacctccaactttcacaaccagtctaccacctcacaaatatcaaaatcaaaatcctaaaaaccacatccaatttcacctaatcactcaaaatcaactcccccttccccatcaactattatccccactcttcatcttctttcaacttcctatttatctcactcatatcacactccacctcatcctntnctctcatcantcnttccaccttttccatntctttncccatttcnttnccncccaattncnctnctttttccccaatncnttcnttcntctcttccactttntcattcaatctaaggacttaaatagtgccgcgtccgtcacttccgttggcacggtcactccgctgacctgcgagtgccgcgttgagaagtgttcggtagatgctcagtcggcccgccagccgttgccagccttcgttcacttccgccagccttttgcgcacatagtccgattcggccgactttcgcccgatcaatcgtcccccgaggcgattcgcctccgccagagtgccctcgtcgattccttggctttcgtccagccggtccagcctggatttgaaggggtgggtggtcatctgttgtccgtttgtgctcccccaatcactgacagtgattggcaatgctccaaatcttttcccaaatcttccgcaccgaccatcccttctttggcccgcacaaatgtgcacaatcggtctgctaattgctctaactccagcaagtcgcgtgcttcgtctaacgccgcgtgcaatttgcgcatcgcctcactgagttttgaccaacgcaaaagaaactcatccgcccgagagacctttcaagcaaaaagaataaattaatgagttccaatggggcgggccattttgggcatgatgccaacgttttccgtgtctccgtgtcatgtcctcccccttcccctccccgtccctctcgccaccgtttgactcaccgccgtctccgtgccatggcgccccctcagccattccaatcgctctctcattttgtcaatgcgtgtgccattggcgtccatctcccgctgcagtgcctgctgtcgcttcagtctgtccaacttttgctctaacgacgccccgcccgcttccgccgtttgtgctttgacgcgcttttccttctcctcaacccattcgcacatttctgacaatttggcttcaaattgctccaactcgactccctcgtccagcagccgcttaaccttttcaattcgctctcgaaggccgcccattcgcaagacgacctaacaaaagttacaaattgggtaatcgtggggataatttggataattaacggactcgatgataaatgggatgataaaacggaattgctgataattttgtcatttgtgtttccctgccaccttttttgccattcttttgcat

SEQ ID NO: 26524 - DNA, 1480 bp, Heterodera glycines
  unsure (1)..(1480): unsure at all n locations
ccctaccattcaaaaaggcaattcgttagagaatttttgtgcttttttctggcagcccaatcaaaaaattacagaaaaaatttcacagcccttaatttttttctaaatttttcccaatttcaagccattttgacttttcctgattaccgtgaaggagggctctgatcaagttggtgtataataattttttgatcagcattaaaagttaagcaagcatgaattatttgaggtttttaaatgaactttaaggtggtttttcatgtttgagtcaagacttttttccgcccttcctttgttgagtcaagtctgatcaagtgaatcaatctcgagtatgaataaatcaattcaattttcttgttgtgtgtggacaaatcataaattgagggtaaaagtcgacttaaaaaagtaattaaattttacgaatctttctgttaaatttggacgtttcgcgaaatgccacatttttgcactgtcgcgattgtttttgattacagtaagatgaaacagatttcaataaatcatttccatgcgacaaaaaaaagcttttctactgtaattttctctttttcccattcgccggcgacccccccccccctatttttgtcggggagtttattttaattctttcaatttttattaaaatgccttattaacttttaaatcgcttaacttaacagactgatgccgactggaacattgaagaatctatttctttttggcttttcccagtgcaacatttagccaatgctaatcggcaacatttgcttcaaacgaattttgatccaacgaatatttccgccgttttcgtcgttttgtccctcttttaccttcaattatcccacactccgttatttctatcccttggccattctttgcccatatttcctgtctatggcagtgcaatgcgttatcgaatggcattacgaaactgcacttgacaccaaagtttctcttgatgaagattttattccagaaatttttttaaatttaattttatttgtaacagtttttattataaaaagaaactttttaccaccataaaagaatgaaatatggaagattaattagctttaacttcgaaataaagtaaaattttttgagaaaaaaaattgtttttgaaaataaatttttatcacttttaacctttttttttgttgcatgttcaaaccactttagattttacattccgatcaaaatagataaaacaaaattttaatttaattttttcaaattaaaaaattctgtaaaaatagtcggatgagaaaaaaatttaaagagcccaaatcaaagttaatttttaatataataatgcacgaattatagttttgaaccaaattaaatatttgaaaatgttgaaaacatgctgcttgaaattacttatattttctacataaaaattgtttaaaaatttggcggcagtttttcgccaactttttgagaaaacgcataataaagtgtcgtannanattaattcganttt

SEQ ID NO: 26525 - DNA, 850 bp, Heterodera glycines
taaagtacattagagccaaatagggtattcatgatcattccatgcattcgaatcaattttggtcaataaagatagattttggtgagaatggattttcgacttttgttagaatttgggtctggggttcaaaattgatcgaaatggatctcatattcgtgatcagcgaccccgaatacccttggaaacatgtttttatcattaaaaacaaataaaaagttttatttttcatgtggtctaaactgtacaagtaccttaaaattgatttaaacaaatgaatgttcattttttctgtttttaagggaggaacgggcgcatttccgataccctcagacaattgatgacgccaaaaggcttggccgtgtgcttatccgttacaaagaccaacatttttacaccgttctttcgggcgtcgccgccatttatttgatgtctgttttcattaatgacaatatggtacttgtgtgttatctgtgggcagattttcaaaaatttttatgtttttcgctataacttttttctttggcattcaaatccaagattgttggtatcattcgaaagcttaacatgtttcgaatctaattctatgtatcacttcgcgattagacaattaccaaaaaagttatacatgaaaaacatgaaaattgcgaaaaggtcgaaattatgaagttttttcttaataaaattttttccgggctagaaaatcatttcgttttttgtaaggctaatagagcatatgaagagctttcgaattataccaacaatcttggatttggatgccaaagaaaaaagttatagcgaaaaacataaaaaattttgaaaatctgctcacagataacacacaagtaccaaa

SEQ ID NO: 26526 - DNA, 1683 bp, Heterodera glycines
  unsure (1)..(1683): unsure at all n locations
acatcgaaatctgcggggaaagccaattgacggtcacccccccaggcaacggatttggtaattaattgtgaaattgaacttataattaaagtgattttttgaattaggatggcattctgtgtttgcgaaatttcccatctccaagtgttgtcgtcccttcatgttctactttgaaatgaaagtcaccaaattgggaaggtaaaatgacatttattaactaattaaattcacaaaattcgcataaaattattgtttttgtgcattttttgttaattttcatatatttacatttttatatttttgcctcgattggattcgccaccaaagaaatgccattggacggagcaatcggacagcatttgaacagttacgggtaccgaagcgatggctcattaggctgcaatggtatcagtcggccgtataaaatgggatttggcaccatgccaatgccattcaacgcggcgattggacaacagagggaccgccgctacgttgggagtgccaattggtcatttccattggaatttgtgcccgtgccaatgccatcggacggcgcattggcattccaatcgccagcattttccaccggagatgtggtcggatgcggcgtttgtttggccactcgacagatctttttgacgaagaatggccgacgaatcggtgggccaaacacaaaacgaaaaaagcaaataatttaaatttcaatttgtcagatgactcctcttttttcactacaactcccatcaattctctgtttccatgcgtttctctgtggactggcgacaaaattgaggcgaactttgggccaagtttcaaattcaatttggccactctttgaagaaagctgaagaaccaacggaaagggcgattaatcatttagttaattaattcattatgcatttttcactttattttttcacatttattttcagttttttatattatttatcatgcgtatttgttaacaaataaattttactgttctttttgtttgtcttcattttttcatgtaaaaatttgatggaaaaaatggaacaggaagaaactcttgaacctgaagagattaaaaacttaaagaaatttttaaaatattaaattactcaaaaaatctctttttttctttcccctcatttatgtcccattgtgttacaatttaaaacgtttttctcaaaccctttgcccaactgtaaaaattaattaaaactaaaaatacatatttctatcatatgaaaatattaaataaaaaaagtctgtaaaatataaaataattataaaatttttattataaaaatgaaaaaagaagaaaaaagcttacaacaccttcgattcccaggacgtctccgttccaagtactaagaaggcccaacgttgcttaacttgccagatcggacgggatggcgtgctttcaacgtggtatggtcgtaagcgaaggggacccatttgaaaacaattaaataggtgtattaaaaaaagaattggagaatattgaactatgagaagcttaaacaatatttcaacttcgacaaaagaccgaaacgccttaagtttttagatattttaaatccttttttctttttatttgattaaaattaatttttgttttaaaattattgtanggaattagtccaagattttggtgcctgttaggaaatgaattttaatttgtggacaacatcataaatt

SEQ ID NO: 26527 - DNA, 1935 bp, Heterodera glycines
  unsure (1)..(1935): unsure at all n locations
tatatggtaagagcatactgtagttgagtcatacttcccccccccgatatgttcagagaagtgagcaaaatcccacttccatccgtttatgtactgtaataataaaaatcgttaaattgtatcgttaaagaacacataattctgtcaaaatgatttgatatgtatactaaatcaaaacgaaataaaaggagagcgcagagaaaaatacgttttcttttatacatatttgaatttttttgaaataaaaaatttttcttttacattgaatttgcccgaatttacatacaggtagagaaaaaactaataattaggaatgggaattttatgtaataaagatagcgaaatatttaaataatatgtatataaatgttattatatgtaaaaaaaacatttataaaaaacaaaaatatgtaaaagatatgtaaatgaaaaaaaaattggataatttcccgtataggcgaaaatagacacaaataaaaactttaaaaccctcatgaagtttttttttttaatcagcatttattattttgaataaattaatgtaattggtagactcgaaaccccaatgtttgcattaaaatatattttgttttgtacaggcgcatcacttaagtgcattaagtatattaaggttttggaaatttaaaaaatatatatttttttgatattttaattttctgcttatcatttataaaccgtacatcccaaagagctgggaattttgtaaggccaatataaccgcaacgttgttcgtcgaattttctaatgatcagctgacacgtctccatgttgaacggtttagacgtgccgttttttaggactcgctgtagttttaatggtgaaatttgaccgttccggtcataatcgatcagtgcaaatttctgtgccatttcggcagatgttttattttcatcgatgttttttttcgatatcactgaaaaaatataaaatgcgtaatatattaatattttttttttaaaatgatgctatatttttttaaatataaattattataatgttaaaattttttccaagaattatatgactttagcaatacccaaaagaaaaaaagctcattttctgacttaaatcttaaatttcactagcggttcgactctcaataaaacagctttgccgtataataatttaaaacagaataataatagcataacaaaaaaaaatttttttttgtttgttaaaattgctcgaatcgatttgttttgctaataaatatttaagaaaaaaatatgtgtttttgatgtcctgcggcacagacaaacttttcccggttaatattgaaaagtttagtgcaatttgttacaaataaatgcaataaaggctgttttgaaatgagttggcatttttcgtttgttttttttgcaaaagtgtcatataagtaaaagaagtaaaagtaagagcatcaaacttgaaaaaggtcactacgttgatacattaaaataaagaaattttactctctccggaattgataaaagtttagtgcaaattgttacaaataaatgcaataaaggctgttttgaaatgaattggcatttttcgtttgtttttttttgcaaaagtgtcatataagtaaaagaagtaaaagtaagagcatcaaacttgaaaaaggtcactacgttgatacattaaaataaagaaattttactctctccgaaattgatagtttatttattaaaattagcacttaattaaatatgggctatttttgcgccagttttatcattaattttgcatcaatttttttttataaaattgctggcgcgagtaaaatagaacgatttcatacaaatttattgataattttgcaaggaattaatttattaatttaaaaaaaaagctaccgtatccattttttacaaaatttgctggcgtaagtaaaatagaacgattttcatgccatttantatttattttgca

SEQ ID NO: 26528 - DNA, 770 bp, Heterodera glycines
tggtggaaaatcgcaaaattttgtcttttttggacaaaatcttgttaacaaattgcatttaaaattacaaattttttcccggcggcgcctaccggcaccgccggaccaccgccccctcccctagttacccaaaaaattgtttttgaaaaaagcgcgcctttaaaaaaccaaaaaaaagtcattataagggatgtcaaaattatgtacaaatatgtatgtaaataaaatatttaaattgttgttttttggaaaaaaaaaattttcgtagagggtaagataggcacaaaatgtaacctaattaggcttatatcgtacatccgctatttgaaggcccccctctggtagaaggcccccctccaattaaaggcccctttttggaggggttgaacaatagaaggcccgtgccttcaaatagcggatttacggtaatcatcttttagtattttaaaaattaatttttgtattttttattggtacaatttcataaattctcaaaatatttaaaaaaatgaaaatatgtacgaaaaaagtttaaatatattacaatatttattgtttaatagataataaataatttagtatttttgtgttaattttttaataaaaaaggtttttatcaaaaaaattaaaaaatacaggtacaggcctggatacaggcctcgagaagcctgtatttttcctgtacctgtatttttctgtacttttgtacaggaaatataggtacaggtacaggtacaggcttttttcaaaatgtcgatctctattaatta

SEQ ID NO: 26529 - DNA, 1619 bp, Heterodera glycines
  unsure (1)..(1619): unsure at all n locations
gctgcacagctgcttaactaagctgtgtgcatttagcctccagaccgccaaactcaattgncaaaatacaatgcggcattgatgaattttcttggcngatgatgattgaatttgccgcctggccaaccaaatcctcggcctcagcaaatcactcctccgccactcaacagcgaccaacaaacggtctttgatgctgttgttaaggctattcagtcggacccaagggattcgactgtcccccgccgtttcttcatatacggcgatggaggcacaggaaagacattcctgtttggccaaattattaggcgcttgcgaaaggccccatacacctacaaagtgcttgctacggcatccactgggtgtgcagccattttgctgccatatgggaaaacagcccattccacgtttcgtctgggtagagaagtgtcattagacaaactcccaagcattccgctggagagcttctttgcccgtcggattcgtgaggcccaactcatcatcattgatgagatcaccatgcttcacaacacggtgattgaggtcatcgaccgagtgtgcaaagagatggcaattcgccagcacaaggatctcctcttcggaggaaaaacggtcattttcagcggtgacttcaaacagtcgctgccggtcgtgcctcatgaaggcttaaccgctcaggtgacagcctgttttcaaacgtctccgttgtttggtcaattcaccacgatgaaattgaccatcaaccagagactgggccaaggtcagcaagcgtacttgcaaatgtgccgccaaatcgggctcggagaaaccggagagcacttctggattcctccgcagttcctcgttaagagcaaggaagagctgatagactatgtctatcctaacttccaacaactccttggcaatgacaaggagctgctcaatcgtttgattctcgctccgcacattgacacgtgcgacgaagtcaacgagatcatgatggcgaatgtgccaggtcaagtgcgggaatacttgtccacggataagccccttgacgaccgcccactggacatcgatgagatcgagtccgaagtggctgcgttgaaccggcgcacagactcgggcatgcccccgcacagtctccggcttaaagtcggatgcgtcgtcgtccttcttatcaataaaagtgataaggaaggactgatcaatggcacacgcatagttctggaagaacttggcgatgatcgcctcattggtcgtgttatcaatagcaatgctattggcggccaagtgagattctttcttgaaagaacacgaaatgtctatgaagacaaatcgcctggcggcataaaatatgagcgtttgcagttcccaataaagcctgcattcgctatgaccattcaaaaaggtcagggccaaacaatccgcactgtcggcattgatctggaaagggaagtattttcccacggtcaattgtatacggccttctctcgggcaacagacggaaacaatgtccgtgttcatgctcccaaccgggaaatagatgcccaaggccgagccaaagtgctgaatattgtagctactaatatgctcaagttacaataaatggcttagtccagagcagtgggcacatggttttggag

SEQ ID NO: 26530 - DNA, 1565 bp, Heterodera glycines
  unsure (1)..(1565): unsure at all n locations
atattttacaaagaaagacactgttcgatgggtcgacgtaatagacaaaataataacaaacattaacaacagtgtgaatagaacactgggagtcatcccctcccccctcccaatgcttttccaaccctacaaaaatgtgttagcagctgcaaatgcttctccttttttgctgatgtgcagcacagcaaaaagagagaaagagagagagagagagcacaagcaaaacacacactctcacgcccatttctcattaaatgtcccggcttttccttcccctcatccccatttttctatgggtatgctatttttatggtttttactccattttctcacacttgcgccacccaaataaacacatatacacacgcacaaaacacaaaaacgccggggtggtgctggaagctggacggacggatgggcgcccgaggggcgaaaagggattaagcagcatttggattttcatgtcatttaattaaggggaggggggagaggaagcggagacgagaagagagatgggacactgtggtgtcatggcgctgtggccatggccacggacggcacaaagatacaaaattgtgccaagtgtgccatcattgtggtccctcccctgttgctaacgctgcaactgatcctggttaacagcatctggtgatgctcatgaagcattttcgaggtgtactgcacccacgacgaagcggaaataaaaatgaaaaattagtaaaaaatgaatgaaaaagtaggtgttggcattggcgttattggcatgatggtcaccgacagaggattaatgaatggattagttgcaaaagcataaatgtgttgttagccctagtaaagggttagttgagtgagcttatgcgtgagtttgttgtcaggggcttctttttacgaggaaattttaggcaaaaatgaaatggcatggcactaacagtctgaggattatgtgctgcagaagcttggatgatcttggcaattaattgaccaatgccaaacaccacttacaattagaatgcaaaacggaaatttttggatgtaataattacaaaaaataaataaataatttttaattagggttcgcctccgaacctttgtggattaaaaatgtcgataaaatgtcttaaaaaattgatgagttattgggtggtaatggtaatacctagggatatgcgagaagtgatttttaccgagaagcgagaaccgaaaccgagaaatgatcccgaaaatgatgcgagaaccgagacccaaaaaaacccaagaaatttttctcgagtcgaaaatcgagactctcgcactttgttttcaaaagacatgaaagcatgttcnnctagggttttcggggtcgctgatctcgattccggcatctattccgaccaatttcgaaccccgaggctgtattctagctaacgttatggagttgaaagtattagcatcgctgcatttttcattgtgaaggaacatcaacaagaggacgagcagaagcgaatggggcgaacgcacaatcacagcgatggagaccattatcataagtataaaatagcggacaaatgaatgcgcggaaggaattc

SEQ ID NO: 26531 - DNA, 1138 bp, Heterodera glycines
tgaccaaaacatgccaagaaagtgcgaataatttcctcccaccggtcagatgatttgatacaattttatctttgattgctttcgagtcgtctttgagatggttttctttactctttctctctctacctctctctcgccctctaactcctccctttccctcttccttctcctttctctccactctctctctctccctttccccctccattctgtctctcctcctcgctctttcccctgctatttctctcccgctttccttccctctctctccccctttctttctttctctctccctccctctcttctctccctctctctcccctttcactccttcctttcccccttccttttcttttctctcctctctctctttctcctccctctctctccccctttctttatttctctctctctcccctcacttttgcttcatttacctctttacttggggcgtcatttcccactgttctcgtaaacatctcctagaaggaaaagaagaggcaattccccgtagggctgaataccccgatgatggaatggaatagttacgtaactgtgccggccgattcgctgaggtcaggtcaatgggaggggcggcggacgacggccttcgggggaagttcaaatgaagcggggggggggggggagattggacaggtaattgggcgacgctgtgccgacccttcccaccgcttggctcgctcgactcggctcggcccgacctcactttggctgacgagtgacaacaatcgccgtcctaacccgtccccccccccgtcggattgcgtcgccctccgacgatctccgcccccgggggatgaccccggcacattcgttgcccgaaagggcatgtcctcacatcagcagagattggcagattacgtccctctccaaaatgcacaactaaatcccacatttttcttttaaaatttagattcctaattgctttccctcagatggattctgatggttgtccaatgggacctttcactgcgaaatgtgccgattccgcgcacttaacaccgcagcaaatgctcaaaactgccatcccttcgtttccggccaatttcgctgcgcaacttcccaattctcggccaaactttctaccgacggccgattcttcatcattctcggccaa

SEQ ID NO: 26532 - DNA, 1350 bp, Heterodera glycines
cttaggctcaacctgcccacagggccatttttgagtaacctggatttttcctagacctcgatttttctggatttttgtccaggaaatccaggtccaacttaaaagccctgaaaataggggtctaaaattcctaaaatttaatggggattccatcaatttttcgaaaaaaataggtaaaaattaaagatttcgtgtcaattttctgaatgatccctcaaaattcataatttttttttttgatttttttggcattatatcctttttaaatatttttacttatttatttttatttgtacagaatgcgtttgggacgttactgtatggccaacacagccaaagttgaaaatctcgccccaaaatccggacaattcgccaaacatttgtgccaaactgcaccatcttgacctgaagggcaagaagcggctctgcttttatccgcacacaatcatcctttggtgggttggcaaaatgttcaagttcaaaaattagagtctttacattaattgactggttttaattaattgttgagcattaactaattagcctaattaggctctaatttcgtcattccgtccagtgacctgtcttcaaacaaaaatcttcttaaataatttgtttaaaaaaacatggaaattttcaaagagaatttaacaaaaaatttgcgtttttattatgaaaatgaagaatttcttaaatttattaatttaatgcttagaattaatcattggtaattttacccacaaatttttcgaaaattgaaaaaaattcgctttaattaatgacaattattttaatgcctgcccttttcagcaatgttggcattgagccggcactctccgggttgccaaagtcgggcatgtgagtttttataaattaaatttaaaattatttaaatttttcagccctccatttcggaccacagattttgttgaattctcacgccattacattgcctcatatgggtcccaagaaaaattcttcatcatgcgcattgggcgcggctcgccgatgggctcatgtgaagtgagtgaattaatacacaaacactgatcagaagcggccaggtctgatcactactgattcgatgattatcacactttctgcccattagtgatcatttatcttaagtgattaatgcatgtcctaattagttcatcgatcactatgttcggtgatctgtctgtcagctcattcaaacctcattaattagtgcatgtcctaatcagttcattcaatggatcagtttgtgaattctagtgatatatcagagcctgtcttaattaattagtgcatgatcagttcatcgatcactctgtgaactctttgattcatttcaatcatctatctgca

SEQ ID NO: 26533 - DNA, 1055 bp, Heterodera glycines
cttaaacaaataagtaaatggtttatgaaaaatagaattaaaaaatgtattaataatttttaaaaaattattaaaaatgctttcttttattaattaaaaataaactttgaatttacaatgattaagtattattgtattgaaaataatttttttgacaatttcaaatttaaaaaaacattaaattctttaatttaaaaaaaaataattatttttaaataaaattttcaccaaaaaataatttaattcaaatgaaaattttttatttattattaataaaataaaaatattttaaatgaataaaacctgtaaaagtaatcaaaaaatgtacagaaaaataatgtacaccggccggattcgaacctgccgccccccccccagaagatgactcagaatccccagtcacacagggattctgagggcttaacgatgtcaaaagtaaaatctgatcacgtattcgtgatcagcggcccaaataacccctaaagacatgtttttggaagatttttgtcgaaaaaatttttccactcaaaaatcctatgctcacccctttggtcccgaatctcaaaatcacttttatttttataaaaattcttaaaaaagagataaaaatgccaaataaaatttatataatagagcaaaaaattgcggatttttgtagtattaaacatttccagaatcacttttcagaaccgagttatgaatttttttctgaaaaatcgaaaatttccagaaattctggaataactatttttatttttgaacattataaaaccaaataaatcccataaaattctcccgattttttgctatttttaaggctttattcctgtaaaattgatcaacccttcgatttgttatgaattttcaaatattaggccaaaatcccgagggccaaaaaattgccaaaaaataaagaatttttaaaaaattccaaaaatcatgaaaacaaaaaaccaacatcatattcgtgctccgcacctccaaaataccccaaaaaaatattttttccccccaatttccaccccaaaaaaaaattcttgaaaatttcaaggggg

SEQ ID NO: 26534 - DNA, 1229 bp, Heterodera glycines
tttttcaaataatttttaattttaataaataatcccagaaaaatgctattttttttttggagaaaattttaatgcaacaaacgctctcgaacatgaaagaaagggcggtgcgccgtggccattttatttttcaaataatttttaaatttaatagatattccagaaaaatggctatctctttttttgagaaattttctatgcaacaaacgctctcgaacatgaaacgaagtgcggtgcgccgtggccattttatttttcaaataatttttaaatttaatacatattccagaaaaatggctatctatttttttgagaaattttctatgcaacaaacgctctcgaacatgaaacgaagtgcggtgcgccgtggccattttatttttcaaataatttttaaatttaatacatattccagaaaaatggctctctttttttgagaaattttctatgcaacaaacgctctcgaacatgaaacgaagtgcggtgcgccgtggccattttatttttcaaataatttttaaatttaatagatattccagaaaaatggctatctatttttttgagaaattttctatgcaacaaacgctctcgaacatgaaacgaagtgcggtgcgccgtggccattttatttttcaaataatttttaaatttaatagatattccagaaaaatggctatctatttttttgagaaattttctatgcaacaaacgctctcgaacatgaaacgaagtgcggtgcgccgtggccattttatttttcaaataatttttaaatttaatacatattccagaaaaatggctatctctttttttgagaaattttctatgcaacaaacgctctcgaacatgaaacgaagtgcggtgcgccgtggccattttatttttcaaataatttttaaatttaatagatattccagaaaaatggctatctctttttttgagaaattttctatgcaacaaacgctctcgaacatgaaacgaagtgcggtgcgccgtggacattttatttttcaaataatttttaaatttaatagatattccagaaaaatggctatctctttttttgagaaattttctatgcaacaaacgctctcgaacatgaaacgaaatgcggggcgccgtgggccttttatttttcaataattttaaaatttaattgatatccagaaaaaatggtatcatctttttttgaaaattttttatgcaaaaaacgctctcgaaaatgaaac

SEQ ID NO: 26535 - DNA, 1674 bp, Heterodera glycines
aaatggtgtgcaaggtggagatggttccggaggaggccaatgtcaagcgaattcatgggcacacggaagaaattcatggtcgttgaacgagtctgggggaggcaattttctaattgaaaaatgattttcgtttgtcgcggttttccaatgtgcggccttttcggggaatgtactggggagcgcaggaaacccatggcagggcgaaaaatggcagcgcggacttcgaagagagcattatgagatgaagataatggtggaagatgaggggaaaagcaccggggcatacatctaaagggaggcgacgaggaagacgaagcctaattagcgctaattagtgttgtaacgaaaagtccaagagagtgagaaaaggagagagtgagaggcagagagagagagggagtgggaaaatgtgaggggagagagagaaagttcgggaaacgcggggcggggcaattatccagtcatcagagaaaggtaagaacgctcagccgagagatctggtcccgagtgtggtgagcataattagaattgatcagcgggtaatatttgccttggtcggacctcgccttgtctccaaagtttttggaaaaggcgcgccgaaaaaaaagtgatgtgaaaaataaatctgaatttctaataatattcgatcatttgagtcaaaaaagtgattaattgtttgaaataactgaaataaattcgatttgaaaatttttattaatttaatttagctttaactttaggactttataaaataaatagcaaaataaaaattaattttgtattattttcaattgaaataaattaaaatttgaattttcttgaattttttgaatttttaaaaattcccttctgtcccggtaccggcttctaagttccggcttctcaagtcccgttttgtccaaaattcccagtcccactcaactctagtttaaattgtaaaaatttccaaaaattgcttaacaaataagttgtaacttcaaactttgaactaaagacatatcgccaaaatattattaatttttttaatttgcgtagtttaattgggacccacgcgtttcggcgctcccgtttcggcgccagctcgtttttccacttaagcttttttctttggcatccaaatctaacaatcttggtatcattcgaaagctcttaacatgctctattagccttatcaaaaaccaaaagtttttcaagcctgtaaaaattttattaagaaaaaacttcaaaaatttcgacttcgctccgaggccccaagaattttcggaattccgaggcccaatatttttcaatatctgaatccgttccatccctgcccccatccctttcttgggacagtattcgattccttcatcccctctggacccaaaggactagagcccggaaatttcaaatttgcggatcctgttgcaggattggaattcaaaaaattttgcaggaccggacccggccggattaatcctgcaaatcctgcattttaaatttgcaggatcccgcgcaggattgcggattcttagaaattttgaaaaaatttcaatgaaatttcccttttcgcaattttcacgaataactgttgtgataattgtctaatcgcaaagcatagcttacaaaaagcttctaaatagattaagctttccaacgacaccaacaatgttggatttggtttacaaagaaaaa

SEQ ID NO: 26536 - DNA, 1862 bp, Heterodera glycines
tgttgtgccgcgtgatgccacgtccgcgggattatcttttctgaccaaatgtttgacttcaaactgtccacgtatttttgctaatcgatttgaaacaaatcgatcgcatttattatgctccttaattcgttcaacggaacacaagctgtcagtccattctgtgttggtttgagtttgagatgttggagcacgtactttaacaacttcactcccagcgttatggattgtttccatttttggaattgttgccgcaacatctgatatgttggagggcttcaccaggctctttgcaaacaccaaattggcgctcattttttctgtcgattcccggatgtaaatggcaacgcctaagccttttccgctcgcatctgcgaagcaatgcatttccttgtccacttcgtcttcgttgtcgactcttcgtgcgaatcgaatttggacctctgtcccctctttcgtttgccaagtctccatgatttgattccattcatgaatcaattcttcttccaatccttcatcccagccgtttttggcttcaaaacgtttttgcaaaaaatgctttgctgggagcactgcaggcgccactaaccccaaagggtcataaatttttgcaatgtgtgacaagatgttcctcttcgtgtgctttccggcaaattttttaaatcggaagcaaatttcatcatcctcattcgtccacggaattccgagaacttttatctccttttggtttttggccaataattccacaggaaggcttcgtatggcgatcggcttactgcagaaaaattcctgcagcttcattcccccttgacggaacagctcgatcgattcgtggcaaatttgcgccatgtcttcattcttcttcacattgatcagtatgttgtccacgtacaaattctccattatggtttgcggtagaaccgtgtcgtagaatgaaagatgttcgcggatggttgcatttaaaagaaatggtgaagttgtcaatccaaatgaaacccgacagaaccgaaacacaacggttctcacatatgttgggcttgaaatttctgtcttttgtggatcctccagccacagaaatctggtcgcgtctctgtcctcctctctcactgataattggaggaaggctttttcgatgtccgccaggattagatccttcattcttctccatcttagaaggatcccggtcaattcgtttagcaacaacggccctgtgtgcaagcattcgttcaacgatggggctcctttgtggtttgctggcttcgcggatgcatccatcacaattcttatttttgtcgtggccttgtccatttttatcacgggccgatgtgggagataatgtaccggtccagttgtttgtgttggatccggcactctttcgattatcccgttcctctcccactcattgaaaattttttggtattcgtccaccaaattcaattctcgcaatttcttcactgtgccacaaagtcttgccctcgcttgttgaaaatttgtcggcaaatcctttactctttcgttccatggtaggccacattcatatcttccttctttgaatgtcaagccctttctgaacgttctcatcacttcttccttgtcctcttcttcaggattgtcgctcaatccgattatgttcagcccgaaaaatgtttttatctgttcttccatttcttcgtcagcatctcttctgctactggcacattgaaagagacttatgagtgctccaatgaatgtcacttgcacactcatgtccattgaggcatggacttggccataacaacttatcatccgcccgacacgaaacaatgacaatgtgaatccacttgggcacttttctgtttcgtctctttatttcagggcatgtctga

SEQ ID NO: 26537 - DNA, 1859 bp, Heterodera glycines
tagcaatcggttcctctgatctcttatgtaagaatcgtggtacgacttttgggggatttgcaacttggggacccgacggatcccgacatttggggacatgacttttgagaacccgacatttggggatttcaatgctaaaaaatattcaggctggaactaaaaaagaccaattttacccccgtttttcctggcttctccatgctaaattgtaggaaaaaaaattttattttgtgtgtttgcgaacaaaattcgggactttcctttacatatttttcatatttcgtgattttatacatatttttgacttttttttgacattttttacatatttttagtttttcgaaggtccatctattccgtgtgttcaaatttcctttccacaaaaatggtcgaagcaaattttaaagatgcgcgaaggcatggtatttttatgcgggagagtcgatgtccatgccccgtcgaaaaacttgtggccaccaagttcagcaaggtcaaattcaaaaaccgattattgtttgtctcttctcgttattatttcaggtgaagtgcaaatatgtagatgaaagctcgcgacattgttgctactttatgttagcctttttcatcattgtaagccctcgtctctaattaaaatttctccattccccccccccttaaggcatgcctcggattgactgcgctgtttaccattcttttcttcaattctacaacaaatcgacaatatctttttttattgcccctctgcttgctttcaatcccaattgtcgtcatattatcagtgctctgctgttacaattcatgttatggtaaaaactgcggataatgaaaccattaaaaacagttaaaaatccgcttcatcccccgcaatttgcagaacgcaaacacaccgcgcttgaagtgctgtacaaatgcgactcgtgtggccatgaagtgcacaaatgttacgaatgctttggtacgggactgaatttcctctaattttccgctttgtcacgtcacatatcttcctttttaagtctactccttcactttgaccgataacagagcgtatcaccaactcatccgtggccgaacttacaatccgtggggacggtacactggaaatgtcacgaaaacggtgctgcacaagccaatgaccatgaccaaatttgaggcggtggagcaaaaattcgatttgatgagcggtgttcagaaggacaatttcaaaaccagctgggcatggacgaacgatttgataaggcgccttgaataagccgaagtgttaattaagttgacaccacttttttgcacaaataatgtacatattatctttctgtagattaataactttgaaattaatacgtgactttcatgaaaaatgaatggtgaatatgaaaaattgtgtttacagttttggaaaaacggctgacataagaacggaattgagaaggcatcacaaattcgctgaactgctctatcgtgattagcgcagcacgcaactgaatttcaattacggaaccccgtaatccgtgatggcgattttctcaattacggaatacgtaattacggaggtccaaaaattccgtaatttcacggaatccgtaactccaagaccccgtaattacgtgcatccaaattatagctaatactaccacagaaattgcttccccttgtcgggatcatgagtttttatgggggcggcatgacggaaaagtaccgatttttttgcggcgcgctttttccaaaaaacttttgggaacagggggccggctgtggtgataggtgctgcctgggaaaaactggaaatttgaccatttttcagcagttttccactgaaaaatggcaattataggtcaattctgcgcgttgaaaatcatcat

SEQ ID NO: 26538 - DNA, 1821 bp, Heterodera glycines
agacaggtcggaggtgtccagtgaaataatgcgcactgtccgatccgccattccaacggtgagaaatcgcgagcggagttccccctccggcacttcgctcagactcatgcacaacacttccgaagtcatctcccgacgctcggaatactctctgagttggttgttcatgtccagctcaaagtacacaatttcgcctccaagcagtgagatcacgaccttcaaaagcacaacagtttcctttttagtaaggatgtctatatttccgctcacctgtcttcgattcatcgcacactttgaaattggtcgttttggaggcgctctccattcgttgactcgccgatcagcacggatgtgccgaattccggatgggtacacttggagcaatgaatcttcaccaatcaaaccacagccaagggttggggtggtgccgagaaagcccgagtcggtcacttcctccacagtttcaccgatagacagcaccaaagtggcatttgtgaaggaaacgatgatgtgagcatggaaagggtctgaaaatcaaatgaaatcgaaattcttccactaaaaataaatgggtaccgtccacatttttcttcactgtccacaccgccgttgggtttccgggcaattccgagacggccatttcggacacttccaacccgttgcgtaacacgcgcagcgtggaacgcggccctcgtccacaaagtgcgtaaatttggggcgcatcttcgttggccaaatcggcgatcttaagggaacaaagaacataacatatgccaaaagttggaaaagcattaaaaggcacgtgagaagtgatcatcgggttgagactgtcaatttggtcgacaaggatcaaattttgaagcccgcgtgtgtcgtagaaaaaggtttctccctcatccagaggtatccgtgaagagaactcgggctcatcatcgttgtcccccaaatgagcgatttggtagagatggctaaaagcaacaaaaccaattaaaaaatgggacagtgacacttaatgaattgtgctcactgattcccgaattcgctggccacaaacagaaagccggtcttcaaaatgcaaatggaatttgccaccggcaaagtatcgaaatatttgatgcgcatttcggtgacaatgtcggcatcggagtccaacgtcactttgaacacgtcgccctgctcggattggaccaggaaaaagtacaaattcttcattttgtgcgtagcggcacaaacgatcataatcggacgctcactttcgtcgaggtcattctgaatgttggcaatttgatgcaaaatgaaaatgcaatggcaattacccgtcgcctgggaatgggacaacgaatgtccggctgatcgcccaaattcttgtacaccaaataattctcgcagcaaacgatcactccactcggcccgtcatggcccccggggacgccaatcagcatatttccctgaaaaggtaaaaaagaagtcaacaaaaccccacacaatgtttaccagtttaatatgttgttattaattgtatcgtttttagcaaaatttaatttatcatagcaatgaagttttttcaaaataaagaaaaaaggttgatataattcggacaaaaaaaaagattttctcgtctcggccttttttttctcttcggcattattttctttttactacgctatttttcaaaaaatggtaaaaacaaaattttgtgccaaaaaactcaaaatttttacgattttgaattgcatttcgttaaatttttcacaaaattctattttgtcttttcctattcgttaaaattttaagaaattgaatttcgtttttctctttcgt

SEQ ID NO: 26539 - DNA, 1203 bp, Heterodera glycines
gaccaccaccgtgcacaaggtttcccgagcgccgacaaacaaatttttttaaactttttgcctttaaattattattttcctttcgatgggactcagtcgtcccagtgcttaagtggcttcggttcgaattcataccttggtttttagatttatctcgtcaaaagctgtcgaatgatagtaaatttgtccagctttggccctttgaaaaggttaggagagccctattctgttcatttttccactttttgaacctgttcaaaaatcggtttaaagttgatgcgcttaaaaatttttgatggtttaaattttgaaatcgctcaaaatttttcaaaaaatttttcctcttgaaacgaccgtgcccacacacacacacacacattaccaagccgctgtcctcgttgaaactgtacaggtccccatcgtcatgttgaatggtgcccagcttgacgaccagcgggaagccggtggcttcaaagtgtgccttggcatggcccacccctttgatgccggcaattggcgcgtacagaccgcacgcgatcactccgtcgctgaggttcagccaaaggttctccttcaggccacaccgggcgcattcccagtccgagtagccaattggtgggccggcacaagtaagctaaaggcatggacaaattttaaaattggaataaatttttaaaaatttcaaaattatggactgtccccctccacccccccccccaaatttccataaaaattaggtaagttaaaatttgcattttcgataaaatttatgctaaataatggtcagaaattcaaaattttccccggcagcgcctatcggaaccgcggggggagcccacccccccccctccctgctcccaaaatttttgtccaagaaaagggagcattggagaattatattccttcctcaatgcccctctgacacaaaaaaatgtttaaatttgttttctcgaaattttttactttttttgaatttttttttttggaaaaaatttaacaattcaatttttttttaaattccgagggtgctgctacatccaattttgacccaaacaaaatcacacatcttcaaaaaaaacaacacctggacaaggtgttttgccgcttttgcaatccttcgctgtttgccgccgtcccatggctgtacgcctatgccactgtcaatttgttgctgcacttcggcaccggcatgcgcaataattt

SEQ ID NO: 26540 - DNA, 1569 bp, Heterodera glycines
aaacggcctggcctgcccaactacacccaaaacttactcatatctctgaaccaagacaatgtacctattagagcccgccgggatcggaactcccgcgggtttttaagggattgccgatctcgtacttttttgcccagcgggttttgggagcgggatttttaagggattcctggtccccgctcccggaaaattttgaactcccgctcccgtaaaattattttttaccgggctctagtacctatctattttttcttgttaaagttcattgccaagtaaactttattggggccactgatcagcggcggcaaattctgatcacaactcacaagctagatcatccaccacccaatctcgaaatattaatagagttttcaaatacttaatttgtattgctcttttacaactgatcaataaataaaaaattattttgcataattttccaataaaaatcagtgggaatttgcgcaggaataatccacaagccctacgcccaattaatccgacaaattctcgcacaattttcacccgtaaatcgtctccaaatatgtattatgttacactaagattttgcaaaatccgatgccacaatttccagtttgggtggcacagagaattagtgccccccccccccgcccataaaataaagcccccttttgtgggggttgaaaaaacaaatcctccagggctttacgtatgttggaaaaatgcggtgattatctgctgttcacagcatctgtcagtcattttctgttcaaaattcaaatcaacattttgtttaagactcgagatcaagacaaaaacatataatataatttgaaaaaaaagttcgactcgtcaaatagccgaatcaattttttacctgtttttatccaggactatctgattttgatttccaaaaattatcccactctgcccatcatttagacctttttttgagttctctctgaacgcaaaaatggaaaaattctcacagtttaaaatttaaattcaaatatgcaattcccacatataaggacaaggacaacaaaaatgatgacaacatctgctggtgcttcactcgtattatttgtatctttagggggccccggggggacaagtgaaataaattgtggttgtggcggtggtcaatggccccgccaggcacggggttgggccccgaggggccggggacagtccccgcggggcaaaacaccagcgaccgacggacgacgcactccctcaccccatttatggtgaaggacgaaagtgtgagaaaatccacgatttctacatatataagcatggaagttttgtgcccgaggggtggtggagggctgggctttactccggcatttcgccgccaaatttaattatggacggatgaaatgccattagttgaaagagccataatggcaaaccgacgagggcacgacaccagaggcatgctggatggggatggacaatgatgatgattattcatcggatgaatgaatatgtggaggatgtcgaggacacatcttcgagagcgggactcagagatttgtctcgggattcgaacaataattctccgagaaatgattaatttaatta

SEQ ID NO: 26541 - DNA, 1419 bp, Heterodera glycines
taaaacaaacatttcaacaaattttctgactttgtcagcttaatttttaaaataattttatgttgaatttattttttgtctaattgattattacggaagtttttagagttattactgtgtttaaagattttaagtgtcttggattaatgaaaacaaaaattttattttgtgtggttttatattgctggataatccatgatttgtcttatatatctaaatatttttgagaattcgcatttaaaggatgttattagtattttattttaaataagttactggattcttacgccatacatgtttgacgatttttccttgaatatttttaaaaaaaaatttgattttatgtcttttaataagaataggttttataaaagtcatcctagaaaccccaagccaagtgaaaaatgcttttttcgtgcttaactgtgcgtattaagtgcgcaaaaatttaggtttttacctaaatttcccagccctaattataagtactttaattaatatttttaaaggcattttgtcattttgatttttaaataaattaaatttcgaccttttgttcgaattcggatccagggttcgaaaataggcgaaatgggtttcatattcatgataaacgactccgaaaaccacaaaaaaacatatttataaaaattcattattttcaaaaaaaagggggggcgaggatcggaccgttatctagaaaagttttgatttttgattattgactaaattctgatttcttaaagttattttaattttgaaattttatggcataatgtcaatattttatctcaatttttattttgaaaaatgcggcgccaaataatgttataatcgataatggtaggcgaaaaatataaaatctttgaaaaatcaaatcgaataaattgttttaaaataatacattttaaattagaagcaattttgcaaaatgttctgttttttactacgaaatttgattttttgtaattgagaatctgttttttttaattttcaatccgctccctggtgtaaactgcaataaaattggaagaaaattaatattaaaaagcaaaatatatataaagatgaagtggagttagagagaggtggaagggcccatcgggcggggcaatgccaaatggtgtgctgagataatgccaatggtgccaacgagtcagcgtcgttttgggtttggttttagaaaacctttaatttacaaataataaaacaaatataaattataataattcctttaaaattacacagcaattcatattaaaggaagttcctcgtaagatttagaagaggaaaataaggctccctattatttcgtcactgatcgtttcgtcactgttcagttcgtcactgttcagttcgtcactgatcatttcgtcactgagaaatttttttaaaatttgtttggcaaattgtcaaaac

SEQ ID NO: 26542 - DNA, 1266 bp, Heterodera glycines
ttccgcccactgttcttcgcattggtgtcgcttgtcctttttggcctaggcatagtggcaatgctttgctctgtgtacttatataaagtgagcgagcgtaacgcgtggccacaaaaattctttcccggcaaaattgtgaccaaaaaattgcttttaaatcaaaatccgatggattttttgatcaaattgagatttggcttttgtcactgttgagtttctgtgttcgcgagtttgtcaaaatatgtttcattaacaattacgtgattatgtcatttaccttatttcgttttcagttcaccgtctattttcatgccctcccttctgtcatggcctggtgtgcttctgcttggttctcagccgaattgctgctcgattggacggacttttggatttgcgtcaacttccaagcggatcgcacaaatgtgccgttggtcagtttggtgagttcgaaaattcaaatttttcgaatttcagattttgtttaaactttgtttgcatacacgaaaacgaacgaaaatgcattttttttggtgtcgaacccgggtttggagatccgaaattgttcaaaatgtgattgtcacagattcatgttcttcagcgaccgaaaagccttagaaaattattttgagtgactttaaaagttaatttttttttttcaaaaagggtactatcatatctctgaaaatattattaccctacattttccaacttttaggtgctcagcattgtgttggcgtgttcgttcgtcttcgagattttcttcaagaattcgctgctcaaaaagcagttggccacggaatgtgccatcgtgtgaacaatacgcagagacgagacgaatcgggaacgatgctgatgccaacaaaacacaatcaatgcgatgaaacggcgatgtaatggatgatatatatgtatatgataaatcggataacctatttttccgtcatgaactgttgtattcattatactagtatatatatatcatatatatatgcatagttgtataaactcactcagaaattatcgaaccaattaattttggaagaaatcaatcgcattttgtccgtgtgtaataatcaaaaatagcattttctccgaacattttttgatttagagcgacttagaaaaacacatgttttggcacataaaagcatgggtcctgtaaccggggtctgggttcgttttcgtacgcgggataatttgtaagcaaaattttataattttaattccacactcgtaaattttaatcgaaaatgcataaatttaaca

SEQ ID NO: 26543 - DNA, 1981 bp, Heterodera glycines
tttttattattacaattttccattttccttttattttttttttacggattccaactggatttgtagcggatgtttggatggacattctcccttcttttgaccatgctcacctcgccctcaaattggcatgcttttcttatcgtttcgatgctttggtggacacgcatttcgaatgaaaaaagcgattgacaaatttggcgactaatcagaattcgcaaggacacatcaggaccaaaaccgaaaatttgtgtaacgctggatgaaaataacaatgatatcgatgacgatgacaattttgtggattttccgttttcggaccgtcagctgcccaacaaaatttgctttaaaagcctttggattgagtaatttgaacttttcatgtgtatattaaggcattttaatttttcttcaggtacattgaccattccatcatcacttttctccattccaagaagcgaatcttcgacagaagtggcaccaatttgtatttgagtgtggctatggatttccagccgatttggaatgcttttgtccgtcaaatttggccaatttttgcgggaagtattcgccatttgagttttgacgctggcgatcctttggacaatttgcgtcgccgcatttcaccaacatttctcaccgatctcaatcaattgaattcaatcaattctggtgctctgttacccgacggtattgctgatgatgggccaaatgcaactgctggtcaggcgttatccaaatggttacacactccgacaaaaaatggtcagccgaagcgattgtatcgcaatgaatatgtgggtgcaaatctcgaatgggtcgacaacttcaaagaggtggccggcctaccatatttcgttaaattgttttgttttatcaattttgtttagacatttctccgtgccaccacttctgtcagttacaatattcaactttatttttatacgacaacaatgccaagtgaaccaccaagtgaaccatttgaattggtgaacgaacggactaaagaaaagctgacactgaaacagaagagcgaagaactaaacgaattagcggtagtgtataattggcggttggaacggcgtccaattggggagacggcgacggcggcagttcaatggaaagaccgctacaattcggatgtcaaagccaatttgaacaatatcatatttaatctgtggagtttcaataaatccattgggtgagcagcatttgatttgtcgaaaaatttaatttattttaggccattgtagccaccagcggaagaagaagcggatcaaagcatcgaaaatgttgtcgtctgactgcgcagaagtgaattaattaatttagaaatgatcgatctcaacctgatgctcattttctctcagaaatgccttttgttgattttttcgttcgaattatataaacgtattttttttattgttttttgttgggcaatttctttagtatcaattgaaaaaattgttaagagaaatttgttaatattttatgtggtttccggagtaggtcgtttcggcgccgtcgttttggcgccagcctcagtttttggactataacttttttctttgtcaaccaaatttacaatcttgatatcattcgaaagcccttcatgtgctctattagccttacaaaaagcgaaaagattttctagtatgtaaaaaagttattaagaaagaacttcaaaatttaaaaaaaatttaaaaaaaacttaactttcaaaacattttttcaaaaataaaaaaaatgatcagcgccacaaactaccctagaaaaattatttcaaatgtcttttgagtgctctttatagtgcggtcatttgagtcccagctgagtttggcactccaattccggcactttttggcctgaaaaagggcaagcgcgcccctaattctatttttccgacccacttcgaacatttttacatcgattctggccgtttttaagcaattttgagtttggtgagtatgaccaatattttccg

SEQ ID NO: 26544 - DNA, 1190 bp, Heterodera glycines
ccagaggaaactctgggtggaagtccgaagcgattctgacgtgcaaatcgatcgtctgacttgggtataggggcgaaagactaatcgaaccatctagtagctggttccctccgaagtttcccccaggatagctggagctcgttaagcagttatactcggtaaagcgaatgattagaggacttggggacgaaatgtccttaacctattctcaaactctaaatgggtatgaagccagggttgcttgactctgaacccaggcgttgaatgtttgagctccaagtgggccatttttggtaagcagaactggcgatgtgggatgaaccaaacgtggagttaaggtgccaaagtgcccgctcattagaccccataaaaggtgttggttgatatagacagcaggacggtggccatggaagtcggaatccgctaaggagtgtgtaacaactcacctgccgaatcaactagccctgaaaatggatggcgctggagcgggccacctatactccaccgtcattggcttgtacacgtgcttgtcgcgtagtctggccatgacgtgtaggagggtcgtggtggttgcgttgaaggctttgggcgtgggcccggccggagcttccaccagtgcagatcttggtggtagtagcaaatattcaagtgagatccttgaagactgaagtggagaagggttccacgtgaacagcagttgaatgtgggtcagccgatcctaaggcaccggctaacgccgtaacacactacggatgacgacttttctgtgcttgcgcagttggtccatccggttgccgaaagggaagtgggttaacatttcccacgccaggctagggaaatgacggttcgcaagagctgttttgcgcggtaacgcaaatgaactcgcagaacgtcgtgtggagtccgagccagagttctcttttttggtttagggtgtgcgggcctggaagtgggtcagcctggataggggatgttgcgcccgtaaggcaccgcggttcctgtggtgtctcgtgcgctccacacggcccttgaaaatgcgagggaagctatttgaatctcctgcctgatcgtaccgatatccgcagcaggtctccaaggtgaacagcctctagtcgatagaataatgtaggtaaggggaagtcggcaaattagattcgtaacttcgggaaaagaatggctctaaaggtcgg

SEQ ID NO: 26545 - DNA, 928 bp, Heterodera glycines
aaaaaatgaaattttgaatatgtatctttcttcggatttcactgaaaaatgggtaattttagattccaattttgaaatcttaggggaatttgtgggccgcgacgccgataggcgccgccgtaaattttttttgggttttttaaagagttttgttaagaaaacttattaaaaatttcaataatttttcctcttttctccctttaccggcgacccactccccgaaaaggtcatccttaacagtgtaaaaatttctcggtttccaagactaaaaacccgagaccgggaagcgaaaaacccgggaaatttcccgagtcgggaaccgagaaccgagactctcgcacatccctaggggtgggcactaaccgatcagcagcaacagaactgatcactgatcagggaaagggaaccctttgattgattgatttacctaaatgccattaagcattttccatcggcacttcttttctgctgcttctccttcttcttcttcttctcctcctcttctgcttctccttcttgttcagcttttgtttcttccgcttctgtgcttttcctttcgtcatactgccaatttgtgccggtgttttttcctcttttttttgctaatgataaacacttgccaaataacaataaaataatgaatctccccccccccaatctctcctctttctgccgctgtttcgccctccctcactttgtccatttttcggatgagttccgccgccctatcacattccttacgttcttccgaccaattaatcttaattagcctatctctgcgcacccttcccctccctttcctcccttttccctttttctctcttccgtctttcttttgtcttatctctccctccctcctctcttcctctcttccggtctctctatatacagggtctcttccttccgtcttgcgatggcattggcatca

SEQ ID NO: 26546 - DNA, 1543 bp, Heterodera glycines
ttgattattttttttttcattccagagaagcaaattttttcaaagattttattcaaaaaaataggggttttcctaaccatatgaccatgactgtagaaaattaagtattaagcagctattttaactattagtttttaatcgatgtatttaatacttttttagtttaaaagtgacttccaccaaattaaagaaaataattttttgaaacaaaaatgaattgaattttaaaatcctcttgaacctcctgtccagggatgtacaagcaaataaatcggtctatatctatttgtttgtgagctatatctgagatgaataaatcaatgcagcagctgattgatacacacaaaatgaatgtttatttgtttgtttatgttttgcgttttgaccgttttgggccgtccgtcgatgattaattgggggagggggggggggggggcttttgggggctttcgctgctgctaaacataaaataatattaacggggagggaaaagcatggaaataaataaataaatgcgaagcgaagaaccacaaaactaacagcggaggaagctaatcgattttgggaggttgcggttaaaacaccgccgccacacttttgttgtcggtgggagaagaaaaaaagaaagaaaatgggaatttgtttatgaaatttgaaaacaaaaaaaggacacaaaacgattaattaaggtaatggaattgggtgtgatttgagaaggaaaagagagcccatgagaaattagtttaattaataacatttataaataaaattatttggtaattaatgattaatttcggttggtattttaaaaatttcataaaaataaaaagaattttaaccgtagtgcgacatttgcggaccgacttttgaccgaaatttcgacatttgcgaccgaaatgtcaaaaaaaagaaagaaaaaatttagaatctacatatttacccaaaattgaaattaatgactagggatgtcaaaaatatgtacaaaaattggtcaaaatatgtacataaatatgtaaaaaaaatccccaaatatgtaagaaatatgtataaaaactcaaaatatgtacgaaaacatgtaaacaaatttttttaaatggttattttttggaagaaatcttcgtaaagtgttaaatagtataaaatggcataaaaatgccctaaatatgtttagaatcaccttttaacatttaaaaaattatttttggaggggtacattttaaaaaagtttttttttaaatttttttcactagaatttctaaaaattttcaaaaatttctcaaaatatgtataaaaaataaaaattttgccaaaattttggattttttttgaggatttccaaaaatttccataaaaaactcgcaaaatatgtaaaaaaaatcaaaatatgtaagaaaaagtccaaaatatgtaccaaatatgtataaaaccccgaaatatgtaaaaatatgtaaataaaagtcccgatttttgtttgcaaacacaaaaaagaaagtgtttttcctactatttagagcatggagaatccaggaaaaaatatgtattt

SEQ ID NO: 26547 - DNA, 1113 bp, Heterodera glycines
tttttatttgctttttaaatatgcgaaaaatttttaggctttacttttttttttataaactggtcagaagcgaccaagattttgcgagagcatcaaaaagccaaggaaaggcactgctatgatgctaatcacagtaattttgaatttaaaaatttttattaatttttaaagcttcactattttatttttttagcaaaatcaattcataaatattttttcagaaactgctctgaaacgcaccaaatgttaattaagagttaaataaggctctctgatgctttttctatcaaaagggagatgaataaatattttaaaaatttttaattcctttttaaacaggccaaaaagtttaggcttatattttaaaaagtttcatcgaacctagcgcactaaaatcgatataatctctccaaattttgcaggccttctccattgtaaaggactaacttaacctgaaaaaatgccaacgcttgttgtttttaaaatttttcgaaattctgactttttcattacttatttattattttgcaaaattaattcataaatattttttagaacgtgctctgaaacgcaccaaatgttaattaaaagttaaataaggctctctgatgctttttctatcaaaagggagatgaataaatattttaaaaatttttaattcctttttaaacaggccaaaaagtttaggcttatattttaaaaagtttcatcgaacctagcgcactaaaatcgatataatctctccaaattttgcaggccttctccattgtaaaggactaacttaacctgaaaaaatgccaacgcttgttgtttttaaaatttttcgaaattctgactttttcattacttatttattattttgcaaaattaattcataaatattttttagaacgtgctctgaaacgcaccaaatgttaattaaaagttaaataaggctctctgatgctttttctatcaaaagggagatgaataaatattttaaaaatttttaattcctttttaaacaggccaaaaagtttaggcttatattttaaaaagtttcatcgaacctagcgcactaaaatcgatataatctctccaaattttgcaggccttctccattgtaaaggacta

SEQ ID NO: 26548 - DNA, 1442 bp, Heterodera glycines
gagtcgaggggctggatcactgtgtcaaggcccaaattttccctggctccgaacgggagtgacggcaagtgcacactcaattgtctgcggtcgccggtgatcagcaattttcgcagatgtggcaagcggaaggcgagggacaacacctgtgtgtagggggcttgacctgcctcatcaaccaggagatgagtggtgccggcaaaaagttcggctgtctgttcagcaaatgagagtgtgcagaagcagatgcggcgctcggcatgctctttcaaagtgcgggccaccgtcgtttcttgggccaatatcgggttgcgcgcacacgcggcgacgtatttgtccacttttcggatgtccggtctttccaaatgctcacggaattcctcagtgtccacggcggccgctaagaggtgctgagaaatgcgcctcacctcctcagcgtagttgattttgcccgctccgctgaacagagcgatcattggctcgggttggccctcaacgcgcagcgcttcctccatttccaacaccagcttacagacggcaatgttcggcggtaccattgccaggatgcgtgtcgacgggtcctcgccgggtcctcgcgcaggatggcagccatgattgccgccgccgtaaaggtcttgcctgtaccagggcccgcctgttgaaagacgaccctcggcaccccttcgagcattcgttccgcggaatcgcactgtcctgccttcaaaagcccaacggcaccctttttcatcaccttttcctcaacactttgcaatgctacgttccggggcaccctccgtcccagcagaatagccatgatcacattggcaggcgatgcgtggtccttggcaatgatggagcatccatttttggtcagaagttcagctcgttccatcagtgcacgcgtggaaaccatgggacgaagctcaacggcttccaatgccccttcccgaaggaattcgaactgctcccacaccttctgtcctttggcatcctgaaatgccaaaaacacctcgactctgacctcaaatccgttgtcaagtgcgcgcttttcaatgcgtcgaacaaatccaagagcacacggcttggtctcatcattttggtcgacgcggcagctgattgccgtatcttcttcccaaatttgcaacatgtccatcatctcgcccacggagttcagttggtgtctgaacgtgatgttcacctgcgtctcctgcagttcttcgactcggatcagctccgtgatgagagtgaatcgttgcagctcttgatgaattgtggctcgttctgcagcgactgcgcatgccatgactcgctctccaaatccaatttgttcccaggtggagttgctgtcaaagggataggcagaaatccgggtttccggttcaaccttggcaattatgttagcaggtaaatgccgaaaatctcgtctccattttgaaggaaaa

SEQ ID NO: 26549 - DNA, 1209 bp, Heterodera glycines
ttcgcgatttttcttacctaaaattagcagctctaataataatatttaattttattttaaacgaaattttaaattaaaattatatactttactaataaattacaaataatttcttcttttttttgaattggcttcatgtttagcccgtttcgatggcaatgaaaaaatcgagcaaaagctgcaaagttggcgtaggcaatctgacggacgaaaatggcaacgtggtgatgaaaggacgattcaaaatgtgcccaaaaggattcaaaaaatgtgccaaaaatgaggcttttggcaccacggcattctgcgttgagctgttggaatgaatatgaagaaaattggaaaaatatgggaaaatgatacttaattaattcaaaatgttaataataatggaatataataaatgtgacattgttgtaataagtgattttcaatgttagctttatcataggattgtatccatctcgcggcgaaaaaatgtcgcgaatctttttgatgtctgcagaaaattgtaaaatgtataaaataacttcttgcgagcgggagggtgtaaaattaaaaaagttcaagaattttttacgacttacacctttaaggtctccaggaacatttgggcagtgaactccgacattcttattgactaatgtcgaagaattcaggccccgtactagaacaacaagtggaaaattcaaattttaaaattaattaagattatatctagtgaaatggaacaaaaaaagtcaaatgtacttcaaattggtaattttttttttgttgcaaaaattgatatcaaattttaatgacttcgtcaatcactgactgaacttttttttttaatatttcgtaattgtattaattaattaaaccttttctaaaagggcattttccaatataatcagcaacgtacttatttatttatttatcgagcaatcacaaggtacggaaaaagtacatttacagtggtgcaaaagtacaaaaaaagtaaaaacaaagcaaacgaaataaaataaaataaaataaagttcacaggatggtacaaaatacagtcaggtgcaaaagtaatggggaacaacaattttttttttgttgaaaaacccggttttctcaaaaatgaatggtgagaaaaaagagttatttacgccaaaagaaacattaattaatgcactaacaaatacccaaaaactgcaccgataacacttttgtcctcga

SEQ ID NO: 26550 - DNA, 955 bp, Heterodera glycines
ttttgtggcttgtttacatacatttctcgaacagacaataaacacaacaataaatacgctaattacagtattaaaacaataagaaaattcacaataatacagtaataggtaagagcctaaatgaatattatgcatagaaattgatttatcaacggtgttccatccttttctttttaagatgaagttcattagaagtcggcaggtgcgtccgttcccattcaaaaatgggtgtattctggcctagatttttagaaaataacttttttggcattcaatatcgacaaaatcattcattgcattttttgacctttttaatacaaaatttgagtttcagcgcagaaagacccgaaaaataagtcaatcttagagagcaatgaaaaagataaacatttaaatgcttttgattagcattgtgctagcgaaagataaagaatgagactcttttttgagaattctcttatttttgagcacatttttggcgttttttagcacatagcccgggccctgtttattattattgttataccattttatagtgagcagttgcggcaaaagtggcaacgtcatttgtttgggcgtcttcaacattgagccattccacaaattgcgtcattttctcaggcacttccgcagcagttgcctccaccttctgtccgcccacagtcacttcgtccactctgtattcccccggcatcgattccttctcccccgacatcacattggcatgcagcgctttgatggtctcaaaaatgatgtataatttttttattttgtttggatgaatcatatgggtaggaaaatcctaggaggtctggaaatttttctcatctagagggcgggaaatacaaaatttgccaaaaactacggctctatcaaaactacagtattaacactataataccaacgatcagagaagcaccgattagaacaatggcgagaagcggatttaataatt

SEQ ID NO: 26551 - DNA, 1598 bp, Heterodera glycines
atcaaatagtttcttgtgttttgccaagcaacgtacctgcctacccagacacccagcccaataaatttagggtccgcttaccaaaacaatttattttaacggttcctggggtgtgtgggctgcacagcatcagctatccgtattcatggcactccacgattgggactttggatgatcaatggattaacattcactttgaggacacagaaagtgatactgttgagagacagcgagtgatcagggttccggtgcccaagggttcccataaaaaggtggaacagctgagagactttattgttgcaacattacgccatcagagcagcaccattgaacagctaaaaaacgacacccaaacaagcagcagcagcaacaccaataatcagcaacacttaaagtaacacagtcgcaacaagcaatagcagcaataaatcccaaagtaacacagtcgcaacaagcagcaacaacttcagcaactataacagtaaaaaaaggaacagcaacggcaaaaccgacaccttcaccatcgccaccggttgcaccagcaacagcaacaactaaagctgctaaagcctccccagttgtgcataaagaatttaatgaaaatgcagcaggagtcgatgtccttgacattatgcttggaggatcaaaacagtctgttgtgagtggagaggagaagaagcagcagcagcagcagccaccaaaaactaatgtttccgttggtcgtccattgatgtctccaccggccacggagtcgaaagatgtccttgacattatgcttggaggaccaaaacagtctgttgtgagtggagaggaaaagcaacagcagcagtcatcaaaaactaatgtctccgttgatcagcctttgttgtcttcaacgcagccgaaagatgtcattgatgatctttttggaattgttcccaaaacaggtgaaaaaaatcgtgcacaactgtttctcaacgaaatgcttggtgggtctgatgagaaagaaaagggtccaccactggagctactaatggaatttgaacgtttcaaaattgtttttcacgatccagcaatcagtggtctatcgttctcgcctcaggtcggccgagtgtgctgtccgaactgtcactttgttcttctcactgtatcactgcaaatatttgtgagccactaagctttgattgtccgcgttgtcgtatccccgttccggtacaatagcgagatgcttagacttgagatggttggttttgaagtgtctcatggacgcagcttaatttaacggcattttattataaaatacgaagaaaataaaacaaaattaccggcaattgtcatggacgtacgtaaaacatcaattccaccatgcggttcttttgatgctgctctgttcacgtttccaaatgcgtcaactgggcgacaagtcacttccatgaactcagtacgaaatgcaacaagtgcgctcatgaggatttctacatcattggtgcagtacgaggccagagcctcctcaagccggaaggagtactgtttgttgtgagaataccattgatcaaactcctgtcgcttagcaggcatcattccatcggccaagtagtcagatttttctggaacacaag

SEQ ID NO: 26552 - DNA, 993 bp, Heterodera glycines
  unsure (1)..(993): unsure at all n locations
taaatgaattggccataaaaagagcagcacttttgggtcggcaaatgtgccgcagaattcgtgaagtgacatgagttgccaaatgaatgccaaagtgagcacaatttgcatcagcttgaagtagacgatcttcttctccatgatgtcgccacgtgtgacgccttcttccgtttgctgtgatattttgtagctgaaggagcagtagaacgatgctttgacgcaattggcaaatagaggcattaaaaccagacaggcgcaatgaatgagagcaaattttccaatgccttcccttttatagacacttacaattagtaacaaaaaatgaaaattcccgaaaatggaaaaatttagtggggcaaaaaaaagtgtataaaaggcgactaaatgccttatgcgtttttaattaattctatacaaaaatatttatgaaatttaaaaaacaaaattaatattatgaattataaaaaattttaagcaaaaataatataaggttttttgattatatggcataaggcaaaaattgaaaaaacccgaccccgaacgatttggtcgaccccacccgaaccccgacacttccaaccccgacggtcggcgacgcaaccctaatttaaatcatacatattagtaatgttaaattatgttttttaatgttttgaccaaattaggtttctaataactacaaaaaccaacagcaagtaattaaaaaaacaatattaaacaattacgcggacggcacttttgcattggcgccgcttttcagccaaatctatgtgttttgacaaagtgagtctgaaaaacgtatacgctgttgtccctcaaatgatcataattatgccaatttcaatcccgaaaaaattattttctcttcccgaaactatgaaatgctgctgcggccttagtttgtaatgaaaattgttattttcgtatttctttatgttaaatttatgcattttcgattaaaatttacgagtgtggaccnntgccaggcatgca

SEQ ID NO: 26553 - DNA, 1521 bp, Heterodera glycines
  unsure (1)..(1521): unsure at all n locations
atggattccgttgttcagacacgagggcaaacgccgacagttccggtccaaagtaagactcattcccaactctgaaggacagcgagtgaattggcacggcaccactgactacgacctgggcatttgcaggtcacctgctgcccggcgtaactcagcggattcagaggccacgacaaatggacggagccatggaagaggcggcaattttgggaagccaagtcggcgacggacaagccgatgccacggtcctcaatcacataggatgccgagtggagtgtgaagttgctgaccaagtcggggtggacgagctaaatccgggcggaggacagtcaattagggccaattaaaagtggagaattgcctcgggcactccgcccatgcagcagacaatgctgaagtttttgggctgggaagatgaagcggaagagtcattgtcagcagagaagactgacgacaaatttgggaaagtgtctgaactcaaaggatggcaattaatctgtggcatggattggccaccaacagaccgacaaaggcctcagcatgggccgggctttcctcgcgcgctttctctcgccgcccgtcctccccaaaactttcgatggccgaaagtgtgaaaagccaaaagaatgagaaggaaaggcggcggtgtgaggtcaacgtaataataatcatcatcaaattgtatttgttttatatattaatgaattttttaaagaaagaattattaaggaaaagaacgaaaaagggaggggaaagtgaaattcaatttggtttttaagttgaaaatttggacgggagagggggaggcgcggggggagtggggcgaattggccaatggcggagaaaacaatcgatggaagaaatgtttgctgaaaagcgtgtgaattggaagtaaacacgcatgaatgtcagtcaacctcttctttagaaaagcatgaaaagctaacacaagtggagaatggcaaaggaaatgagaagaggggggggggggggaaggggacatcgaatcgatgctttttggcgaaatacgaagggaagggaaaggaagggatggcccggggggcaaggggcaacaaacactccgacccctcgcccgcctttgttaaatgatggatgaaaaggaggagcacagctggaaagccaagggttgagagaaaagcggcagattcgcggccatgccccctccccttctcccccaaggccatttccctttgcgcaccatttggtcccaccaaattcccccctttgcccattattccaaccggttttgtgtgctttgcgttgttcttccttttctgcttccttttaaggagagcggaaggaatgaaggacaacaacagcaggtctggccaaagacagtttgaaaggggtatttttgactggagagcaccgcggggggaagggggggggagcaaacggacagacaaatccatccttccaattcagcaaaagggagggaaggagtcgcgcaacaatccatgcactcggtcgtactcaactcaattgtctcgacnnctgcag

SEQ ID NO: 26554 - DNA, 1192 bp, Heterodera glycines
ttttttccccactacagggatgaaacgcaataaaataatggttgtagacaaaagaaattggcgaaaaaaattgcctcacaaatcagtgtgaactgaaaagaaaaaaacttcccccaaaaaaaatcggagctttttcgacggcatcagctgcatttccaacagttcaacagtataaataaatattaggcaaatgaaaaatttttttccttcctctttagaaactgtctaaaaatttttgttgttaatattcagaaaacgtgttttttttactgacaatttttttcaagagaaggatatgaacaatcacttataaggctcatgcttggagataaaggaatcggaaaaaaaaattatctcaacaatcagtcgtgaaacagttcaataattcggaagcagtgccatattgggaaaagatgcacaagtagagtaggctcgaaataaaggcaactgccgaagattaacaaaaattcaaatttattggccccgttctgctttgacaggccatatctcgccagggagtggcggtagaccctttgttgatacatttgaaaatgtagagcgcgtctagctcattcgaataacatcaaactggtttgtttttgtcacgaaacaacccgctgatggccacgtcgaagaaaagtcccaaaatttgacatccataaaactccattttttcataggccagcgtgtttaaagcaaacccgaaactgataggaaatttaaattgatcataatagaagtttaatttttatttgtcccatgcattttctgggaaatcttttcgcgaaaagttgaaaaatttcaaaacggcagacaacagatgcatttcaaacaattcaacaatataatataaaatttaggcaaaaatttttgttccttcctctttggaaatggtcttaaattttgcttgtaaatattcagataacaagttttttttactgaaaattttttacacactacaggatgaaacgcaataaataatgtttgtagacaaaagaaattggcgaaaaaaattgcctcaacaatcagtggtgaaactgaaagaaaaaaacttccccaaaaaatcggagcttttccgacggcatcagctgcatttccaacagttcaacagtataaataaatattaggcaaatgaaaaatttttttccttcctctttagaaagtgtctaaaaatttttgttgttaatattca

SEQ ID NO: 26555 - DNA, 1609 bp, Heterodera glycines
ataaacaacaatcacttccttccttccttctctgtgaccgtcacataaaataatatttaaatacaatgaaataattgaaacatataaatatgtattttaaacatttaaaaaaattttaaatacagaaatactttaaacatttgcaaaatagagaaatgcgaaaaattattggtttttcgcgggcccttgcctcgaaataattctatccacgacgatcgtgtggtcaaagcaagaagcagaattttttaaatcccatatatttattttttaatttaggacaaatcgttttattataatttgctaaaacccaatcgtacacttttttttattattgttattattttcaacgagcactgactggaaaagcgatgaaatttttgttcattaatttgatgcaaaaatatggacagtatgaatcacgcagcatcaatccgagttatcactggaaaaaacaggaatttgtctttaacaaaatgagcgatataatcagatgggattggatggggcaattggtgggtgattttataaatcaaaaaaagtgggtgggcaaaacagacagaatgattcatattcatcaaaaaattccaccaactgagaattccagagtcattttattgtgatcggtggcaatgggtcattaaaattctaatcatttttatttttatggaaaaataataattccgccaattcatttttccgttatatatttaaaatcattaacataattaattttagcattataaatgggtacagtctgggcattctgtgcactgttgtacaatgttcacctgttggctgcccaaaataacggtaaattccacttcaaaaccttaattaagattaaatttcttttaaaccatttcgacccacttgattaaaatggtctaaattttcggatcttatgggcagacttttttgaaaattgataagataaagaataaattaaaattgaaaataattttaattggcagcatttaatgccgaagagatttgccgtcccatcgatggcacaccgttccacgcccaatgccttctctcttctgtagtcaaacagaaaggcttcatcccaaagcatttgcgcccgccatggctcaactcaccgctgtttgaggacaacaagctgagcagcgaggccaaagaatcggaaaatggctgtttttcctgctacagagggacaaaggcgagcaatggcaaaatccaggacgaggattactgtgcatgcgtggtacggtgttgagaatactgtataataaacttatctttaatattatatatcaaggtacaggactagattctgtttatttattaaaatcccggaaaaattgaaattttatacttttcgtaaaaatatgggatagaaaaaaaaacaatttttttaaagtttcggttcctctactattaaggataaagccaacgcagatatatcaatgctctgaatttaagtacaaagatcaagcaccgaatgatggattctcgaaaataattggaacatttgatggcctaaactgtctgcaggatttgtataaaatggccagttggtgaaaaaaataaaaaaattaatgcttgtcatttcacttttcaataatttagatgccaaaatgtgggaaat

SEQ ID NO: 26556 - DNA, 1625 bp, Heterodera glycines
  unsure (1)..(1625): unsure at all n locations
cctctcccgcccccccccccccctcacccgacggaaaatgctttatttcaatgactaatcaatcgtataaaaaaagacggggcatatttcttacggctatgcgaaaggaaataatgaaaaaaactccttttctaatagctttttgccgccggcgcagggaccaaaaagctttcggcaccaccggacccgcaacacaaaaatactggcttggagcctagttcattctgctggtcatgatttgtatgaagagaatttggatcgcgaaaatgatagaaacaaaaaaatgtcgacctggcatttgccattttgagatgtgtttgctttgtgccgagtttgaactagcgccatttgctgctgctgttcatttttggcacgtcagtgtccgccgatttgttgaccgctccgctcatgacttaatttaacaaattacaaaaaatgtatttaaattctgccaatgtttctgccgactttgtcatcatgcgccccggtggcgacgccgtccgctgcagttggcgcaaactttgcgccaaacagtcggtgaagtgcttgtcgtggtcaggcgaaaacatctttttgaaaaagaaaattattttgagtaaaataaaaaaataccgtattttcaaaatgaaaacccaccgtatttttccaagagaaaaaattacggtatgataaatttgaattttttaaaaatgaactcaaaaaattgttttgtttttttttcactagagctagtaaaactttaagaattcccaatgattgcaactcgagaagttttttataagccatttcttcgcaattatacaattgctaaaaaaagttattacatgaattgcaaaaaaatacgaaatttttgtagttttttcggcgctacttaaaaggcggtaatttttgaaatttttttgcacttttttggtctaatttttttttgtttattttgatgcagaattttttttaacagatggtacgcatttcacgtgatttaataaattgaaaaaaaaaatttaaaagaaaatttggagcattggatgaaagatccaatttttcgagtgaagcactgcgcagaggcagctgcagaaacaaaaaattaaatttaagttttaaaacaaatttgcctcggcgtctgccgtctctccgccctttgcgttgtcttttgcccctccgccgatggcattggcatccatggaaagttgtcagagccgttccaacgcatgaagaccggctaagaaatgggcactcagaccagagaaacaattgctgaaaattttttcaatgttcccttgaaattttcttggattttttgaaaataaaaaattgaaaaaaattttttttagtgttgaaacaaatttaatattttttgatagaaaaacttaagttagacaattgaaaaaattctcattttatttatttctcactttttgtgcgtgccgttgggggatgatcgtgaattatcgcgttgtttgttgtcatcgcaaattggtgtgtagttgctgttcgtcatttccttctcctcgtagaccaacacngtaatcgatgatccgtttggcatccgaaaatactccgtttnttgtccaggggttcggtccgggaagggtgggccgatgcaangctattggaacaaaaaaaaa

SEQ ID NO: 26557 - DNA, 1230 bp, Heterodera glycines
ccaaaaagttttttaaaagcgacgccgcaaaaaaaacgttttttttttaaaaaaaaaagtcgtagacttgccaaaaaatcgcaaaatttggcagtttttggtgaaaatctgttaacaaattgcactcaaattttcaaaatttttcccggcggcgcctatcggcaccgccggaccaccccaccccttctcaaagagtttcttgaaaaaaccgcgccgcaaaaaaaaaagaattttggaccgtttcgaaatccctatctccatctttcaagtggaaattatttttataatttgtcttaattactagtacaaaaatagttccttctttgccttcaactcaaatgcaaatgccactgacggcgccggagggttcttccaatttgactttgcacaccgcttttgacgaataaaatctctatgttttttcaagttttaaaatgaataaaaacaatggcgtataaaaattggtttatttgaaaaaaaggtcgctgtagaaaaaattggaccttcgtatgaaaaatcggtcccgagacacccccctgtcccaatcgtccgtcgtatacatgccattgcttttgccttcaaatcccccaggtttctttcactgttcgccttttgcctgggccaatgattgcgcattctctcgtgtcttgtgattttcctaatcattctatgatttttgggccttttaaaatttagtgccaattcattccattcgaatcatttgcgcctttcttttctcaaattgcttttttacaactcatagagccgcctgaacagcttcggacacgcattcttgcgattgaacgcgaactcagccaaattggcggaccaaaaaactattcgctgttgctgcaacaacagaaccaaacaaaccgacggtcggactccattttgtaaggaatttattcacgcaacacaattttcgaaatcacttcatcattctaatccgttcgctgatttccatttgtttgattgggcattgacacactaacgcttaatcggccttcttttctagctcattttatctcttttttcctccaatcgtttatttcgttatctctctccctctctttgtctccctctctctctttttttttcttccccttttttccttcccacttacttttttctccacgtcgagagagattattacccactttattgcgtcgttgcgcacgcaccgcgtgtgagcagccagcgaacagaaaggaggaggagatgataaaggag

SEQ ID NO: 26558 - DNA, 1596 bp, Heterodera glycines
  unsure (1)..(1596): unsure at all n locations
cctaattattgttaaggcttttctccaaaaacgatgacctcggcgactcgttggacgcggttgaatcgttgctgaagaagcacgaggactttgagaaatcgttggccgcncaggaggagaaaatccatgcattggatgaatttgcgaccaaactgatcgagggcgggcattacgcagcggaagacgtggccaaacggcgtgaaaaggtggccaaattaaattttaaaattaatttattatcgaatattgattggtggctcattaaataaattatctatagaaatctttataatgcattaagttgataattttcgcttttcttttgagagaaattatttttaatttcataaatttgttttatttttttttgttataaatgccttaaaaatcatttttatagtgatttgctgacttttttaaataaaaaataatcgcaaaaatatgaaaaaaaaatttgtacgttgatttgtacaacaattaaaattttattctatagctaattgtcggaattaaaaattcttttaattatttccttttcagttgctcgcccgtcgtcggcatttgatggatcggatggcacagcgccgggagcgtctcaaggagtcctaccgcctgcacagctttgaccgcgactgtgacgaaatgctaggatggatccaggtgaagctgaagacagctaaagaccaggtcaaaaaatttattaaaaaatgatcaaaattttctggtcacttcttgattttttccgatcacttagtctgaactggtcgagcgattctatctctctctcagcctttgggtttgagtttttcagatcaaatcagaaattaactgctctaacagattaagcaatcataatcattttaacttaaatgattattcttccctttttgcagagctatttggacccgacgaacattcgcggcaagttgcaaaagcacggcaactttgagcaggagttgcgcgcaaatcgcaaccgactggacgaaaccaatgcccccgggcaagaactgatccaatctgggcactacgccaacgaacacattcaggtggggaaaagaaaaataaaattaataatataaggggtaaattatctgatctaatgaatttttctcccacggcgcctagttttaaaaaataaacttgaaaagatttatttccagaaacttttttcgggtttctcgttcgtcactagtactggtttaaaaaattgtttatcgcttttgtaaagttaggaatagctcttaaacatattgctttaaaaattaacatctttcctttgttatttgcaatcaaaattaggatttattgacgattttgcctgtttattttgagtgttttaaaatttttcgagttcgcccgcttaaaacatccttttcataaccattttgtgcatctattaaattccatttcgcttttttaggagtcgcttggcatgacttttaaggagttattcaaatgttggtgtgttactgcgtcggatcgctctgtaaattatcgtcgtttagttgccggttggtcgggcaaaaatatatttcggaatttctcaatgcctaaggcgatgtgttggcaggaggttggccggaagcgtcacctttt

SEQ ID NO: 26559 - DNA, 1302 bp, Heterodera glycines
tttttggggaaaaaaagacttttctaaaataatacccctgggagaagggagtgggaaacatgatttcaaaattttcaattttttctagtctaatctactcaaaccggttcagaattcaataaaaataacattcacggtgcgaaaaatggggtttgacaagtttattgggggaaaaaaagactttacaaaataatacccctgggagaagggagtgggaaacatgatttcaaaattttcaattttttctagtctaatctactcaaaccggttcagaattcaataaaaataacattcacggtgcgaaaaatggggtttgaaaagtttattttgaaaaaaagactttacaaaataatacccctgggagaagggagtgggaaacatgatttcaaaattttcaattttttctagtctaatctactcaaaacggttcagaattcgataaaaataacattcacggtgcgaaaaatggggtttgaaaagtttattggggaaaaaaagactttacaaaataatacccctgggagaagggagtgggaaacatgatttcaaaattttcaattttttctagtctaatctactcaaaacggttcagaattcaataaaaataacattcacggtgcgaaaaatggggtttgaaaagtttattggggaaaaaaagactttacaaaataatacccctgggagaagggagtgggaaacatgatttcaaaattttcaattttttctagtctaatctactcaaaacggttcagaattcaataaaaataacattcacggtgcgaaaaatggggtttgacaagtttattggggaaaaaaagactttacaaaataatacccctgggagaagggagtgggaaacatgatttcaaaattttcaattttttctagtctaatctactcaaaccggttcagaattctataaaaataacattcacggtgcgaaaaatggggtttgaaaagtttattgtggaaaaaagactttacaaaataatacccctgggagaagggagtgggaaacatgatttcaaaattttcaattttttatagtctaatctactcaaaacggtttcaaattcaataaaaataaaattcacggtgcgaaaaatggggtttgaaagtttattggggaaaaaaaaactttacaaaaaaaaccccccggaaaaaggagggggaaaaaagattttcaaatttttatttttttttagtctaatccactcaaaaacgggttcaaaattcatataaaaaaacaatttcccggggggaaaaaagggggtgtggaaaagtatttttggggaaaaaaaa

SEQ ID NO: 26560 - DNA, 1467 bp, Heterodera glycines
  unsure (1)..(1467): unsure at all n locations
tttcgaatttttaaaaaattctaaaatttccgaatcaaaaaataagcatcatattcgtgctcagcacctcaaaataccccacaaaataatttttcacccactttttcaacccaaaaaaaaatttcgaaaatttctagggggcctagctcgaaaatttttgaaaattttacatcatgtagtacaccattcgatagagcttcaaaagctctacaattttgccctaaggcgttttttcgataaactcaactcctgccgagttatgggcccgggactcaaatgtcccgcttaggccaaaaaatttttctatttcctggaaaaaatcgaaaattttctaaaaacatcactaatcgatagagctcaaaaaacgatgttttggaagtggtctccgttttcccgggaaaaatcgttaaaaaatcataaaattcaaaaaccgaaaaaccgaattttaggcctaactcgaaaaattttgaaaattttcgaaattttaaaatttgtaaaaatcgagctcattgagctctacaataagtctgctggcaccccctcgctcagttcaaacccttacgagctattcgcctggtactgaagtgtccaaaaaaagtgattcttacgttgcctaacctacaggtcaggcctttgatctgatcaaaaattttttgctggcaaagttgtaggccatagttggggcatttcgcttttggggtccgctaagctctgaaagcaaaagcaaaaaatttcgtaacactgagactggcggcaaagtcagttttcgagccgctgggactcagttggcaaccggaccaaaaaatccgtatttttcccggatgcgccgtctcgagttacccctgtgtgcaaaatttcagccccccagctattcccgttcttctcaaattagtttttgagatgagttgccttgtcaatataacatatatataatttgcaatccaaaaaaattgatttggtccaactctatggctcaattgagtccattatcgaaattttgcgggattggaattgcagcgaagtttttgaagaagttttggaggagacgcgcaaactgtgtgagcagctcgaagttgaggagaccctgcgtcccaccgagcgtcgaacagcaaattctcctgtggaatttgtccgggatcaaatttttatcccatatttggagaatttggtgggcgaaaataataataattttatttatttcaagaaataatttttattttatgttttaaagttaataataataattttatttatttcaagaaataatttttattttatgttttanagttaataataataattttatttatttcaaaaaataatttttattttatgttttaaagttaataataataattttatgaaaaaacttcagaagaaattgaaaagagataagatgaaataattgacttaaaaactgataaaaataataagcgttgcaatatttacttaatttagaattattta

SEQ ID NO: 26561 - DNA, 2004 bp, Heterodera glycines
  unsure (1)..(2004): unsure at all n locations
aattaaaaaggacaattcccgaaaaaattaaaaattatgaaaaatcaaaacaaattttttccgattaaaaatccagtaaatttggaggagaatttcattccagcggattacctttgggattataaaacattcattcgtttattgttcagcaaaaaaataagagcgaacggcgccccatccgttgacgatttttagagagttacatgggatcaaactctcgaggaaaaacgggaccagaaaaagggattgggacacgacgccggggtgaaaaaatcgttatcaggattgagttttgtttaggccgaaagccattattatgcncaatgagcgacagttcaattcggagacttagcattctgagcattttgccaactgatatgagtcgtagccaccaccacaaaggcgcgaaaatggatggaagaattgtggttttggtttgtccgaaagcaattaataaagcagattaacgtattctttatgcaaatttttaaaattttgcaatcacaaacagaagtgtgtcaacctgcttcagcaggttgtgatcgacggaagagcgagaactgtgcaatgaaacagtctcttttaactcatttatgattaaaatttgggcagtgcgacgacgctaaatgatcgtctttcactcacgaaagatgattttgagctttgaaaacttgagtttacattggcactttttacagtaagccgattattttccttttattacagtaaccgagtgattaaattattttataatatgattgaaacattttaaccattctgtcggcataatacgatgcaaaaagtttaatttatataaaaaattaattaattaaactttgcgagaatgatttacgtttgattgaaattaattaaattatttttttaaattcgtaataatgtcaaattgtcattgaaattgtatgaaataataagaaatgaccataacggagaacagaacgaaaggggcagtcacaaacagaaaaatgataataatttttacagaagggcattcccccgggcgatcgacgtcaaatttgacaatgtcttctttgttcttctttttgctcttctgttgcacttccaaatttccaagacaaatttctgaaaaagacaaaatatttcaaatgcattctctccactaattaattattaattaccatcaaaagctgctgtatttcgggctttaaaagttgttgtcatttatatcaatcacttaattatccccaggcatttcaatttgctaagctgagtttttcaattttatttgggagtgatcggtcggtagccatttccgtcggatttgagccaaacaaaggaaaaaatattttaattaaataaaaattatataaaatataataaatcatagtctttaaatggttaatttatgttagttaagtcaatttccggacttaaaaagaaaagtttttttaggttaaactttgcccatacgtcagcttcctctttgttaaaaaagtgttgaaaaaatgaaaatgaacggatacaatcataaaaagagcgcgagatcgctttttgtgtcggcatggaaacaccgcggaaaaagcagtgacaaaagaaaaaggtaaaatgacgaaaaattgaaaaagtgcgaaaagtcaaattaattggaatagataaaaaatttaaagacaacaataaaaaatgaatggaaaagtcaaaataaattatgcaatttttagtgttgaggcacaaatattggcgtaaatacataaaaaaaaagatttttaaatttaatattttgttttaaattattctttattcttcgctgctgttttgcaaatgctttctcttccgcttccctttgtccgcttttcctttccgttcatcggtccgtccggttccctttttggttggcttattttgctattgtatttgatatattgaaaatattattttgcttttccaaagatcgcttttgcgggtcgcnccgaccaattccaaactgggaagaatgtgccccaaaacccttccgtttatttacatgcg

SEQ ID NO: 26562 - DNA, 1720 bp, Heterodera glycines
aatgccgaaatgtcttgtttccgccgattttgacgtctttcttgaagccatttattaaaatagatcaaaaaatttttaccttaaaaacgatttcaactgccatattcgtgatcagtatggattcatttttaggcacaaaaaatcgcgataggcacaataaaaaggcagaaaaaatcgcattctgaatctatttcgaccaattccggattcggaaaatccaatctcgaaaacttattcttattcagaaaatttttgtcattctgtttgttgcaattttcaaaaaatgtaatgcggattcctcttgatcccgctcaaacctacgatattaattttttagatattagatactttttatccattttcacataaatactctcttacttcaaaatgtggaaaaatccgaaaaaagccaagaaggaatggaaagaaatgtgagttattaaatcttattttataaggtttttgaattaaagaaaaatatttttcgtataatttgatatttcccagctctctctgcggcgactgttggctgtcagtgttccaatttatcggcccctatgaactcgggttgaaatttgcgttgctcagtgatcgatttgaccatttggtggacgagcatttcaagacgaaaaagtgggcgatgggtttcctggaaattcgtctctcctcaaggggaaaacgcgcggtgattgtcaacaattttggcgacggacagcgcagtttttatccaattccacaaaagccattgcccagcaatatcgtcggatttgaaagcattcgtataaggtgccaaagacagacacttggcttagggggggggctgaattcaaaaattcaatttttagggtttcatttttttagagtctcgaattaggcggtctatttagcaggaatttgtagctgcttctcgccaaaaatgctattttttgccatttggtctccatttttttaatatggtcaattgggtgtccggtgcgggtgctcattttttcaattctcacatttttaaattggtaataatttgctaaaatgttgggaagggacgaaacacaactaccaggccaactcttaactgctccgacttgtaaactgtttttcggccaaaaaacgtagtactttttcaaagtcaacaaaaaaaaatacaatttgaaattcaatcgaatattttgggtagatttttgtcagatgatttttgggttgaattttaaaacaacatttaaaggaattggttgtccaacagtatagacaagttcgtctgtagaaattgtgaaaattccgataattctagcaaattcggttttaattgtggaatttttttgttttttttccactaaaaatagagttaagctctaatctaaccctaatggccaataaaactatctttttaatcccaccaaacgcgcaaaatttttttgttccaatttgcagttacgtcgaccaacacgtcgtccaatttctccaccgcattcgccgccttttcgactctgtcccgacaaacctttacattgcgaccgccgctttggccgaaactgtctaccgcccgaagcactttgtccgcagttgcgaggcgattcgccaacacattttgccgctgctccgtgccaatgtccgcgccctgtttttgtcctctcccattttcgaccgtttgctcaaattctcgccctcctttctcgtcgattgcccctctctgggaacatcgattcctaccaagtttttccct

SEQ ID NO: 26563 - DNA, 818 bp, Heterodera glycines
ttctcaaaaaaagagatagccatttttctgggatagagtataaatttaaaaattccgtcaaaaataaaaggtctattgcactccgccatccctatcatgctcgagagcatttgtatgtgtataaaatttatcaaaaaaagagatagccatttgtttgggatacacctctaaatataaaaatcctctgtgaaataaaatggcgattgtgcacagccctccgtctcatacgcaagcgcttttgtgaggtataaaatttctcaaaaaaagagatagccatttttctaggatagagtatcaatttaaaaattccctcaaaaataaaaggtctattgcgcacaaaagctcagaaagtgtttttatgtaattttgagttggtaacgtattcggcaatttttcctaattgaactgcttttgcaattcattttgcgagaaaataaattcaaaaacagatttgagaggccaatgattttgtttttaaagttaatagcaatggaatttacaaaaataataatgctttatgctattgcttaatttaatagcagttgaagctttcttatttgtaaatttccgaattatgatcgcttggcgaaatgaatgaatttgcgttagtttgcgaattttaattggcaaagtgaatacttagcgaaaataaaattgctttacattcaaattaaatgattagacccgcccctctcctccagcagattcttcagactcgagtttttcttggttaaattttgacttcagcagtataaaagaaaattgccgaaaaaatcattttaaatacaaaaaataaatatcagttttcaatcttcaaa

SEQ ID NO: 26564 - DNA, 2434 bp, Heterodera glycines
aaaatccaggctcctcgagactggatccagggctggactgggattttttgaaattgttttaaaaagcaaacaaatgcttgaaaaaatcaattatttgctagaagcatctaaaatatctaaatataataataatgtgtttttaaatttatttaatctgtttttgaaaacttgaaaaaacatcggtcacttgaaaaaataaattctaaaatttcgtccaggaaaatccaggtttttcctgttttgcctggagttttattccgtattattcatcggttgggtcccctttttggaagaaaaattctttttatattcatgcttgtttagtatgatagttaatttgttatcttaaaaattttctttgcaaaaaatgaagggttttttctaaatataattatgtgatagtacaaattttaattattataataaatctatacattgaacttatttattttttaatttacattttttttatatttatagaaatgattattttttcaatgtttttgaaaaataaattatgccaaattttaattggtaaaatatacaaatccatgtttttggcattagttttgtaattttgttaagaaataaatttattcttttttttctattcatttgaagtttcatgttccgtgggttgaatgattttatttggttgataagctgttttttaacaacttactatattttataattaaagttattaaatgattggacacattaacaaataattattttgaaatgatttcttaattaattatataatttaaaataaactgtcatcagaaaagctttttttctcattttaattttaaaaatttgtttattattttccatattttgtagataatacattcctgaaatcaataaacttcaagtttcggaatttataaatacaaaaaaagaaatattaataaacttttcctggaagctgaaaattttcagaaaaaattttaacaatattttttctattaatatggatatatatttttttattgcatctgtaaataaataccaaatattattcatttacatccttgaatttttatgattttttgcggaccatgccaaaaactgacattcacgcgctactttttggcgaatttaaaaaaatcgattcaatgtacaaaattttagccttgttattaaataaaaatatgaactcacaataaaaaaaatatttattcatgaagggcaaaataatcttttttttatataagatcaaattatttaaaattatttcagtttcttaatggctaaattaatatcttcagtttttgataatgggtcataaaccatggaaaataaaataatgtcaaaaataaaccaagctttaataaaaataataatcataaaaccggagaccaaattgttatttcataaaattaaaatctcatttattaaatttcgggcgtgacacttttcaccgatttaacaaattcacgctcaaaacatgattataatcaaaaaattggcaaataagatctaatgaaatcttattcaagacaactttacttgaccaatttttaatattaattgtttaattttggaaaaaccgattcatggaaatattttaaccttaaaattttgataaattaattcatagattcaaacatataaaattgcgccgatattaaattagaatatttttaataaatctccataaattagaaaactattaaaaataattgaaattatagaagattttatgaaagccttcctttttcgaattagttcaatctattttaggaaaatttttaacaatttatttaaggatattttaatattaaaaatatatttaaaattttttatttcattagcgttttatgtgtaattattagtcacaaagaggcctaaaaattcgcttatattttgtgaaaaataaaaaaattgtttaaaaattaaattttaaaattttaatccttcaaccccagaaatcaaacttttaatgggctggatgacatgataaaaatatactaaaactagtctagttattgaataaaaacgtaattaatgaacttaaggcggcgttgtaaaattatgcaaattaattgtataaaaaaatataatactctgtccttggacctttattattttgatttatattaacgatcttcctgatgctttgccatcaggagtaagaattaaattatatgctgatgatgttaaattgtatatttgttataaagcgagagttgacacagaaattatgcataaagcattgcataatttatcagaatgggcaaataaatggcaaatcagaatctcaattaaaaaaacttttgtactttacttggggaataaaaaccccaaagaaatatataaaattgatggaaatataataaatgttgtggatacaattagggatttaggcataaatattgataataaattgcaattttccaatcagtcgcacaaataataaagaatgcat

SEQ ID NO: 26565 - DNA, 1013 bp, Heterodera glycines
aaaaattacgaataaataatgtcaaaataaatataactctttgaaaatatgtaaaaataaaataatgattaaatgtcaatgtcaatgaaattccatagaaaaaacgatgaccttaatatgacgagttcgattattagactaagaagttaataatgtaactcattataagatttccagataaatatttacttgaatatttcttaataaaattaaataaaagaaaccgaaaataaatctcgtagcaacggtttgatataattgaaaaaaacagattaaaaatttgaataaaaaatcataaggaagtttttcatttaaattttttagctaaatgttgttcaaaatttataaattttgctaaactaatatcttcatttttaaaaataacaaaaatgaatatttcttaatagcaatattaaatttatataaaaatacattaagaaattaaaaataatttctaaaatttacaacaaatctgtcataacaaaataaaaatataaatcaaaaaatctttagaaaatttcaattattttaataattaattcataaaattagtaacatttttacgtcaacaaaaatatactgttaacattcttttcgaaaaatgaaaaacctgccacctgccgtgccaagaattaattgcagcttaattaagtattttttaaagttattaaatataaactgataaataaagaataatataaataatattatatatcttcaacacataattagaatttaaaaaattaaataataatccttgaatagcaaaggattttttaattaaaaaagatcgtaggcaattaaaaaatcattgtttaaacatttatttaaaattatattttttagagatgactttttaaatgatgagcgcagctctggtctttaaattaataaaagcacaaagtaatttattatttttaaatggaatatgaaaaacaatttaaaaaataatcaaacgctattttttatgatgttgaagaagtttaaatattatcttttgtattcttggcaag

SEQ ID NO: 26566 - DNA, 1419 bp, Heterodera glycines
ctaagttaattttgttatgcttttctattgttggcacctccactgattgcctttgcttcttcttcttcctcctgtgccgttctgttcctccccgcttccccctttgcttttcctccgtttgcttttccttttcctttttcgtccgccatttccgtcccattttgcttctgctgcttcttctgtgccgcttctgtcactgcttcgtcttcgtccgtttctccttccactccgccaaattgggcttcctcctctccctcctcctccagttgttgtgcccgtaacaattgggtgaccagctccaactcctcgtcctcgcccgtcactttcgcgccatcttcatcaacggcatcatcaacattgtgatgctgttccgcttgtgttgtgatcaccggttgctgctgtttctcagcgatgatccgtttccgatcacaatttgtctacaaagaacaacaatgaattgttggaaagttaaaaaatttaatgctttacgttttaaacataaaattaaacaaaaatgaattttttttttttttttggtaattatttttaatttatttctttcaatttgcttttgtttttcacccgtgggcatggcgttatcgccgacggcgtttttccaattcgttcctcacacctttctacggtacactcaaagtggatgacgctgccaatgttcaatcttcgttgatcaaattgggtattgaaacgaaacatttgcggaattttcgcagtcgctacagtaaccaaaggcagtttttggtttgcggtagtcaaactttgcgttgattgagttctttggtttcgctgaattatcattgggagaggcgtggaggaaaagctgttgaacagcagacgatttgattgctcaaagtcggtgatcaaatgcttgtccatgctgcaaccgtcggagtcgatcagctaaaaaaaggggcttaacaaagtcgaaattgggataaaaataaattttgatattaaaataattaaaaactggaattaggttaaaaatgaaaacaaaaagaataagcatttatttataaaaattgtttgtttaaatgaaagggcaatttcaaaaaatggtaattatttattatttaattatacagtttcaaaaaatgttatttttcattaattatttattaggtatttttaattaatgttgataatctatgttaaaaatttgagtgatgttgcgcaactcattccaaacaatggctaacaaaaccaaattgtttttacgtttttgcccatcagtgaatggcaaacgaatgggtattgtggtacatggtcattatttgtgcctgttggtcaccaacagcagaaggaaaatgcaaaagttggagctgttcttttattgggtgtaattaggcatcatttggaagccataagggacacaaaaagagtaattatcgctaatatgag

SEQ ID NO: 26567 - DNA, 796 bp, Heterodera glycines
ataatgaaaaggtggtttattgaaaaaaatggtgttaattcgagtgcaggatctataaataaattaatattattttaatcattaaaaatattttagttatataaatgataaatcgaaatttattaatgctctgataaaaaatcatttgataatggattcaacagaaacggaaaaattagcactttgtggaaaatattttacttacagatttgaaggtttcagacgcggtgtagaatcttaaaaaattaatattatttaaatcttttataagatttacgcgatacaaatataggaaatagtaaagttcatgtgatcttgatagaaaatggataatgaaaatgtggtttattgaaaaaaatggtgttaattcgcgtgcagaatctataaattaattaatattattttaatcatttaaaatattttagttatataaatgataaatcgaaatgtattaatgctctgataaaaaaagcatttgataatggattcaacagaaacggaaaaattagcactttgtggaaaatattttacttacagatttgaaggcttcagacgcggtgtagaatcttaaaaaattaatattatttaaatcttttttatgatttacgcgataaaaattaaggaaatagtaaagttcatgtgatcttgatagaaaatggataatgaaaaggtggtagtagttaacccccatatatcgtcgtcatgattaattgctttttggtgacagctgccctttgaggcgtgccgccgcgcgcgggtttaccgcgcgaacccgtgcctgtggcacgggttttgg

SEQ ID NO: 26568 - DNA, 1047 bp, Heterodera glycines
  unsure (1)..(1047): unsure at all n locations
tgtgatgggttggtgtacncggtgcaaaagcattggctgttgaaggacagttgtacaatgtgtcgtcagcacagctaaaactgcctgccagggaagcaaactgaaaaggaaatttctataaatgaaataggggatagggcagtccaaattggaatccctgaggggggggggggggctgctattaaagagggggaattcaaacagaaatttttcaacaaaaaatgaaaaaatttcagcgattttttcgaaaatttatatgaactactaaattgtaagtcatcgaaaaatctgttgaaaactttttcaagaagattttttattgaaacattcttataaaaaaatttcatcatttttttttgaaaatatcatttttacaagtttaaaaaaaaaattttctaacaataagaaaaattaccgcttttgttcctccatggtacacacttttttcattggcatacattgtgcggactaattgacgatattcgtgtctttgttgctcattcaatgcctcaatttgatgggaatagttgatgcaaacttgctgaaaataatttaaaatttaatttttttttcaaaaactcttttttcaacccgtaatttttcgttgagcatcgaaatttcataggaatgtttgtcaaactcggcggcatcggcgactgattgggcaagtgtttgctcacaagtgagtttgatgcgttcaacctcaaagttgcgcgcacggaccaatgaacgcatctgacaaaattgagttaaaaaattatgatttttttcgtaaaaaatttattttttttcaatataaaaattgtacgaactgccatgatatcaattggcttactctacaaatggtgttaaaaacatatggaaatttggatacaatttttttctaattgagccacctggggctctatttttaacggagttggacaaacagtcactggacgagtttttttaatcatagtttttttccttttcaatcaaattaaacattcttggtacagtttgaaagttcttgataaacttttgttaactttgaaaaataaaagaaaa

SEQ ID NO: 26569 - DNA, 1672 bp, Heterodera glycines
  unsure (1)..(1672): unsure at all n locations
ttaaaatcataaagcaaaagtcatttttttaaattttctttcaaatttaaaaatcaataaaacgcttttttgaggcgcgctttttccaaaaaaactttttgggaagagggggcaggcggcgccggcaggcgccgccgggaaaatttttgaaaatttgattaaaatttgttgacagattttcaccaaaaaatcatcaaattttgtgatttttgtatcatttttctaatgagaaataagagttttggcgcgccgctgagaacagtttttcatcaaattaccaaattttgcgattttgggccattttctaagaaaaaataggagttttgggggcccggcggtgcccataggcgccgccggggaaaaaattggaaattttggtcatttataaacgggttttcactgaaaattagccaatttataggtaaaattttgaaaaattttatgggaatttaatccaattcttaggggtgtaaaagtcgcatttcgcgccaaaaagcgaaatgcgaaaagcgaaatgcgaaacgccaaaaaatgcgaataatgcgaaaggcgaaatgcgaaaagcgaaacctcggcccatccctgcaccacaccccgttaaatgttgccatcatcattatcttattttttcatccataatataccgtagtgcgacatttgcggataatttagtgaattaaaaaaaataaatttaacaatatgaactaactacaatttaagtgaaacaaataaatgattctaaaaaaataaaaatattcaaatatacgagtaaatttaaaaaatgaaaaatatccaagcaaaaacagttttgcttacaattagcacataaatagactgttatttcattcccaaagtcaaaattattagctgcgaggcgatattgtattgctctaagatggcttataatctgttcgctaaattgctgctntgtttgaattgcctgcggcttcttttgaccaaatttgtttttatggttaataaattaaataattattaactttttaaattttttttgtttaggtgttgatgggttgccaaaatgaattcagaaagaagaaaagcaacttgcactgttgcttttgtatgcatcacacaactttggcaaattgaaattgtttaaatgcgattactactgacttatagcgtagaatattttgatattaatcacttatatataagtatttggatatattttattttttaaacttatttggatatttttattttttaaagtcatttatttgtttcacttaaattgtagttcatattgttaaatttatttttttaattcactaaattatccgcaaatgtcggctaaccccgaaaacatgtctagccaacaaaatagtctgcataagagtgtcgaataaacaccagcagagacgggaaaattcaaaaatgagttagtttcctttgagaaatttctacttaataaaaaaataataaattgtttttcgataatttttaatgtccgtttttgttaatgctgttttgaagaacaggcgagacggatgccccagtcacgtgtaaccaaaattgaaaaaaaaacaatttctgcagcatggagcaaaatgtgcagttgtttttttaaaagaaaattgaataaaaatattttcttatttgaattttgttatttaaaaaatattatatataagcccaatttaaattggct

SEQ ID NO: 26570 - DNA, 2520 bp, Heterodera glycines
aatggcaaggttgttattttacacgccataagtataatcgtctaaggctagagtgatttaaaataataaaaagaactttttgaaacggttttaacaaaattattaaaaggcaatcagtgagtgatcaggttagcaaacatttctgataacaaccgcataataaattaaattaaacaatatgaaacgagttaaatactgagaaaatgataataaatccaaacaatccgttttctacccatgaagcatattgtacagctccttccttttagcatccggcaaaacactaacggcattccaacgactggcttccaaggcagtgtggaattcggcactggaattgtaaagaatggcattgtgctcttcagcagacaacggttcaacgtctaaaaggaatttcagagaaacagtaacaaacgaaatttcaccttcatacaacggctgaggcggaggcatatttgccatgacagtttgcgatattggaggctgtttcatctgtggaggtccaactacgccggcaactgatgggtaaagcccaattggagccatcatttgtccggtcggatgaaccatctaattgttaaaatacgtgaaaaaggcggttaaggctagagattgattaagggtgggggcgcctaaaatttgtgaagagtaccagccatgtaaacatgattttttgcttttcaccacattttttcaagtgagtttttctaaaataaattggagaataggaaaggcctagcggcgttaatttagaaaaatttagagttttttgttgaaattgttactagtaagacatcatacattcttaaactttcatttctataagatgatttttgagtattttggtgggtgataaacccggtaagtgaaaacgaactgtcggttggatgaatccagcattttgcggatatccaagaacaagcggctgtccaatgaactgttgcccggcaggcactcctctgccaaaaccagcaactccatgatttggagccaattgagcgccgaatgacggtgaaattgcaagttgccctccagccgaaaccattccgtacggtatgcccccgatcattggcatagcttgaacaggcgcgactgcggggatgggatttgtggatgaatatggtatcgtcatttgcactggtctgtgaggaaatcccatttgcaatggcgcatgatttctttgctctaggtatttagaaaattgcgcctgatctcgtttattcaattatgacatttttaccgaatccacctgcagctccgtacccgtgacctaacatattgggggggccaccatgacccggaaatcgtttctcggcaggtccaccacgagttttcggtcttgcaagcttgagaaataaatcgcggccatgaaatttgtgtttgttcagttcaaccttaacaaatcggattcattagtatttcacatgtttaataccaaagccttttgttggtcagtttcagaagtaaaccgaacaatccttgttccttcgatgctccatcttcgtttctgtaaacttttgcacctcggcaagacatatagcgttcaccaaacaactaaaacaaacaaagggtaattctaagaattgtaaactttactcgaaacagtgccacatcatcaacatctggagccaaattgttcacaaaaagattgtattcaatagaccttagagttttaaggtgagaaaaaaccaaataatacttacatatgatggggcgaatttgcaaaggccaaattaaagcgcgacgtcccacttggatcattaggtaacttaattataacagattaatttcaatagacaaaaccccaagcgcaccgtcatcccattaaccctcaacatcgcagttcgagcagttggtccgtctcggaattcaacgaaacaataagtcgaccgcttaatttgttcaaataaaacgtggctattatgtatgcgttctcgtaataccattttgacattagtaacatcgcctgcattttctccaaacgcttcacgaacaaaatttgcatcccattccggtttcaagtcgcccatccacaaggttgattcaggaggacaaagtgtttgttgttgttgcattgcgacgcttgaattatggaaatcttgatgtggtgtcatcatcttgattaacgtcgactgtttgtattatcctcttgaaatagaaaattttattttaattccttgtattactacatacataaataggtaagtataatatatgtatgcggtaatactggagaatctgggctccacccaaaaaaaaattttcttgtgaaaaatgaacccggggttttcagtgcttctgatcacgaatatgatatcaaaatttgcaaaataattgactttatcatttattttgaaatcatagattttagaaattttgaccaacatggcagggtaataaatgttgattgtttatgttttcgattgttctatgatcatctcattgtttaataaatagtgctgatcatatatggttgcctcactcgaaaaaatgcagcatttgatcatgttggtcaaaatt

SEQ ID NO: 26571 - DNA, 1445 bp, Heterodera glycines
gttattattattggggatagtattttaaaaaaagtgcttgggaggcagagagtttctaattttcaccatccccaaaattacaaaaatgcgaattaaaataattttttcagaaacgaaattaaaaataagcacctgtttaaatatttagaaatgattgggaaaaatgtagggtgcactgaaaaatatcaacaaaaaaagttattttgaatcaaacaattattattattgtcaagaaaaccttaacacaaaaaaaaagggttgggtaatttcacaaaagaacggggatgatgggctactgtggggaggaaattttttttggtttttcttaatggaaaaataaattccaaataaatttttcagataatgttttaacctgcatattattaaataagttgtggaaataaaagattaaattatttaaaggaaaagaagcgaaagataaggattgtagatgtgtaggtaaaaaaaagctttattgaagatatgatatagatgtatttgtagcgggaaatagctgaagtggtaaaaaattcttgagtttataattttgttacagagcatacaatggcttagactaagcctaaactttaggattaagcttaagcctaggctgaagacttaggcttgcttgggcctaggcctaaattgagactttattttttgtatttctataacgattcgggtggtataaagtttccgattaatgtttcgaaaaacaaacaaactgtttttgtgacgcgtaaaaaaccgactagaaccgatttcacaactttttctagtcgataaaattttataaactgacatcattcaaaaatgcattattccgggtttaaacatacgtaaacaaactgaaaaactattaaccctgcaataaaagatcgtttaggccgtttttagacgaaatgaaatccgaaaatttggattttcgactttttgttcgagcaacaatctaattcccaaatttaatacctattaaattattttcaatttcaataataaaagcaataaaaaaaaacacctgaaaatgtaaaagacatgacaaattgagatttggataaagataaagcatactttacatacaataaatgaacaaaaaataaagtgggaccaaagactatccatgcactattttttgtttttcaaatagcaattatgcaatgaaaatcctttgtgtgtcttcgttctgctgttcgtcctcgactttagcgtatgtattgactgcctttttcagtgctttttcaatgttaaaaatccaatggtcacgtatcatcgaggcatttagctaaaacattcgtaataaaacatatccatcaaaaaaaataacctggatttcgtagagggcggtgtgttttatccagcacaactccacacttttgttgtcagtgcatgtcaaatgcagaagatggccaggtggtcgaagatgctgaaatacgataaatgtgatt

SEQ ID NO: 26572 - DNA, 908 bp, Heterodera glycines
acttttttaacgaaaaaacgtcgttataaattcaaacgacgaaaaagtcgtttattaattataacgatgttcacaacgccaaacgatgttttaacgatatttttttaaaaataaattaagtatcgcgaaacaatgattgtagggaaataaggcgtgaaattgtgaaagggtcaaagcgattacgacgataatcataaaccagcggtgaaaaacggctaaaaattcgttcacaagatgtggatgatgcgggaattgacaaccaccgggtggctacagggacaacaagtgcgcctttcagggactgtcgtattggatttattcgccttgaattttagcaggtttagagtggggttttggatttttcaccttagctcaacgaccaaacactgcatctccttaattgcaaatccgatatcggttataatctgcataatttccgcatcaagttcggtatttccgtagggttgcgttaaatgcctcaatatttgcactttactattaaaaattcccggagaaacgtaaggtaaataccgcgaaattgttgccaaaatatgcaaaaaacatcgttaaaacatcgttggcgttatgcacatcgttaaaattaacaaaacgatgttaaatcgtttcttttttttaaacgactaaaacgtcgttttgtcgttcactattcccaaccactcctatacacccatcacacacacaaaaacgcacgcattcaatcatgcgtgaaaaccgcacgcgttcggtagggggtcaactgcgtcttgccaactgcatctcgccaactgcgtctgatgagccaactgcatcttagtaaaagggccaactgcgtctacgtaaaaaatcaattacctaatacccaaaaatctataaaattcgataaataacacttacccttatcctgttca

SEQ ID NO: 26573 - DNA, 1975 bp, Heterodera glycines
aattttttttcgattttcagtagctacctaatactgtcgttggtagcccccctttttataaaaaagaaaaatcaaaaattttttttctagataaagttgtttttggtggttttacggtcggagaatcctttttgctcaatttataaatttaagctacagtatgtgtgaacaatttaaacaaatgactgatgtcgacaaatgggtgggttggcttcactctaaagggattcaggtgacatatgaaatcaataagaaattcattcattaaaattgtaaatttttcccaaggtcgagtcccatcttcgcttattcactgccgaggccgtccgctacatgaccgatgctgagttccaccgatttcggctcaaatacatcagtaattagagcatttttaattggaaatatgctttttaaataaggaaattggaattttttaattggagaacctgaaaaaaaaaattgtttaaaattgtgatttaacaaaaaagcttagcaggggcatttgttgcttaaaacaaagtccatttacaataaaaatgatattgctttcatctccccaatccgttggcgagaggacgcgcgcgagttggccacccgttgagcagccgatcagcgaatggttggttcagtgctgggacagtgcggccgcctacggcgagcagtgccgtcgcgtgtccaaggcgcgcctattcaatgtgtgtgtttgtaccgtccgtcatcggcattttaaaccggaataaaattgatagttctagataaatgcttggtatgaaaagcatcctgctgtagtgctagttaattggtcaaaaagatgtcagcttctgctcagggactcccaaaaccccggaaagagtttttacaaattattatcataaaaaattgcaaaccaaaagggtttaataaaattcacaaactgtcactagtaatagcgctgaatttccgaaaaagtgccaacaaatttcagcatatttgcatgcattgccgcaactgtccggatgccatcgttgaaatgttccgtttggtggcccggtgtaaagacggtaggaatttgcaaatttttttgtgcttttgaatttttatgccgccaatttgcagacgacccgcaggcgtacaaagagctgctgctggtcgatctgaagagctttgatttttacgcgcgaatgttcgacctcaaaggcaatccgatgaaaatggacgcaatttcgaaggtatcaatttgtggggtggcgaggttcgggggttggtcctctcaaaatgtcattgcgtacgctgaattcactcgtatccgtccatcccattgacacgcagtcgatggttttacatgaatttcaatgcatcgcataggactcactttcgcttgcttttttttatcctcgtttaactcattttccaactgcttttccagattctcgagccccaagtgcttttcccggtgtttcgtaagctgaatacacacgaatatgagtccgttgttcaacgcgctgagaccttttacaatctctcacagacgcgcggcgccaaaacggaggaacagcagagatgggaaattgcgaccagtgagcgcaattaaaaacaaaacaatgagaaaagacactgacagagtatttgatatttactcaaaaaaggaggtctcacaataagttggcatttttgattttttttttttgcggtagttgagacacatttctcctcttttggcagatgaacttttttgcgacatttcggcatgtactcttttgcgggggttgcctttctgcaccgatacgctggtggcacctgttggcaaaagtagcggtttggtgcgtgcgagtgcgcccgaattaggagtacgtaagaaaatttctggggagaaggttttgtgtatcacttcctctacatccccttacaaaacacagtaaatttgctgttttaccttcaaaaaatgatttttttaaaattaaagtaaacaatgtcaactataatttaaaatttcaaa

SEQ ID NO: 26574 - DNA, 1275 bp, Heterodera glycines
ctcaattatatctcttatctttaccattctctctctctttctttctttttctttacagacttcactttcagtctctctctctcctttctctcgctctctctcacttcctctctccctttatcttcatctctctctactctctcccttaagtcaatctctctatcccattttttctcatccctccaactctctcttgatttctctctctctctcccttaactcacctcttattcaattctctctctcttcctttctttctcttatacgccactttcattctctctctcctctctctctctctctctctctctcgatttctctctcgctctctctccccctaaacttaatctctgtctcccattttctatcatcccccccactctctcatctcctctctgtttcttctctctctagctctctcacttcctctctctcctcactctcgctctctctctatctcttaacttaatctctatatcccatttttctctcatccctccaaccatactcaattttcactcactctctcttacttctctccttttcctttctcttaatttctctctctctcttctctctgtctcttctctctttctcacttcctctctccctttctcttcatctctctctcctctctctctaacataattcaatctctttatttcattttttctctcatccttcaacctctctctcatttcctctctctcttccttttttctcgtttcatactcaattttcactcactctctcttacttttctccttttcctttcttttaatttctctctccattatctcaattctctctcttctatttagcattctctctcttcttttctttctcttatgctccactttcattctctatctctctcaatttctctctctttctctcttacttcctctctctcgcccttaactcaacctcttatttttaatcttcctttctttctcgtatactccactttcattctctctctctcgctttctctctcgctctctctccaccctaaacataatctctttatcccatttttctatcatcccaacatctctctcttctcctctctgtctcttttctctctcactttctctcttcctttctcttcctctctttctcctctctcacataattcaatctctctatcatatttttctctcatccctcctactctctccatcttcctttctttctcttttcatactcaattttcactcactctctcttacttttctccttttcctttcttttaatttctctctccattatctc

SEQ ID NO: 26575 - DNA, 1154 bp, Heterodera glycines
tcaaaattgaagtgcccatacctcagccggtataagtcttttagacatgcgtttttttgaatattgtagagaattttgtgctctataaaatgggcctactcaaaatttccagaaaaattttcccaacccctagaaattttttttgaaatttacccctcgttcccagccaaaatgggctgatcagatcaccatgaaggagtgatctgatcaacttggtgttgctaccttttttgatcagcatccaaagttatgcttaagcagctgaaaccgagaagaatcgaatttgatatcgaatatacctaaattatgatttatgacttactggaaaagtctgtatgtcggaatcacgactttttttggtgggggaggcataacaaaaagagcgagagagtgcacgtggtataccggaaagaggctagagcactaagaaatagtgttccaacaacagagagtgcacatggtaaatggaaaagaagaggcaaaagatgaatttctcaacttaaataaataattcaatttatatatgttcttttctcagcaaataggggagtaattaatatgagctaacaataattaaggtgtttatcaaggtcccttatcacaaatataacctttttgttctcatcagatatcatctctgacaaagactcaactaaatgaaatgaatttgatcagattttatgcaattcattgcctttatcccctcccgtgactggacaatccgacagtggacaatccgacagtggacaatccgacagaagtggacaatccgacagtaaatttctattttaaaaaatattttcaagtcattagatgcattttactggccaaatgcattttgaggtgtccaatcaaaagtaaacttagttatgccataagtatggatgcgatttacagtaactaaaaccgccaaaatcgttagtttttaggttctaaaaaactataaattgcatccctagtcatagaaatagagggtgatcatggacgccaaaatgctctattggagcgtaaaattcaatgtaaaatgccaataaaatacatcagactaaccatctgcaattgggctcaaagcttcaaagctatactcgaacccgtcggccaataaaatttctctgcgctgagatgtttcggaaacaaagaagattttttcattt

SEQ ID NO: 26576 - DNA, 1181 bp, Heterodera glycines
aaaaattcataacaagaaaactttttttgcttttatttcgtttaaaggagctcaaaaaagcatttctgtattgaaattttcgattctgaagtcactatgcgtcattaaaaatcagactttgtcagcaaaatattaaaaaattttggctttatgtcattattttagagtagagcgggaccgggaccgggccgggaattcccgttcatccgaggtccctgttcccggtcccggattttgaaaagctcaggtcccggtcccggttttgctcaaaattcccagtcccgctctactctacattattttattaactatttcgagatttttcatcactaaaagtcgcggccctagtcattaaaaatctgttgaaaaataatccccccgtctccattaaaggccctgtctccaattatgtccccctttctaaagaggttgaaaaataatccccccggggccttaattagagaaaatacggtagtcataaaaatttattctctggggtttttggggtccccgatcacgaatccttcaattattttgatcaattccgatttcctaatctaaatttgaacaaaaaatcataattttaaaaattcaaaatttcgatttttattcgagttcgggttagggattagaaattagtcaaaatacatctcagattcgtgattagcgaccttttaaaccccggataaaaaattatcatggttttttatcttaaaaaaattttgcaaaacaaaagggtccccccttttgtttcaaaaagggccacttttacagtagcgccaaatcaccttttccgccgaaaatcaattatcgtaatgctcccaaaaaaaggagtataacctaattattaaaataagtataaatgaagacttacttaacattttgatgcctattgtgtaagaccatacacattaaggcagtaaggcctccgttcgtcaccacatccaaacattgtggccaattcacgtaaattagtcgaagggttggcacggtcaagctgatatgaagcgcggtaaaccccttcgaagtcttaagcaaaaaaaaaacgatgattaagtgttatagagagttgtgacggaattttacgctttatatcttttaattgagaggtactagttgggtttgtatcccccttttgggtcaaatttttcaaaagcgtaaccagacagtcagacagtgca

SEQ ID NO: 26577 - DNA, 1491 bp, Heterodera glycines
cttagagtaaaaaattgaaaattttgaaatcatgtttccttctgcgttctcccaggggtattattttgtaaaaagtcttctttttcccaataaacttttcataccccatttttcgcaccgtgaatgttatttttattgaattctgaaccggtttgagtagattagagtacaaaaaatttaaaatttcgaaatcatgtttcccactcccttctccaaggggtattattttgtaaaaagtctttttttccccaataaacttttcataccccatttttcgcaccgtgaatgttatttttattgaattctgaaccggtttgagtagcttagagtacaaaaaattgaaaatttcgaaatcatgtttcccactcccttctcccaggggtattattttgtaaaaagtcttttttttcccaataaacttttcataccccatttttcgcaccgtgaatgttatttttattgaattctgaaccggtttgagtagattagagtacaaaaaatttaaaatttcgaaatcatgtttcccactcccttctcccaggggtattattttgtaaaaagtcttttttccccaataaactttgcataccccatttttcacaccgtgaatgttatttttattgaattctgaaccggtttgaataaaattcttaaaattttttaattggttttaaatatgcgaaaactttaggcttagctttttagtgaaaattcaatcactcatagtttttcgcgttctgatcagaagtgcaccaaattttgcagggtaacagctgagaagaagaggtaattggtttaaatttccttcccattttgtggaatttgaaattttttcggtattcttattttgcgtacatttcgaatttttgaaaaaataaattcattaatattttttcagagagtgatctgaaacgcaccaaattttattttcaagttaacaaagccctctgatgcttttactatcaaaaagggcgatgaataaaaattctaaaaatttttaattggttttaaatatgcgaaaactttaggcttagctttttagtgaaaattcaatcactcatagtttttcgcgttctgatcaaaagtgcaccaaattttatttacatgttaacaaagtcctcataggcttatatttgaataagggtgaagaataaaaaatttttaaagttttttccttatattttggttatttcgttctactttcggtggggtgcttggaaaagtggaatcatgcgtacccgtcggatctgacaagttaagcaacgctggcttactagtcaaaaggatgggggccgtgatgaaacgaaaccagcactgcttaccccgcggcacccggcacggtcccccgaaggaatggatttaattgaattctctccttcggtgatttttttccattaggtcgaccgttagctttcgattggtctagtcaaatttttttattttttaaaaaaattttgttttttgaagtgttctgatgaagggcgggggggg

SEQ ID NO: 26578 - DNA, 1576 bp, Heterodera glycines
tcaatcagaaccggctaaattttcgatccatccaaccaatttgggtatttctgatcacttattctgatcaaaagtatatgttcagtcagtagcaagaaaaatgttaaaaatatatatatccccagcacgaaactttgggaaaacgcaaatggcacaattccattaattagactaatcaccaaactttgcatcccaggcaggccatcacgccataatgcatcttggcattctcctcaccacagacggcacaccgcgtttcgctgccaaagtctgaagcatttttttgtttaaaatccaatgaatgataatttcaagaatttctttaaggacaaagcgttccttgaaataaggactaaatttgctataattgggtctttccggtgatcaagcagcggtcacactctttatttggaatgtactctttaacaccatcgggggtctggtgaatgccaaggccatctctcctccatcgcggcggcgcggctccataccatcgctggttcagaaacaacattgtcgccaccggcggtggggcgagcgggcgggcgggcggtgagagtgaaccgctcgcgggcggcgacggccggtcgcgcaccgcccccggcagcccgtccgcccggcgacgacggctaccactaccatcgctctccgtttccatcgcggacggaccaccagttcagcaggagtagtagcaaaattcgccgaaatgtgtgtctgtctgtctatctcttctagcgggggggggggggggcggaggcggtggccttgttctttcgcgatcggatgcactgattagaagaagcacaatcagaccattagtattcgtaatggggtggagggggtggtaatgaaaaaagaattttatttgagactgtaatggattgagattttctgagttttcaagaaccgaaatgatggatcgagaattatttggttttaaatatttaaattgatcaattggtttttggggatgattccgagactgaaatggaatactccgagatttttttttggatttagaaaatgaattttttgggtcgggattttgacttaaatgggatacatattctttcgagaattttgaggtcccgcgcaaatgaacaatgatcgaaatcccagagagttagttaaaaaattggttttttcgttgataatttttcaaaaaaaaacaactaattttttgaaattttttattgaaattgagaatcttaattgctttcaaatgataccaaaaaaatatttatttggctgactttgacaaaagccatgccaattttttgccgaaaaacagtacgcatcggggcagtacgagttggcctagtatgaatttgggtttcgtctttagtccatattctcaagaaattatttagctaacattttgatcaaaattccaacaaaaaaatattcaagaaaaagtgaaaaattgaaaaaaaaatttgctttaactaacaggggacaaaaaatgaagattctcagcaaaattttcaatttccctagcccaaatttggcgaaagttttagtccaagatcaaaatgttaaaaaataagtctcgagagtctcgggaattatgtaattc

SEQ ID NO: 26579 - DNA, 1256 bp, Heterodera glycines
tcaaaaatttgtaaaaacaaggcgaagaccataaatttattaaaaacccattccgctgaaaaacttgaattgtaaacctaagaacttttcagaaaaccgttaaattttttcgtctacgcagctaggatgatgctcaaaaaatcaaaaataccgattgaatcggcccacttcgtcgagaatacgttcacccgcctgaaactcaattggcaacatcaaaacagaaagtgcgggacagtaaattgccgccaattgaagaatttcaatgattcgcgaggtctttcgatttgagtaaaaattctcagttcgacgagcgcaaatgttaaggatacgtaatgagtgtggcaatgcggaaaaagttaacctttccgggaatttgtccaccggaaaacgaaggaatataagttttgcatttgaaagaaacatgttcaaatttgaagagcaactccaatcctgagattaaaataaacaaataagcagtgttttaatattcgcaaatcattacaatgtctgagaaggccacacttttcaaatttggcagttgcgctgcgatggctttcactgtgtcagacgaagttcgtgtgtcatcaaaacagagatgccgcaaattagggacatatgaccacagctgatcgccaacaaaaacttttcgtgaatacatccccttcagtttcagttcgtgcaagtgtcttccgcaccgtccaattaatgaaatgtacttgccaaacttaagaaagcatgatataatcgggatctattcagtttacacgaccataaaaaaagtcacgataactttctaaaattccacgactttttgaaattttgcagttaatagaggattagagccaaaaatttatcggtacttatttagtttaggggctacttttaacatacattttcagatgcctataaatgtattcattttatataatttttaagcatggatattttaaaagactttaatattcaaaatttattaaccctttgcaaaaactagactttcatcacttattaaaacaaaaatttttttttgttaaaaatgtatattaaaagtacctcctaaactaaataagtaccaattgatctgccgattggccgatttttttagcgaaaatggtttccatatattaaaaataagagattttaaatctaaatcgataaaatttgataattgatgagatgaaaaaagattgtgagattagagatcggcctgtacctggattcgggcctgttatttttcctggatccgggtacgggta

SEQ ID NO: 26580 - DNA, 1963 bp, Heterodera glycines
atttttatataaaatattttgtgccattttcccaccaaattgcgcacccccctccccatttggtgccgcgcgcgaaaatggctttttcccaccgagacaccaccgtccccattttttgttttacaccccttcgttttgtgaaaaacctcactttatatgttttcccaagctttaaccgtttggcatttccacttatgtgcgcatgaggccctaaatttggagaaaaaaaaactaaggcattgagcagcagaaagcacagtatatgtaggggtaatatataaatttcccccaagcctattggcttaatcactcagaagccattaaaattaaacccaccggcaccactctctccaccgtaattaaatcccaacaaaatcccctccttttcgtttttatacaataattccgccttttgccgctttttgtcccaaaaactgtgctacagtatttttccgaagctggcacaactcggcatagctgctgaactgcttgcatttgtggccaagaaaccaccctccaaacaaattattcaactttttaaaacgcaccaaaagcgagtcctgcattggtcaccgaacaaatccgaaaggattatgaagcggataaacatcattctcacataaaggaaaggatgatgttccatgaagaaagggcaatgagtcggcggggtcatgacggaagtaatcatcatggatggcaacaaaagcacaactgctgtccacgacgccgccattctccagcagagaatgatgccatcatctacctccactcagaaataaagcgacaaaccggcaccgacaaaatgccaccaacagaaagaaggcaactgaagctaaagagcgcaccgggcaaaatgctgatcaaagcgttcactgccaccagcatggcatttttcgttctgtttttggtcgcccactcatttgaattggctcttgcttttgctgttgtagacaaagatgaagcacaatcaacaacaacagaagcaaaaaaccaagccacaacatttattccaaactcgaggcaggatgatttggaagcagcagatgctgctgaattgttgggtgtacttcttgaagaccatgacgaaccacaacaacaacatgaatggccatataacagcaacaacaacaacagaagaaaagtggtgtcatcatcttcctcagtgttctcttcttcatcatcatcgtcgtcgtcgtcatcttatgaggataatgatgatcatgaccataatgccgatttaaagccggcatcattgccgagaatggcacggcggataattgtgcagcaacaacagcattacggcaatcggatgccacaacaacggcatcaacgtagattccgcatagatccatcacatcccatccacattctgttcccgttgccagcaagggaggggcgcaagactcaaaaccctttcggcatcaccattctgaaggcacgaccggtggttgatgaggtcggttttattaaaaaaaaatatgagcccattgattattaaaaagaatggatttatattccaatcgtaaattaggtatctaaacagatgttaaaaagttaggtaataaaaaccgaataaagtgcccaaattggtgcgatttttaaattgatttcttattttattgatcacattaaaaaaaattttggtttaaccaattattaacaaaatttttatattcaaccaaaaataagcacaaaattaatatgttaaaatgcgaattaagttcgagaacttttttttctcatcaagaactttaaacatatgtaaatattttaaatctaaaaattccctattttaaaattaatttttatgcaaaataccactatttttacaatacatatagggcattctggaagtgtaccggcgccaactgttgcctcgaaattcattgatcacccatttttaatgactcaaaaacatcggatgcgcatggacctaatgtggccattaatatgctggtggaaa

SEQ ID NO: 26581 - DNA, 996 bp, Heterodera glycines
tcgagaaaagacatcatcaaaaaagaagatcattcttgtgctagatggatatgaatatggatttgacaaaaatgagtcgatcggatcccagtattaaattaaataatattttatttcataatgaatttgagatttggaattctatcgctgcatttttcgaggcccaactggtaaaatttattgtccagcgaggcttcatgttcgatcagattggcatcgggatgagcaaggcagatataagattgggagaaaaacaaatgcgggacattgccatgggcagacggatgaatcggcacgtttaattggaaaatataccattgaatatttctgaaataaagatcagagaagcacaaatgagacttcggcaacaagccgcttcacaaaatccattgccaacaagacaagcaattgccaatgttcgtgagaatatgccatttgaagccattattgctggaccctcttcttcgagtctggcaaggaactacagaaactatgttgtccaagaacggggcgaaaggggtgatgatcagctgatttggccgataccgcacaaattcaaattcccgaaaatcttcgggtaaactttgtctttgatggatttgtcgataatctccggatgttggtttttgctaccgaatctggaagaaaccttttggcacggtttgggcagcatgcggcaatcgatgggacttttaaggtgtcaatcctatatattaaagttgagtgcctgtgtgtatgtgtcattgtttgaatgtggcgtggcgttttgtttgaattttgcgttaaaaatgtatttgaaaaaagtagagggagggaaaggtgggaaatagtgcactgtctgactgtctgttgatgcgggcagcggcgggtgggaggggtagacagtgaacagacgcgtgctgctgtgcagcagcagtctgctggatgcgtgcatgtgtgtgggagagggagggagtgggaaaaaagtgagagtaagtggaaaagtaaaagaaataa

SEQ ID NO: 26582 - DNA, 1000 bp, Heterodera glycines
tgtcgcactgtcttgacaaaatgccatttaaatcagtagcaattctgccaattttgaattcacaaaaacacctcggatggcctgaacagtgcgtccaactgttgcctgtccatcgttggcgagccgtacagctgccgataggtgtgcttgttccaccgcatcaccacgctttttgggcgcaaaagcaatgcatttgcgaccgattggcatgcgtcccgtccgtgctttactgtgccatgaaaaatgtatacaaatttgtgtctcaatttatgtcgttaacaggaaatgtttctagtccggtctggcctcgaattttagggtcatttaccagcgtcgactcgagagaagtcctcgtgttttggactggaacttggggggttttcgtcgtcaagaaaaaacggatgaaatttggttagaaccagggcatgaaataggtaaaaataattcgcaaaactcacatttaaattgacaaatgtgcaggtattcaaaatgggaaacaagcagatgtgccatcgggtgcccattcagcgattggagccgtgccgaacactgttgacgacagcgcaacacggaggtgtaaaagccgaaaaagaaaatgccaaaaatccaaatttgtttggtttcagcttcgagtcaaaatttactggcactcacatacacttactgcatttcctttttcctacaggcgtttaccggattaaatttttgaaatgccacttaagtttcaagtgaatttgcctaaagctagaccacaattccgagaaggttttgctaaatttttggagaattaagcgttttttggaccgacttgcagtgccgtaatccgccagccagggaaaatattaacattttcgtggatttgtttataattttcagaaccctttcccaagaaactttcaaaacattttttttaacattttaagtatatttctagcgattttttaaaatttcatgatgaattgatgtttttaaaatttccaaaaaaataaaatgacttttt

SEQ ID NO: 26583 - DNA, 2312 bp, Heterodera glycines
  unsure (1)..(2312): unsure at all n locations
cagacagtgcactatttcttcctttctctccgtggctatgcggaagaaaagaaggaaatagtgcactgtctgactgtctgcctattttcccagcgtcgctggtatgagcaaaaaaaaaaaaaaggtcgttcgggcgaaagtttttcaaaaatacacccctaagaaagaatcgggcgaagaattttcaaaaatacacccctaagaatcggacgaagaattttcaaaaatacacccctaagaattgacttttcggatcggtaccccccccccaagcccaaatcctggatacgtccctgagtacctggagtaattatggaggagaaaagaattgtaaacacctgtggaaaatgataaaaaattagggacggagaggaaaagtaaatgccaaagggaaacagcaaaaaattatagcaattttaataattaaaaacgaaaatcattcattatttttcatttgcctgtctcgatagtaacaattaaattaagaaataaaaaccggcgaagttgttcacgttaatgtccgcctcaagagtggagtacgggtgggcaaaattcatcttcagaattggcactttcgccggaatgtattcgacgtgacgcacaatgtccagggcattcaaaacacgcctcactttgcgcaaatgtttgcccgcgtaacttaaactttgagcttttttcttgaaaggaaattgagcgataacccttttgaggtgttaaagtgctcaattggacacggaattcccaggcagaggtcaatgtccgaattgtaagcaccacaaccattgactaaacggagaaggaacgaatgcattgggaaacaaaggccaacgttaccagtcgaaccaacgacgagcaaatgcgaattggggaacatctaaaagaggggcaaatggagaagaaaagaaaaggggagaaggcaccagtcggatttggttgtggagcataagacggacacgcattttcctggagaaaataaaaaaaattaaaaacgaaaatatatgaaagcagaaaagaggcaaaccatgtgaaagtgtggtcattctaaatcggaatgttattgaattaattgctctgaaaacacctggagattggtggtgaggtgtgtccaaattaatttgttgaattcgttaaattccttcgggaattgatttcggcaccccgaaatcgctttcataatgcgtctctccgcattcgagacgactccgtatttgctggtcttaaacaagcattccttacgtgctttctagttggttaaacaaccattgggcttggcatgccaatgtccctccccaatgtgtctcttttggggggccatgtggcatcaattccattgaaaagctcgcgttttacacagttttgccttccattgacaatgagctaaagaggaagaaaaaaaaaaattgagtacggcatttaaaagtcactttgtgagctgaaaccacagcggtgggggccgtctcaaacagaacgaccaaatcgttgtcggatgcccaaccgccctcatcaccattttgcgttcgttcggccgcatcccctcttttcgcgacacttttccgctcaacaggcagtgccgtctcaaggtcctcgccgtcggagacttcgccagcggctgtgccctcctccccctccaccgccttttgctgtgtctcaacaactcttttctttntcgtcatcaacttctttttccgcttcgtcttcggctttccttccggcaacgcattcgccgtgttttctcttctgcgctttcggtggacgaatgggagggctttttcacgggaaaccaaagcattcttttgattttgaggcgatgcgcaccaatcgtcgtcgccgtcgaaccactcgggaggaggcaaactggatattaaacatcattacttggatttaatgtactcaagcgaaaggtagcgggtaaattaaaactatttattttctaaaggttatttctccataatgctgattgttcaattatatgcctgaatttaaagtcactctgaaacaaacaaaaaaaagcttatttttatatttcgcagttttgagaagcaaaggatcatatagtgcctatcacaacttttttttgtgagggggagagaggtggagggcagcatactaaacgttttcccaattgacggactcacttaagggcgtaggccgtacctgacatccatgtcctcctcattgtcctctgtgtccagccagttctttcttcgtcctaacaatcgctgcttttggcgcgggtgcaatttcctcctcctcgtcgtctatttgtataaaaggtacacttgaatttgctctctttgcgacatttgccgttt

SEQ ID NO: 26584 - DNA, 1315 bp, Heterodera glycines
gaattttttgaatttttaaaaattcccggttggtcccggtcccgaaaaaaaatcgaggtcccggcaagtcccggtcccggttttgcccaaaattcccggtcccgctcaactctattaaaaatcaacagcggacgagtagaattgtaataaatgcttgactcgtatttttgcgaattcctctggcttgaaaatgtcaaaacccgtggagtagaccgattcgaagagaccttatttgttagctcaaattgtgatatttatgtcaccgaaataattttgacgcgtaactttaacatttctacgcgccagctgttgatttaaaaaaaattcaaacattggccccgaaacggaaaagtaccaattcggttacggcataaatgggaatttttcttttgttgtaaaatttatgtataccttcaaaacaatccaattttttcaaatagaattctaaggttctatttcgaattcaaattcgaacgcatttctgttgaaaaaaataaaaataatttattatctcagactattgtaagacagtcggtagtaaaattcgtttaaacttatgtttttgaaaatccttagttctgggctgtacagaattagaaaaagtaccaacgaaacgccccgtcactttttgtgaatcatcctaaaaattattagaaagtgaaaatcgccgccgccgtttatccatccgttcatttgtcgatgcattttcattctgctgaaattaccaatattttcatttattagaaatactttaacatattttaatttagtaatttttaaataattaaaaataaagtgaataaaagcataataaggaaaatgagtgctcctctgctgctggtcatttgcctttttgtgcctttcactcattgtcagttccatttggcggcgtcaaaaagtgccgaaatcgaaacggacggtgactttttttgggagaggggcgggaggggagtcgggggcgtttgggcgccggtattgggccgctcaactgaggttcaacggtagtgctgccgagtgatgagtgcgtcgtggctggtttggacatcggaatgaatgaaataatcatttgaggctcctaaaccaataacaacttaaattagccatcgtccattggttctttatcagttttctcgcctgttttatgatcggctcgggttgactttgtacggctgctaattgtgcattttgcgatgcattcggtacgttttgacgtcgatttgtgcgttcgtcgacggaatgaggcgccgatttaccgacattaggggcggcaacggacatcgaacgcaaattcagacgaaggaaaaggccacgactg

SEQ ID NO: 26585 - DNA, 1779 bp, Heterodera glycines
gtcagtgtagtgcttttcgccacttgtttttttttcgtgttggctttggtcgttggagtaatgaattaggagtcgctctgtccacttaattatttaaattagtgatgggtttgttgtagggtttattatgacttttaatttatgtttggctttttatggtgtcctttttcggtttttttaattgggtttggcgatccgtgtgtgtgtgtgtgtttgttttttttaattgggtttgtcaacccttgattttgtatgggcttggtgacccttatacttccggatgacgagcagttggggagcggcgattttgacgtggcacaggtgcagaccgaacaggcagcacagttgaacgaacaggtgcagaccaaacaggcagcacagtgaaggacaagcaagtcaaacgggcacaacaggacgaacaagcacggcaggacaaacgggcagagcggcaggcacggcaggacaaatgggcacagcggagcagacagacacaacagggcgaacgagcacagcgggacgcacggcaggacaaatgggcacagcgggaaaggcacggtcccgggtcgtggcaccaattcttgtcgtggcgacaagaaatttgcttcgaactctgcggggtgaaggggacgggaaggggatgaaatgggcgaggcgcgcagagtagccgttcgggggaatgtagggggtcgggaccgatcggagagcgatgagtcgtgccggttttcgtccaggcaaatagaccaagttgggcacaattttaataagagtatgtttattgtgtcgacctcaaacttgggtaattaaaccgtcccaatcgggacggtgagggaaacgaaaaatgggggacaaacatgataatgtgaacggggaaaagggggcacaaaaacggtgacagtaaataaatcagaaatggaaaaatgtggcaaaatcaaaaggggtcagaacggcgaaacggcgatgggaaaaggaagggcattcgggcaacggctggtccaaaaggggccacacaatggcaaaggaaagggagggcactcgagcaggtgcggacagggagggcactcgcacagacagagagcagcgaaggccgggtgcagtgaaaggcggtgggcgggtgccgggaaacttcggagggaaccgtttgtctcgaatctgaaatttccggaaaagtccacccctttaaatacgattttttttgcaccaaagtacgctacaatttctcattttaattaaaatatgtttttgtgtgttatccgtttggatttgccatttttccattaattgtttgcttttccgttttccctttacaattccaatttctttaatatattaattattaataatttgtttacgaacaatccttaacagaattcgcaatttaatattaattaattttcgttcctttcattcctgaggaaatgcacttttccttttcaaacaattttccgttattcatttcaaaaggttttttcatttttatgtaattatattttcgatagttttttataatattatttttccaaaataaatgtaaaaatattttttattatttatgttttatttttccccattttattttctattgttttttatttttcctcttttttattttgggttttatcttaggatttcgcgttgtcgcgacactcccgcgcgaaagaggaaggcaacgacacataattctatatagaataggtagtagacatggaattaggaaaatcataatgagtatgaatatgataataataaatatggtgaaaaaattggttttaataagagtgt

SEQ ID NO: 26586 - DNA, 1493 bp, Heterodera glycines
tttgaccattccatgggcgagaatttggacatctgaacttcttgcatatttttcaagattttcccgatttttacctgctttacagtagtccgcaatgacctcacggaggtcaaagggcgtgttgcggttctcctcgtaccactgctccaacttcttgcgctcctcagggaagtgcccgccagggtagtagtcctcaagcggcggaagagtgtccagcacaacaccataatttgcagccttaattattgattatttttggttttatttattgattttttttactttgttgaacttgtgcgggaagtatttcttgttgtccactccctctatttccaagccgaacgtcttcacaaaggaagccaacttgatggggatcagtttgtaactgaaaaataatcgattattttatattattttaacacagtttacctgtcccggaagattgtcgttgtgatggctcccctcttgcgggccttcatctccagcaggtgattcccctggcgcacgagttcgggacgcacacccatgcgcagcatctcgccgtagatcagcacgtgatcgtaacgtgacccttaaaaatcgataaattttcctttttatttttgttaaaatttgtttacctgcgtgggcgtaggcatatgtggtgacggagcgtggtttctctccctcctcatcatagccaagcatgtagttgttttctgcatcgttgtcatcgctgtcgtcgtcttccgcttccatgtcgatgaaggcatttgcagcaggattccgggccttgttgttgttgtctccattcgcacgcttccgtttgcggcgcttctccgcagggtcaaggccgaggacatcagcttcaaagtgcaggagccacttggtgaaggccgtcagggggtcgtccacaacgtaggcggtctccacttcggtgttgtagaactcgaacggtgcccatgcgaaggtcctcgtcagcccacagattccacagcttcggtccagtggctggtcccagatgccctttgcaatgcattccgggcaagtgtcgtgcgcgtagcagaaattcacctgaaagaaatacctaattttagtatattgtgtgtcttatttgcctcatactcgaagcgcaggagttcagggtcgggattgaagtccgtagtgcattaaaaatggaaataaatgatacactgtaaatttttattcctcggactgtacgggaagcagcattatggtagcacttggcaaggttatcatttcttgctcagattccaacaatcattgatgaacttgcaaatatctttttccaaaagtctgtggactctttctgaaaataaattctatactcaagtattttccacttattagattttgcaggcttattgctgcatgttatttgacacttcttcaaaataacctatgccctttattcgttcaaaacagcatctttgttgtttcgctttggattgacaagacgcgatgataaatagctcgagcgcaaaacgcgtgca

SEQ ID NO: 26587 - DNA, 1596 bp, Heterodera glycines
ttttagtttaaataaatgattatcaaaattaaatggtgtcggtctccaggttttactctgcggaaatcattttggcgcttcattttctccattctcggggcatcatttaccgtgatttgaagttggataatgttctccttgacgccgaaggtcacatcaaactcactgatttcggcatgtgcaaagaaaacattggccctggcgatggcacttcaactttttgtggcactccgaattatatcgctccagaaattttgatgggcgaagagtacggttttagcgtcgatttttgggcccttggtgtgcttatgttcgaaatgatggccggaaggtcgccattccatctcccaacaacggaagaggacgaacaaactgctgaggaccttctctttgtgagtttttgctggaaagggcggggaattacgtgatgggtgttttacgttcgccccttccccatatcattttcctgaatcagtccctcgaatttctcacaatcagtaaaaaaaatttccggcgggaaacgatacgatcctgataagcaagtcaaattcttacggggattcatggcaattcgcgaaacttttgaagaaaaccgaaattttaatgaaattggatttttctgaggctcatcgacacctcaggaccccctgccttccaaaatattttgaatcacggccaaaaattactaaggaaaaaactgtcgcagaaaaaatttgttgtcctttttaaatttagctaaaattttgaccgcgatgtgggaaagtgagtcgaagtcctctccgatacagccccatagaaacattagggcaggggggaatgtaaggggattagaaacattaacatggaagggggaataattaaaaacaatttagaaaatgataatggaacatcaaattcgcattccacgccatttaagcgtgagggcagcgaatgtattgaagggatttctaaataaagtatgccaacatcgcttaagggaattgggatgttttccttttggttttcagagtccttctgagcgtttgggctgcaaaaccgacttggaggagggactggcagacattaaaatgaacagtttcttcaagtcgaacatcgactgggaattggtttgccggaaattctccttttccccaattattcaattcaatgctttgagcttgaacagcgacagatagcgcctccctataatccaaatgtgtccggagacagagacttacaacgatttgacacgagtttcaccaacggaaatccttccctaacgccgggtgagccaaaaatgagtgaattaagaatggtgaggtcgatttatctgcaccgcaaatagattaaaatttttggtttaaattttaaatgtacaatttacgaaattaaatcaactatttgattagatgaaaatttcaggtgtaatcacttattgttatttatttaattctgattataatatttcggattgaaacatacaagaagccgatttttaggataggtgaaaatttggaaaaaattcttttgagaaaatcttacctattatattaaaaaaagccaccaagaaaatttgaaaattaaaaacctcagtttttttctaaataaataaattta

SEQ ID NO: 26588 - DNA, 1030 bp, Heterodera glycines
  unsure (1)..(1030): unsure at all n locations
ccccccccccccttgttcagcaggtatgcagcagaagtcacttaaataaaattaatgtgtttatccaggggaaaacagaacaccacataggaagatgaccagcaagcagttcacaattggaatgaaatgagaggggcaatgctgctatgttgccaacagtatcgtatccaggaaaaatttttggggggagggcttaatttttcaaaattttcatcgccctagtgatgaagcaggaatttgtggcggttttgttccaaaaatggcattttttttttttgccattttggggtcaaattttcaaaaatgatggtacaatgtgccgttaaggcgccatcgggaacattttttgtaaaaattttcaaataattttttttgccaatttttaaaatttttcacgggatacgggcctggtttacaatagcatagcgaagagagcaatacaacacacaaaacaatataataataattaatgaatgaatgtcccgtccatcatccagcagatacctccccattctcgcaatctccgcaggcattccaatggcatggcattttatgcgtcgttgtcccggaccaccacatttgccgatttggaaaggccggcgtcagcaaaagtgccaacaacagagtcggcatttttttccaccaccgaattagcagcagcggcagcaggacaaaactcgctccggtaccagtcgggcgcgcagttcaattgtttgaccgggaaattggtgaagagagagaaattgtcgggacagtccggatggatgaaggcaacatcgaagagacgctgtgaaatggaggaaatttaacaccaattttanagaagaattgagatggggtggtgggtgctacactacgtttcccgagtacacccccaaaatgaggcctgccaccgaatttatttcattccttgaattttctaaaacaaaaaaaatttttttgttcgaattagggctagttaactaaaaattttgcggtgacgtttcggtcggcgacgtttgttttgtccctattccctcacccggaaatt

SEQ ID NO: 26589 - DNA, 977 bp, Heterodera glycines
aaataaagggacgcgtcgatgcctttgtgggtccccgttcgtcaaatgagccaaaatcattccaattgagatcactctgcacacttatgcccaattatggatccatcccttctctcacgaataccaaagcgtacccattgcttttccttttctcacccccccccccccccccccataaagttccccaatgacgtggccaaagtgaaaagtttggcactgagtgcgactgctcgacttcgcgaggtttacggcacaaattacaaagttggcacaggagccgaccttttgtgtaagcaaaagggcacaatgcaagcgaatgatttgtttaaacagcaccagcgtccggagggtcggacgactgggccaagcagactttgggagtcaaattcgtctatttggtggaattgagaccacaactgaggggtaagttcggctgaatacttgcaaatttggctttttaaaccgccttataccaaaatgaatctgtgccgtttcagtgtccaatggattcattctacgccaggaggaactcgtgcccacggcgatcgaaactttcgaggcgatcaaagtggtcattcagggggtactcgtggagaatgtccttccatccgtccctcttccctcctttggtaaatcatttttggattcgcattttctgttgaccaatcatttccaggaatatcgatgaaaaacgccgcaaattcgcaaccaaaaagttttttaagcactgtcacagcgaaaataacaattggcacaacggaacaaatgaaaaaaggaaccacagaaggaggaggaacagcagaggaggaaggaggaaaggaagaagaagaagcacaaaaaatgcaagaaaaaggaagagaaggaaaagcaatggaagaaaaagtaaaagaagaaaaaggaagggaagaaaaagcaatggaagaaaaaggaagagaagaaaaagcaatggaagaaaaagtaaaagaagaaaaagcaat

SEQ ID NO: 26590 - DNA, 1018 bp, Heterodera glycines
ttttcagcgggtttaaaaaatctagaaaaattagtaagcatttgtagtgctccgatacgtatctctgcaaaatttggtgagccgctgatcaattacaaattatttatggacgatcaaattttttgaaatttttttaagtgcaaaagtggtgggtgtctgcaaaaaattttcaccgggtttaaaaaatctaggaaaataagtaagcttttgtagtgttccgatacgtatctctgcaaaatttggtgagcccctgatcaattacaaattatttatggacgatcaaattttttgaaatttttttaagtgcaaaagtggtgggtgtctgcaaaaaattttcaccgggtttaataaatctaggaaaattagtaagcatttgtagtgttccgatacgtatctctgcaaaatttggtgagcccctgatcaattacaaattatttatggacgatcaaattttttgaaatttttttaagtgcaaaagtggtgggtgtctgcaaaaaattttcaccgggtttaataaatctaggaaaattagtaagcatttgtagtgttccgatacgtatctctgcaaaatttggtgagccgctgatcaattacaaattatttatggacgatcaaattttttgaaatttttttaagtgcaaaagtggtgggtgtctgcaaaaaattttcaccgggtttaataaatctaggaaaattagtaagcttttgtagtgctccgatacgtatctctgcaaaatttggtgagccgctgatcaattacaaattatttatggacgatcaaattttttgaaatttttttaagtgaaaaagtggtgggtgtgtgcaaaaaattttcaccgggtttaataaatctaggaaaattagtaatcttttgtagtgttccgatacgtatctctgcaaaatttggtgagcccctgatcaattacaaattatttatggacgatcaaattttttgaaattttttaagtgcaaacagtgatgggtgtcttacagcttaacaaggcccaattaagattat

SEQ ID NO: 26591 - DNA, 1336 bp, Heterodera glycines
gatcccaaaagaggcatcgatgggcacgggacgctttgaggatcggtacggtatttaaattttttgattctcaggccaaatccaattgtgccaaaataaaaaataaaaacatagcttaaaaataaataaattaattacatccatattcttcggcattcagatgaaatttgatgcataaattatacatcgagaaactgtggcacaaagtttcaaaatataaaagctacacttttggaggaaatcccacactcgcagcataattttaaattattttggcattaaaaataaattcttcgccgacggggggtgggactttatagcaattggctaattatggcattaaaataaatctcgcggccaatgggggaaaaaactttattgctaagatgcaccaaaactttgactaaattttttttcacaaaatttcatcgtttacttgacaaccgaaaagatactagtttaaatcattgtttaaaaatgattgtatatttatttgataaccgaaattggatttttttttctttttgtaaaaaagttcgctttttgtctgagtcatcgtatactgtaaaagtggttacggtttagctgtgacaatgggacacagacattgaccatgtcgctcgacaacatttctgaggcaaaccaagtgattttgctccgattgttaactgacaaaatgctgaatgatcagccgcccaataacacaattatgctgaaaattttagaaaccattaatggaaaaaaaggtaaacaaaataaaaaaaaatttgtaatttggtttatgatttttcgaattactggaaatatccgaaatccggatttttggattttgacatttttatgtcgatttcgactaaaacaatttgtctttaaattatattttttgtggcaaaagctttgaacttttttagaaaacattgtccgaaaaaataatttcaccgatcagtgatcagaaaaattatcggacccgccaaatggacagaaaaaaaatgtgccaaatttttcaaaatgccaaaaaattgatgcgagttaccaatttaataaattttaaaatttttcgtattcaaatttgaaaatttgtttagattttgaacagctgagtgctcattttttgattaccgatgaatcggtagaagtctacatgaaaaagtatcgagaataaaattaacaaattaattaaaaccaattaaaaaatttagtcaatctaaagaaaatgaaacgtttaatcacgattttgaatttccaaatcaaacttttgaatttgatctgcaaatttggatacaacagtacagctacaaattacattgcgaaagtcaagcagcgcggatattttccc

SEQ ID NO: 26592 - DNA, 1305 bp, Heterodera glycines
ccactgatgatgccaataacaacagcgacgacaccgactccaatgcggcactttgcttctccacatccgccttcgctgtacccacttcgggttacatcgcaagcaatgttcgcccgttccatcggttctccactgcctccacggatgactttgccggactcgatgatgcattttggtccacctcatacttctccactgcctccacggatggcgccgccggttacaatgatgcattttggtacgtctcgtccttctccgatgccttttcgtatggcagcgaggcaaatgttcccatctgccgctgctccaccgcaacggatgacggcgcccacttcgtttcttcccacaatggcttctccccctccgttgatttgtgctccatcctcttctgctgctgctccacgactgccacaaagccaaccaatggcagcgacaactgatgccaccacgccacaatcatcgaaggtagagcagacttctgatttagcaacaattttttgtgcaatgtttgaacctatggttgggttaaatgcgcagcgtggctgacttgtcctgtttaggctgctgagaagtccggacaagatggatgcaactccgccgccgccgctgttgatgatgatttggcatgggcacagatggaaattccgcccgagtttggactgcccaccaaattcttcagcaacaaggaattgtgggaagataacaggtgtgaggagagggagagggttggatcgctgttattttacaacattccatggcttgttttattgttaattgttccaagggttggttgctcgtcggcaggcggcagacgcggcggtggcgcgggtcgaaaaggcggcggacgcggaggccgatgagcaaattgacactcaccgattgaagcaacccaattttttgtgatggagatgatttgcgggaacttccaacaaacttttcgatgtccttgacttttgtttgtgtgtattattcgtgatattatttaaatgcgttttgtgtaattggctcttttcagattatgcattagaggacggataaattacttcagtatctctgtccatttatttaattttcttcgctaattaatccgtatttttttagcattttttgattgtttttttaattgttttcccatttttgatggcatcaaaaattgttccaattgccgtttcgccctctttcaactttttgcgtcgtccattgccttcgttggtctctcttcgttctcttttcaaatcgccattggacgcgccgttctgtggcatttacaggacaaatggcgggatttgccggacggatgacatt

SEQ ID NO: 26593 - DNA, 663 bp, Heterodera glycines
  unsure (1)..(663): unsure at all n locations
aaaaatcaatttggccgttcgttggcccttttacgtcgctccctccactcagccttctgncctttgtccttcattgcttgctgtgaattttaaggccttttgtatccaccaatcgctgctgccgtgccgttcttttgttcaaattcctagagtggagggggaaggggaaccagagggggggggggggggttaatttgcactttctcatcattttgggtcattttaaatacattccaatcgtcttagagcaattttgaattggcagccgatttttccaggaaggcaaaggaggaaaataaacgctagtcacaaaaaagagtaccccgtgacactttaaaatgttcgccttcgcacgaccgacgaagcccgactcggcgagcaaactgatcagttcattccatccgcagaacagataaagcacactgactgatgaagccaaagcacaatccacgcgatcacgagaaagacgaaaagcacgagggattcggaggacggagaggaggagggacggttgggagaagagccgacactgaaatgggaggaagaggaatggggggggggggaggtttatttcctactcacctacctttttagggcggggtttcactgttaaaaacataaaaatcttttataccgcatatttatcttaactgctcacatttt

SEQ ID NO: 26594 - DNA, 967 bp, Heterodera glycines
tagaaatttttcataaaaaattctcaaaatttcaaaaaaaaatcgctgaaaaatttttcaaaaaatttttttcatgaaattttcttactaagaaatctcctaagaattttattatgaaaaatttctatgtttgaaattttttttttaaatttttcggggggaaacgacgggggagggggggaatgaagtgcacccggatgattcaaaatttacttaatcccaaattttttgtgcctggtaaaaaccttctactttttgaagtttcattttttaactattcccattttttgcataaaacattctttattggtgggcgtttcaactgcgtctttttagataaaataatttttctattttatttttcccatttttataattttcttttttcaaccgtttttgtcagattgtcaagcgtgagttggccaaggacggtttcgacattgtcatcccgcagtgcagtccgttgagtccgggcgaactgctcggctgtactgcgcccgttctgcccaaagatgtgacggcacttgtgtaaatttaatttaaacgaattttaatttagacataaattactaaaaaataaatgcctttaattcaaaaaaccttcaattttttaatttcttaaaaaataaatttgcactttttcgggtgggcgttctgctctctgcataaaatgttcattaaatgccatttttgttttaatctttcagctatttgggcgacggtcgctttcatctcgagtcggcgatgatccaaaatccgtccgtgcccgcctaccagtacaacccgtactcgcgtgagttcacccgcgagcggtacggcactgagctgatgttggccaaccgtgacgcggcggtcgcagtgacacgcgacgcgcaatgctttggactgatccttggcacactcggacgacagggcaatgccaaaatattcaatgtgagtgagcagcagagggggagaaagagagaga

SEQ ID NO: 26595 - DNA, 1077 bp, Heterodera glycines
  unsure (1)..(1077): unsure at all n locations
gtagggctgtgcgagagtctcggttctcggttcccaactcgggaaatttctcgggtttttcgtttcccggtctcggatttttagtctcggaaaccgagaaacttttacactgttaaggatgactatttcggggagtggggatcgccagcgaagggggaaaagaggaaaaattattaaattttgaacatattttttaacaatattcatgaaaatcccaaaaaaattccccgtcggcgcctaccggcaacgccggacccccattttccccaaaatgtttttggaaaaagtacacaaaaaagcgtttttaaaagcaaaaaaatgctgttactttaatgttgagactcctacgcaaaaattctggttgacctaccctctttttaatgtgtttttgattaaaaaaaatacatttgaatcaatttaatttaaatttctcggttctcgattcccgagtcgagaaatttctcgggttttttgggtctcggttctcgtatcgtttcccggggtcatttctcggtctcggtttctcggttcccggtaaaaatcacttctcgcacagccctacatgttggacctggacctggatttactgaacaaaatccaggaaaatccaggtccaggaaaaatccaggctcctcgagacctggatccaggactggacctggattttttataatttgttttaaaaagcaaaccaatgtttgaaaaaatcaattaattgcttaggaacgtcttctaatttataataataatgtttttataaccaatttatcatttttgaaaacacgaaaaataacagacatattgtatctaataatgcggtaaagtagggttaagccccgagccctcggggggcaaaaagtcgggggccggggacctcggggggcgacaaatcgggggccggggcggggaggagttaattgtcggggggtcgggaccccgatcggggaaaatgacaatttatttttaaccanaaaaancaatttttctttttaaatgctcgtaaatggtcatttttttcactttaaatcatatgattcgttagcgccaataagagtgagtccaagctggccttttatc

SEQ ID NO: 26596 - DNA, 861 bp, Heterodera glycines
tccgaaggattcggtctccccataatctgggcgcatcggtcggggggactgccccgaaacaaaaaaatcgattttttcaagtgtccgtttgggtactcaacaattatggggagcaaaatccaacgcagaattaaagtacaggctatagggaagctattccggaaggattcggtctccccataaatctgggcgcatcggttcggggggactgccccgaaaacaaaaaaatcgattttttcaagtgtccgtttggggtactcaaacaattatggggagcaaaaatccaacgcagaattaaagtacaggctatagggaagctattccggaaggattcggtctccccataaatctgggcgcatcggttcggggggactgccccgaaaacaaaaaaatcgattttttcaagtgtccgtttggggtactcaaacaattatggggagcaaaaatccaacgcagaattaaagtacaggctatagggaagctattcccgaaggattcggtctccccataaatctgggcgcatcggttcggggggactgccccgaaaacaaaaataaatcgattttttcaagtgtccgtttggggtactcaaacaattatggggagcaaaaatccaacgcagaattaaagtacaggctatagtgaagctattccggaaggattcggtctccccataaatctgggcgcatcggttcagggggactgccccgaaaacccaaaaaaaaattttttggataaaaattatttaaatgaactgactagataatatttaaaataggttaagctcttcctttcagtatccctgcaaagtttggtgccctgaaagtcagtttctgaaaaaaaagttaagcctaaactttt

SEQ ID NO: 26597 - DNA, 1394 bp, Heterodera glycines
aaaaaacctaaataaattaagaaaattcaatgctaagaaacataatttcaataattctttaattgattttattgggcaatttcgcgacatggaaaaaccttttcggcataaatttggcgtaaacccgagcaaaaggtcgttaagtgtttccttaagtgtctgctgctcttgcgaagaataagctccatgtcttcaaattgagtttgaaattcaaattccgtcccctcaattacgtcattttgccgtatccgcccttttccgcgtcgccgtactctcccggcatcgctgaagggtccgtccccacactttcgatgtacagaaacagatgctccaatttgtcggacttcaagttgcggaccagcaaatagatgaagatcacgatggggataacgtggatggtcatcaccacggtcatcgtcgacttggacagcaccgagtcgtggatttggcccgcacatggcggcttctgttcagggagctgttgtcagaaagggcttttcagcatttgacccaccacaatgtcgtcgtcgttgaagaactcgcactcgaagtactgctcgatgctgaagcgccctgctctgttcacctccagaagaacgccgagcaatttgacgagcagaaaacggacggtgtaaatggactcagtgacggtcacgtgaatggtcaatgcttgggtaatgctcaaaatcagagccaacgcgggacagagctgagaagcgcaaaaaataaggaatatatgtaataaataactcatttaaaattcaccaaataaatgatttggactcgggacggaaacctccgccgtttgtctttgacaatccaagcgaacataaacagattgattactgggaaaatcagctcaatcacttccgcaatgaataagttccataattggtcatggtactgaaaattaatggcaatttaataccaagaaaaaattattaaaaattatttccatttaaaataatttttattattccacagtaagtttttggcagctttcgccttgttaattacattgtcaattttggtgattctgtccacatttatgcccttgtattggaattgcactgtcgagtttggcattgtgatgttcatggcgtccgttttgcgcatgtaatcgtccaacatgatgtacagcttgccaaagttgtaggcaaatgaggcgaaaattattgtattggcaatttgacagattaaaatggtggcggaaaccatagccggcaaataataactccatcggacaatctgagaaggaatcagaaaaatattaaaaattctaagcaaaaccttttccttgaccctttggtcagcaattcacgaaattttgtaatgcgcctccaattgctcacggcgttggtcccgacgttgtcatttgatgagaaagacccccc

SEQ ID NO: 26598 - DNA, 1857 bp, Heterodera glycines
  unsure (1)..(1857): unsure at all n locations
tttgatcagtttcatttccttccattttttcattttcccatttttggccaaatatttcggcaaaagttggccgaatttttccattctttatgcgcaaattattatcaactgataaagtttcgtctaatggattgattattaaaaatattagaaaatttaaattataaattttcatttcaaaaacaaaataataaattgcttttgctttttttattaatgaaatggtgacatttaaaaaatataatttaaaataatatgaaaatatgacttcgtcatattacgtggaaaatatattaaatggctgtaattatttaaaattggtaaaagattgatttacaattgtttaacatggataaagtttaaaaatgagcatcactgtagaaaatggaggaatcaacaattttcaattttatgtgcaaatttatagttttttcgctgccctaatgccaaaaaaatccggcatgtttcgaaccagcaaccgcaccaacccgtaccatggtgtgcaaaaaccaaaaaaaaaaatgcttttcaaaaggaacgaaatatttatttttcacgaaaattaaaaaccgaacgaaaagaaagaaaaacacacgaaaattttcaaacaaattttacgcataataaaatcctcaaattctgatgcaaaaattaaatttttcaaaatgttcgggtggagacttttccgcatataattaagatgaaaaatagcagttgagaagcatcgtttaacaactattggggtgatggagtcctttggataaaattttaaaataattaacaacaaatatttttaattactgagaattgttggagaataagaaaaatgtacaaaagtcttacattttttaaattttattcatattttgaataatttaaaagagcaaacgttgtgaagcgtcatttcccccaacctaattttatttttctgactgatttgtgtggattcggccctccttttatattgcctagggcacaaagtatccgatattatttgatccattagcattttatgtttgtgatgccaaaaggaatcggtgtctgtgagagaaagtgggataaatgagttcgcaatacaaattttggaaacgattgaagctggacatcaacttcgtaagctttttaatgaattattgtattttacatattcctttataaattatccctttatcatggaggcagactgttcgtcgtcaattatgatgataaggatacctaaaatagaaataattcaccaattgtatttttattctcttttcagttgcgtcacacttttttgactcaattgtgtcggaagtgcccgatgaaaggaccaagcacatccatttcgttgaagaaagccactattcggtaaaaaaccagtcgatgctttaatccttttgaattttggtcagcttgtcggatggtaaagaccgtagtgcacaaagggactacgggcacacattcgtcaattagctgagtccgactgactttgcctgtacgaagtaaatgttgctcaacaaactggatcgtggactgatcacgtggcattgagcagaagtgaaaagagaatgaagcgaaataagtgacaaggaggccattgtngggaagggtgtgattgacggttgaattacgcaattttggtgattatattcgaaaataaatattagaatggatgaattcattatactcttttagctgtaaaacggaacttgatttgttctgtcttgaaaccgacaaataaaatgttttattggaggagcaaataaataaacaatttagaataggcgcataaatattttggaggagcacaatanattttaggcgaagggaaatgagtatacaattataattngtatttgattttcataaaaaata

SEQ ID NO: 26599 - DNA, 1624 bp, Heterodera glycines
  unsure (1)..(1624): unsure at all n locations
tttttttttcattaaaattcccaatttaggatccccaaatatagggtcgcaccaaatgccggaacccgctagtttgtgtgtcgggtcccgttacaaatccccaaattcgcgccatgtaaatntagaatgggaaagagaatggggaaacgagcggagagaagcgagaggaaaatggggagaaaggtgcactctctcaaataatgcctaatctcttttccatccgtaaaagcatgtgctatttcttttctctgtccgtcggctttttgttaagtctttactagtacataattgtttctctatatctctggttaaaataaatgtgagagaaaaaagaaagaatttaaagcgtaaacaaagaaaatgaaaagggcactttctctctccctttcccactgcttcattttgccaaagtgaccacaatcttttttgaggtcaatccattttttctcttttccatattacttctttgagtaattataaaatatttttagctaattttattaaatatatagcgaaaccatagaaaatgccaattaatactgccactttggccgatcggattaagctgttgttggacaacgcagctaatgacggcgatgtgcattttttggtcgggaaaggagagcaaaaagaggcgagttaatcatgagaaagcgattaaaattaactggcaaaatgtcagggtttcaaaccaaattaaagaactaaaagccgggaattaatttgtcgagattcacatacatattggctctgaaggcgctacgggaaatttttccattttacataaatttattttttaaatttatttgcttaatttcaatttgattcaggagttatatttaaaaaaaagaatatcggactctaaaaatcagattttgggtgtgtgtttgttaatagattttgacgattaaattgtcaattttgattcatgttttaaaaattttcaaagggattgagtgtcaggcggtgccaaccgacgcggcccagaaacatttgagcaatttttatcagattaggactttccaaatcttaacaaatctgataaatcagactaaaaatgactcttgatttaatgatatttaaatttttaagcttttgtccgctcacaaaatgattctgaaaactgtgtccgatgagtttaattcattgttccaatcagctgaaattgaaaatggggagatcgatggtgcaaaataaataattattgtttaaaaatgcattaatttgatttaatttactcattttcgctttgttatttgaccccgtggtggtcactgatgttgagcctgacgcgttcaaagcaatgctcaaattcatttacacggacaaattggatgagctcagtggagacacagtattcaaagtgctttatacgggtaaaataaaaatggttttaaattaatttaaattttcaatctaattttaatatttagctaaaaaatatggcatcacctcactgatcaaagcgtgcgcagaattacctttgtcagagctggacaatgtgtttgaaatgctactcaaagctcgttccattgaagaacatgtaaatgtgtcaataaaataggtggacagggggggagctatttcgcaaaattttcggcgaaaaatacaaaaagaactgatt

SEQ ID NO: 26600 - DNA, 1419 bp, Heterodera glycines
atacgtcgtgcccggctcggtcaagccgtagatccgatctagtctctcgtgtccgtaccttctcggcatggtccccctttgggcagactggctcggcgtttcgggtgggtcgtgccgggaagctctgcggcgattttatcagcggcaacaaaagctggtaatcaaattaacaatgctgcgctgttaattattactattttttattcatggttcttcagataatttcccgacaaaaaccaattttcacgtagatttccccaaataaataaattcccttcgaaaaatgccaacaccgtttttaaatgacagagcaaaagaatttgatttgatgaatttggcgggttttgttagaagataatgcgaaattgaagtgtaaaaataactgctggacattctttgatacatacaattagaacaattaaaacaaaaaggccctcgggcgaatgttccgaaaataaatgacacaaaatcagtcgaattgaatcgaaaaagtctacgaattgaacgccaatcgccaccaccagccattcgtccgtcgcttcgcttctcctcacgggttccgtcaagctgaggtagtaggttgtatagttctggaacggtatctgttggaggaaactaagcagcctgctcactcgccagacggaacccatcgcggacactcggcacggcccgcggcacagtcattccgtctcgcctttctcacgctatattatcgtcgcatttgtggaccaaaatttaaaatgattagccacaaaagataaaaaggaaaatgcttggcacttcgcggacatagtggaatgtagggctctgtgttgtgtttcacaacgtttaacgggtgtacggcttgaaacctaagatgccataaacttaaacacctaattaatcagtctctttcagttgccatcgcgttttaaccagtgctcatgtgcacgttttaattcttatgtattttgtagaaatgttctgattattgcctgaacagagggtgaaggcacgatgaccacgacaaacgatggatgaataaaattgataaccaaagtgcaataaaaactttatcttctatatatattcacgcattactgcgatgcatattgcgtatcaatattgtattatcacctgtcatcgtatattaattaatctgctgaaaaagagttgctaagcaattaattaaaaaacagtaaaataacacaatgcaactcgatttcattgaaggaaggggaagggggcaaaaacgaaaaagctaattatatggtcatcattatcaccatcccattttcattgttttcataaggacaatattgagcgtagctgtttatttgctgtttgccgctttcaactgcttcattcggttgagtgcagagccggctttgaaccactcaatttggccttcgttcagcgtgtgctgcagttggatttcgt

SEQ ID NO: 26601 - DNA, 1601 bp, Heterodera glycines
caaaagattagtccgtcggcgagtcgtgcgtcggcgagttgccatgtacccctgaaaataacgtataaataaatgagtacctattcccggtttgaccgggaagtcccggtgaactggactagtcccggtttttaaacctgagaagtcccggtttttgtcaaagttcccggtcccgctcagctctaatatataggattaaaagaaaaatcatttaacagtggtattttctccaaaaattctatcttcaggggtcttggtgctcaaagaagtgtacaaaagtatggaaaatccatatattcaaaaaaaaagtaaataaatttttgaaaacttttttagcgatttttaaaaaaatttttgagtaaatttattagttcttcgtaatattctgaaaaatcaatatgtgattttttttaatttattttttttctgaggagtaacatagtgcatcccgaaatgcggcataaatgttttctttacccacctgctggcgcaattgctgctgcttctgctgttgcttcatttggaagttttccttttttcgggcattttctttccgctgcttctcctgaaaatataacaaaaatcagacccttcttccaccggcggcaacccccgttttttaaccatcaacttcgttcttttgctatatcaccaatttgcataaacttatttttatttatttacagtatgcgccatatgtatgtatataatcaaacagtgtggctgaataaaatatagcgtaaaaacccgaaaagtttgtttatcaatagagtcgcaatttttaggtttcttctttttttactcaattgttttaaagaaaggagcttaaaaaacgcatttctgcgttgaaatttttcgatcaaacataaaattttctcgaagttggcgaaggaaaaatttttgactaatcccattggaaagagcacagatttgctaccaaattgctttttgaatgatgagtctacgatttacactctcgcagagctaaaaagggggtcaaatgaaaattcttttttctcccatatttcaagtgaaaatttttgtcatttgataattttgtaaatttaattatactaataattaatttaattgaatcaattattgtagatcaataaatattcttcataagtgaatctaataatttaaataaaatattaatatttcatcttttctttttcaagttttcataacgattgaaaaattattgaaaattattaaaattcacttatgatgagtgaaattgttcaagaataaattgtttaataaataattcatataattaaacttaaaaaaatggtcgaacgcaataaattttgccgctgaccccacgccccttgcacacgtatggttcttttgaaagctcagggataggacttaaatttttgaaaattttcttagcttcgtaatattcctaaatattaatagaaatttaaaatttttcggggggaaacgtagaggatccaaaaatgcggcataaatgctttctttacccacctgctggcgcaattgttgctgctgctgcgcttgctcctgctgctgcgcttgctcctgctgctcctgcgcttgctcctgcgcttgctcctgcgcttgctcctgcgctt

SEQ ID NO: 26602 - DNA, 1025 bp, Heterodera glycines
gacatcatatttttgtttgttttttattatcttttacattacatgtcatggaaattcgtgcatcacaccgttccatgtaataataataataatttttaagccacccaacgcgccaatgaatcagacgacagcgtggcaggtgctgtcatctccagcggcggtagcaacgtagcatacagtgtaacagaagctgcgttgctgaccaacaccaccagcaaactaatgggcacgacgtcggccgccgccgtgacatcaacgacggcgatgacagcggcgggggcaggagtggatggggctgttcaaattttgtccaccctgttcctttttgccaactacgcaatcgtgctgccaatgttcctactgtgttggatgatggttgtacactggctccgccgccccggcctcatgccctcgcctcatcagacaccgtcgacatcccaacacccccaccgccacggtggccttcacaccatatttgagaacaccgttgagcagaaggcaggacaggagaaagacgtacggcaacaacaacaacaacaaccacaacaacaacgccacacatcagctgctgctgctgctgctgctactgtcattacagaggccatggtgcgtgaggcgcaccggatgacctcccaacttgctgccgcaattccggagcctatgcgtagcgctgtgacctcctccgtggccattcctatgcttgtgtcggcacaaagtggcgctggtagaaaagaagcaacgcaacaaaacagtgaagaagaagaaaaggaacgcaattgatatagtgatggaaggaaaaactcaaatgtgtttaccaatggctcagtgaaataaatgtgtgtccgccaacggatcatttcctgtcccgtgtgactaatgcgtaaaattgaggagcgaaaaatggtgaccgcaacacggttgcccaatttattgcacgctccaaagtggtgccctatgctaaattgggaacaatgtttccaacaccatttcacaactccattcttctcaaaaaacattttattttt

SEQ ID NO: 26603 - DNA, 932 bp, Heterodera glycines
cgtttgtttatttattttattttttatttttttttctttattttaaaggaaataaattttattataaaaatttgtttcaatgtcgtgtccttccggttgcactcacaaaaattgattttttctaaatttgtttttgtttgtgaatttttcatgaagcatttattaattattttgtttttaagaaaatattagcagaaggtccgtgttgctcttcaatttttgatcaatttatattaattttttttcacctttcttctgttatgtatgaaacaattaaaaaaaattaattacgaaatttatttaattatttttatgcactttcgctgcactcacatttaatcacctgcaattatcgcgtttgtctagtgacacactaattactttgccaatagtaaatattttcagtttttaaattaattttttcgcatttttttggattgcttccaaagatgacaaatatttcacaaaatttcatcatttacattgttttttatataattattttaagaaaatttggctgggaacaataaaagtaattatttcttgaccgtaaatcattttgtttaattaagatcaataaccataaaaattgtaatcgataaattaattagaaaaaattaaacatttattgattaaccattttctagatcaaaaacttaaaataaaacttttatatcatttaaaagctcagaaagaaataactttacaattataaaaatatgatacatatattaaattgacaaaaataaattataattaaaatgtacaaaaatatgtgggcggattgcgcgcagcttcaccccaaataggaaacaaacaaacaattttatattttcacattatacatatttaattttaatatttttattttcattattttcaatcaatttattggaaacgctttattattattatgcttttgctcagtgcaa

SEQ ID NO: 26604 - DNA, 2138 bp, Heterodera glycines
catccatacccaactcatccaaacccaactcatccatacccaactcatcctatgattttgaatgaatggaaatttgagaagctgctgaaagggatgagaagtttttttaattggcttcggttgttgggggtgagtggcgcgaattggccgccaaaagaatggccatttaaaatgtgacgaattgcgaggccgacagggggtgaggggggggacacctgcacattttggggagaaatgaaaacaatgcacggatcggggaaaaggttttaacctatttttcggatagcattggtgagaccaatgtaaaaaaatattttcttcgaacattttccatttagagcgactttttacatggcaactattttcactattttggttattgtgtattgctaacaatttttgcttataatttttttaaacactttaccatgcggaacccattagttgggcccagccatgtttttggctataacttttttctttttcatccaaatccaacaatcttggcatcacacgaaaactcttcacatgctcttagccttataaaaagcaaaaagaatttttggctttgaaaaagttattaagaaaaaatttcaaaatttttggcttttttggtattttcatgccataattagcaattgtctaatcgcaaagcaatatcttagaatagcattgaaaactgttaagctttcgaatgataccaagattgttggatttttatgacaaagaaaaaagttatagctaaaaacatggtggggcccaaccgtgaggacccaactgacgtagtccgttaccgtgtggtggtcatttgtgcgtggcgagtgacctcaattgtgaagaagggcacggggcaatcgaaagtgaagcgtcattttttaacgctattgattccctaattattcactatattacccttccccttacattatttactttttattaaaatgtttttttaatttttccattcattttaattttaattttttattatatattttatttttttatttaaaataaatatacaaaatataaattaaaataattaatataaaaaatacgctgtctaacagcctccccctccccccacctattaacatttaaatatgtcatatttaatatttaaaaataaaatttcaattaaaataatactagcggggttagcgccttcggcgcatccttccaatcactgggactcaatccaccagcattccaatcgctgggactcaatccaccagcattccaatcactgggactcaatccaccagcattccaatcgctgggacacaacctaaagcattccagtcactgggactcaatccaccagcattccaatcactgggactcaatccaccagcattccaatcactgggacacaatccaccagaattccagtcactgggacacaatccaccagaattccagtcactgggactcaatccaccagaattccagtcactgggactcaatccaccagcattccaatcgccgggactccaaaagcattccagtcactgggactcaatccaccagaattccagtcactgggactcaatctccggcattacagtcactgggactcaatccaccagcattccaatcactgggacacaatccaccagaattccagtcactgggacacaatccaccagaattccagtcactgggactcaatccaccagaattccagtcactgggactcaatccaccagcattccaatcgccgggactccaaaagcattccagtcactgggactcaatccaccagaattccagtcactgggactcaatctccggcattacagtcactgggactcaatccaccagaattccagtcactgggactcaatccaccagaattccagtcactgggactcaatccaccagaattccagtcactgggactcaatctccggcattacagtcactgggactcaatccaccagaattccagtcactgggactcaatccaccagaattccagtcactgggacacaatccaccagaattccagtcactgggacacaatccaccagaattccagtcactgggactcaatccaccagaattccagtcactgggactcaatccaccagcattccaatcgccgggactccaaaagcattccagtcactgggact

SEQ ID NO: 26605 - DNA, 1875 bp, Heterodera glycines
tttcctagactgtgggaggcatgaaacgcacgaaaaacatgtttttagcttggtttgaagcttctaggatgactttccatatgcatattttgcatatttcgcgatttatgtgcatatttgcatattttggcatttcgtgcatattttggcgtttttccaaaaaacctctaatagatcggcccccaacagacaaattggcctttttgacctcaaaaaccggaaaattttccaaaaaaataattttttagcaaaattttcacgaaaaatattgaataaataaattttctcaaaaaatggttaatttatgtcaaaaataagcaaaattttgcttttcaggttgatttttcgctaaaatgagtaaattttaagctgtatcgtgtttttttctcctaaaatgatttttaataccacatttagccatttttgaagattttactttatgtttaacaaatttgaagaaattttgagaaattacaccctcaattggaaaattttatgtgcatatttttcacatttttggtgcatattttatgcgcatattttgcgattttatgtgcatatttttgccaaccctatttataaataatattgagatttgtgccaaaatgttttgctaatattttttgacatttttctcttcttccttctaatttttcttataatttcttttttaatttgccatatatttcatcaaattgctttattttttatatttttgctcatccgaataactgtttttagttataagtccaaattcacttttccatttgtaaaccaggcccctgcgggccctgtgaaagcgccgggggcgctttcaacgctggctctagtgggagatataatttggggcgtgcaaaaagcatctattggccgctaagcgatccgcatagtttaggaatatgagaatttggaaatgaacaaataattaatttaaaaacgatattgttttaaatataatttacctaaatgcgatatttttatttatatgcttgtgatttttataagattttttgttaaatgttataattctaaaataaataattttcgagttgtcgctctttctgttcctcttcctgttcccctttctgttcctcttccactttatcttccactttctgttcctcttccactttatctttcactttctgttcctcttccactttctcttccactttctgttcctcttccattttctctttcactttctgtttctcttccactttctcttccactttctgttcctcttccactttctcttccactttctgttcctcttccactttctcttccactttctgttcctcttccacttttcactttctgttcctcttccactttccttcctcttcttctttttcttcctctttctcgttctcttcctatttctcgttctcttcctctttccttcctcttccactttctgttcctcttccactttatcttccactttccgttcctcttccactttatcttcctctttctgttcctcttccacgttctcttcctctttccttcctcttccactttatcttccattttccgttcctcttccactttatcttcctctttttcttcctctttctcgttctcttcctatttctcgttctcttcctctttccttcctcttccactttctattcctcttccactttatcttccactttccgttcctcttccactttatcttccactttccgttcctcttccactttatcttcctctttctgtttctcttccactttctcttccactttctgttcctcttccactttctcttccactttctgttcctctttctgttcctcttccacttttcactttctgttcctcttccactttccttcctcttcttctttatcttcctctttctcttcc

SEQ ID NO: 26606 - DNA, 1494 bp, Heterodera glycines
cgttttcgcgtgcttccttgtcgcgtggccattttcgcgtggccgtcgcgtggccgttttcgcgtggttgcatataaaagagaattcataactcacatttatttaacgaaaatttgtttcactcttttttctaacgaatatttattttataattaagtgagtttataaacttaattaaggctgtttcaattatataatatggaccagcagcaaaaaattaaaacaaaacgaaacaaagttaagttagaacatgacggcgcactctatgttttcgaccaattgagcgctggttgggtatttccaatttgctactgtcttttaacatcgaagtgtgccgcaatttatacgcgcatgttacagcttcttttggaacgatggccgaatttcgcgccgcagacaatttcgatggacttcgagttggcaatggtcggtgcggtccgcacagtgcttccggcatgcagtgtccgctactgtttttttcatcttgtccgcaacatgaaaagacagatcagaatccttggcctcacacatgtcaattgaatttttcagatgataaatttttttcttagtagtttaggcttacaacactgatcctgctttcgccgagaagtctaagatgatcacttcattggcctttctgcctgtgcaccaccttcaaaatggccttaatgttcttcatggacaaattccaccacaacttaacggcgttttcaattggttaagtccgaaggcgaattttattatttttttatttttctaggtttttggacaactacattggccgaatgcgtttcaatgttccaatgacggcgcctctgttccacccgcacgaatggaatgttcatcagcgcaccttagatgatgctgatcgtaccaacaagttcgccgaggcattccatcgcaaacttcagcggcaatttatctgcactcatccaacaatttggcgcttcattgacacgatcagatgtgagcaaaaggcaattgacgcggacatttcacgttgtgtcatgggagaatccgctccacaaaagaaaaagaagtatcgcgaagccgacgcacggattctccgactcgtccaccgttataacgacatcaataacaatcacctcccccaaaatgatcacaattatgcaaatgtcaatgtgaatccgaaaacgttaacaattttctcactggtgtttcccgaaactatgaaatgcgaccttagtttgttctgaaatttgttattttttgttatactatttatgtgtttttataaattaattattttttccgtttgacgcacacccgaccaaactgacaaattattgtagaagatactagccgcaagaaataaaaaattaaaaagttaagaaatttgtccgaattcgggttcgggattcgaaacatggatgttttgcacaaatccgaccaatttcagtcctaaataggtactcacgctaaaacgtccccacgcgaaaacggccacgcgaaaacgaccctgaccgatttttt

SEQ ID NO: 26607 - DNA, 1580 bp, Heterodera glycines
acctaaatagaaaaatggcagattaaaattgtatgcatttcaaatcaatccaccaaagtgatcagcgggacattggtggaatctgcgcggaaattggtgcaatgccagtaggacgtccagtggagcagcaaaacagatgaaaccagggcaggacagcaccagagcacagcacaaaaagtggtccgttcgtagtcgatgctctgaaagtatgcgaaatagtgatcaaggtgctaatttcttttttaaacacacctcatatccccaagagcgcggttggtccaaaacgtgcatggcaatgacaaacagagacagcaatccgcagagcaattgaatggcaaacaaatcagcgaccttctgcagatgacttttgttgtcgcgaacccagggcttgacgagagaaaactaaaaaaataatgggattagtgtcatatgtattgagagatcattgaccgcaatcggaatacagtgacggccaacagtcggcaattttgacgaaaactcgtccatgtgattctgttgctgttcatcaattggttggccactgccgctgctcgccatgagttgcatgtgccacttctgcttgtcgggcatggccccgtattcgccagtggtggagtccattccgatgagcgtgaactgttcgcaatggctggaggagactgcagagttgaagaaggcctgaaaagaatggaactttaattaggttgacaatcaaatgcgaaagacacccttaggctcgtcaaactcgccacagaattggtgcgttgagagaatttgccacagaaaaacagaagtgagcacggcttggcacagtttgaagtaggcgaacttcctcatggtgcgtgacgattaccgatgaagcagaacgatgctgcggctgtgacgtgtgattggaaaataagaatactgctgggagaatggacattctccgttatttttctccttttatagcaaaaataaatgtttccgccggaaattcttctgtgtttcactaacaaataagaaacaacggattgattataaatacacaaagtttttgttacatattctttcattaatgggatttgatttcaagtgacattttgcctataatttcttaacagtaaagaaagcagagaggcgctatttttagattccgcattatgaataagttggcgaattaaaatgaaagttcatacataatcgtttaaaattgaaaggcatcaatcttgctgcaataaaagatcaattaggtgaattatttttaggtgaaaaattcgaaaatttaaatattcaacttttcatttgaatcgggttcgggattcggaattggggtacaattggcaatattacgcaattttattttcttaaaatttatcaattgatcttataattttgggtcttttggggaagtatgcttggtaaaaattttctaatattagttaccttataatttctgaacagactgagctccattctttattttattagggtattggagtccgtcatttttatttgtttgttatttatttgctgacatggctcaattagctgttgcagctcctctgccgccaacgacaaatgcaacagcggccactgct

SEQ ID NO: 26608 - DNA, 1485 bp, Heterodera glycines
  unsure (1)..(1485): unsure at all n locations
ctgtccgtgggtgggtgtaccttgatntttggaccaaacttnnggacanccgcacccactcagtcccgtttcacgcgccagctgctctctaaccttcaaatgaactcatttatcaaatgagtcacttctctgtctgttacttttctgctcggttttggccctttatcgaacgctattttgaacgcctttctctgtggggcgttcagaatcgttcgtggcctttttggcattttctttgaccgatcgttgtggtgaaaaattgggcgttggagtgaagagaaattcatatcagggaacgttgaaatgtggtggaaacgagacggatctgaagtgatggggaagggcagttcccccaattttgccattttaattttcccattttaagatgtgttttctcccttcaaatagcactgtttttgggcgttccattggttttattcaccaattcggtcgtcgctttctcttcccacccattgcccaatgtgaacacgtggccggactcaaaatggacaaaatgcttcagctccaatgccgattttgttttttcactcgccgaaatggtcgttggatagtcgaatgcaccaaatttggaaggcacaggcaatgccaaccaaattaacaccgactgactttccctttaccattttaggacaattttacgcgatttcaacgccgatctctattggtgatgtgagaggaaagactaaaaattattttcgaatgtggtcgaatttacaaataaaatttgttgtagaaacaaaccgaaagaaaaacgatcgaattgtatgaaaatttttctattttatttcaaatttgttggaattttgaccaaacctttgcgtcacggtaaaaaataatggtgcccataaaaatgctgtgagacgtataaaatagattgggtggggtgtctttggagagtgtttgagtttgtgttcctcctcctacccggtgctgctggtgtctctctctgatgaatgcgtttcgtcccaatgtcccccgtccgcaattggtgctgcaattgcattaagttgaggtcgcgttgacagatgagtgctccccccgtgttggtgtattggtcgccttttgcaagtgcatttccgcagcacgaacatttgaagcagtgcgtgtggaacacgttgaacagtccgctgcggaagacgagttcggccggttcgattggaatggcacagcgggcgcagttaggctggcacgacgaagtgccgaaagatctgtcgggggcggactttggtaattatttgtcgaaaatccgtccgtccgctgggcgtgcaaatgagcaaatattgcagaagaatgccccctcctcaaatgcttattctgttttactatcaacgaattcatttgtttgttaagcattgccaatttccttttcctttacgatgccccgggcaataaaaagtaatttttcttctcgaagcattatgagagggatccttcaacggtcagtgagtgacggattgatgataa

SEQ ID NO: 26609 - DNA, 1725 bp, Heterodera glycines
tagtcgagtgtgcggcggttttttagcgcaataagctaaattcaaaatttatatttgacgttcttttcccatttttctgactactggtttaaaaatagttaacgattttgaaaacccataacatgcgtcggttcgacttcaggataagtcaggagattccatccctttttctccttttctttctctttatctctgactgcccgatttcgcttttcttttaaaaaatcaccaacatttttaatgtttggacattttcatatcaattcattagaatcttgactttttgttttttttcaaaaagacattcgacagaaatttgggaagtgtgccgggcccgaaaaaaagaaaatcccaaaatatgaatacttccggtacggacggaattttgggtttagttagccctccatatttattacgctaattctcttttgctgtttcccttctcccctcttcgttatttttgtcccctttcttccatgtctaatggaaagttgtcgaaaatgaagaaaagttctaaggagtggcaggtggtcggtcctttgtagagcccggagcaggaccggatcctgcgcaggattttgcaggatcccagtccgcaatcctgcattttttggaaaatgcaggatttgcaggattgcaggatttggtaatactgacttttactggtcccataaaaaaaggaaataaaaagacggccttttacgattattcgttctattcgagggttatcgaggccgctgatcacgaatatgatatcataattgtcatatgacatcatctaatctttgattttcttcaagtatttttttcattttttagaattatagtcataaaatattttacggggttatcggggtcgctaatcacgaatatatcatccatttcgactaatttctaaaccaggacccgaattcgaacaaaaaacgaaagttcacatgttaaacgaatttcgaaatttccgtattaaaaatgcttttatgatttttattgcaggaatgatggctttcggtttgtttttaacccattttcttaaacattgatcaaatttcgaaatttgatttttctgttagaattcgggtccataactccgggtcccgacccgttcccgtgcaactctacttctattttattgtagaaatttcttatcgatcaaatcaacagaaaatgagtgagtgattggatgagagcgcttatccatcggtcaatttgcgctttgtccctttttcttcttccacaataaaatccatggacaatctcactatgtccgcttcactgtcataaaatcctttggtcggatccatcaattccttaatttttgcaattttattaagcacaaaaagctattttgactgtcactcactgtaaaagtaatcattataagtccccagcaagtcgatttgttgttaaaagaatggtcaaattttttagtaaaatcctccgttcctttcttttgtgaaacaattcgaaaagtggcagaacatttgcagctccaatctccatcttaattaaataaaaaatatttgatttagcattttataatttactttcttttggagcggtacagaaaagaaaaaagcccagccatttctccgtgctgtctttcttcgtatttatttgtgcccaaattttccacggcaatccttttaggtaaatgcatttgcttaatcgcctgctgtccactccttaacggacaaattccgacaatttctcaatgtccatcgaaag

SEQ ID NO: 26610 - DNA, 2147 bp, Heterodera glycines
  unsure (1)..(2147): unsure at all n locations
cattaatgtatcatttcggatcttctagcactnaatattaattagcaaacaaaaaattatanaatgaatcacttaactgatttgactgggatcgggaatttgtccattatttcagttttggctggctgtcnntnttctgtcgacgtcgttctgcccttgccagtgatgggtagcattgtgagcacgctgnagataaaattttaaaaaacaattaaattaaaattgagtattttggtaaaataatataataaataatatttattaggactgccaaaaatatgtataaaaagggttcaaaatttggtaccaattttgaagaatatctatcataaaatatagagatatgtaatatcatagctcattttcaccttcgaaaaattcgtcaaccatttcctgcgcatcttcctttgtgtacaatatgtcatcagcttccaatgggtcgccctttcttttgctgatgtccgctattgattctgatttaaaaagcaattttcaccatggagtgtgactgagaacacttaccctgaaaattaaaattttcatatttttaatctgattgagattaaataattaagtaaaaacacactaatggaacgcgaggggaacgacgcccgcatgtacatgggtaaggttttttggcgggtgaacagcactcaagaagttgttcagccttgagtaacaattcccgggttgcttggcaatcctcacccaacacatcgcagcgggatggtgaggtctaaatgcaaaagcacattggacctgcaaaaaaagcccattgcccagcttaatgaaaaggaaaataaataaattccgaaatattatcttggtatgtcgtttttatacaggggtgcgatctgttcttatttataagaaatgttctgatttggagggagtgacccaaatttgttctgatttcttaaataaactcatatttttgaaattttgtggcataatgtcactattttatcaagaaaatataagatttgcggcaaaatttggtcattttttgacaaaaatctattacaaatcgctttaaaaagcgcaaaaattttcccggcggcgcctatcggcaccgccggacccccccccccccccgtccatcccccaaaattttttgaaaaaatgtgcggcaaaaaaaagcgttgttaaacgcaaggaaaagtcgttgcttggcttttaattgcaatttggccttttttgatgaaaatctgttaacaaatcagaacgaaattacataaaatttaccggcggcgcctatcggcaccgccggaccctcccccctcgcccatttcccaaaagttttttggaaaaatgcgccgcaaaaaattcttaaaaatctgattttttgatcccgagtgcactgaaatttacgatttgttaatttcctcaccaaaatttttaaagatgatcatgggaggtgaaaaatataatatttaatacatttttgatcgaataaattgtaaaaataaaagatttgaagcaattttgcaaaatgttctgattttcgaccccaaaatctgattttttggacccgatgttctgattttgaaaatttttcgatccgaaccctggtatagaattggtagaccaaaaatatatatcaaaaaaagatacaaaatattaaggaacatttatgagaaattttacaagactcagaggtggatatatcgaaattgatttttgacgtataaaaagacgagtctgaatttgactataaaaagcttcatcgaagagctgctactgataaaaatatgacgcacaactgtctaaaattttcgaattttgaaaccgtttacagtttatgacaaagttttagttcagcactttggtcaaataaaaatagcggattgagatgatccaccatatcaatttgcaatttatttaaacaaatcataaaataatcgatatgctctgggaatactccgacttatagtatcatcgtaaggacctgtttaatatattttcttactgggaacataaatttcgattgtacaaaaactcaaatggataaaatttagaataaatgttgtataatcgtattaaatacaaccctaaaaatgaagaatttttctcaaaaattgattggccagctttcatttttttcaaaagttatggattcttaaacttgcctgggaagggagttggca

SEQ ID NO: 26611 - DNA, 1443 bp, Heterodera glycines
  unsure (1)..(1443): unsure at all n locations
aaaatttttatcgtctccctaacttcttcctacccagagtcaaataggttgagaatatgatgatagatttcccctttaacagaattgtttttagtatccctggtaattacgactgttaccgtgtccagaaaattaacgctgtcatgcttgtaccccgcttgaaatttaaaccgcaaaatatttctggttcataaaatgcacgacgattttttcgaaactcgttcaattcaatttcacgtccgaatttaaaggtcgaaacaatattttcaaccgtgtgtccggtgtaagaagccccggacaccccgagcccttaattatttctataaattttttaatagcattttcacagtctatcagacttttcgtccccagacatatcattttcccggattcccataataatgccgtggatttgatgggagctgtgcatttgataactgcggcattgaattttctagggttatacttaaattcgcattcggtgatcgtcagagagtttagtttaattccggtaccgatattagcgagagcaattatatttacgattatcggtttttgcatttttgatacaatgtaccaatcaaatggtcctttcactccctttatataccccttctataaatagcaaccaaaaataaaattaaattgaaaaaaatgaactgtccacataaaattaagtgttgtcattactgcccctgtcattacgagatgtgtaacagatgtaaaaaacacagtcttttgcatttcggtacatcattttttgataatttctggctatgccccaaatgcgcgaaacatgttccctatgaaaatataaataggtcaaataaataagatgcattaaaaatgtttcgcggtccgttcactctaattctctcgggggctactgggagtggtaagacccgttggctattacggtttttaaaacatcataagaatctaattgaaccatcgcctgaaaaaattctttattgttatggtgagatgaatgatagtattttaggattaatcggggagggcgttgagacttttaacgggattccggacatgaataagattaaagaacaggaaaaaccccttttgttaatacttgacgatttaatgcttaatatgcagaatactttcctcgatctactctttaccaggggctcccataattggaacgtaagcgtaatttttgtaacccagagtctctatggtcgggacattaaaacggcaagagcgaacgcccattatctggttttaatgcgtaacccctccggacaattacaagtgaggacactggggtcacaactgttcccaaaaagactaaattatttcatggatgcatatcatgatgcgaccaataatcaatttagttatagcatgattaacatgcacccaaattctgaggaggacttgggagatgtagcaaaatttttccagatgnagactctggaaatt

SEQ ID NO: 26612 - DNA, 1441 bp, Heterodera glycines
aaaaaatattcttttttttttgtcgaaaaaccgtttaaattcctgccttttctccccggcactgaaaattttgaaaaataacatcgtagaattcggatcatccctcctaaattcgtgatcaacgaccccaaacattgaaaatgtgccaagtaaagcagcaacaattttcgtacttgaatgatagctgccaaataggacggaagtgaccaaccctcgggcagtcggccggtatacagtgacaattccacccaaattgcgttgatggtcagccaagtgctaaattgcggaaacacaaattttttgcggcatttttcagtgtcgtaataatttaattttggggctattcaaaaaaattttttgaaaaaattgaacattggcaaaagttggtgcaaaatttacggcaatggtatcataaaagaaagtaataaaaatgttatggccgggggatggtacgttgattggacgcgtaaaagtcatttgaaccaaactaaaccaccttgaaccgaacatgcagacgcagaaataatttttgatgccagccattccttaatttaacgataaaaaatgccaattatgtaaaaaaacaaacaaaaaatgcacttaaaattgaggaatttccaaaaattttatttataaatttggtgccatcaatttttttttgttgcgcttttattcgaattttaatcatttgagaagaattggagtgccgaaaaagaatggcacacaatttgctttttctgattttggagtagcgaccaaatttacgctcagataagcacgaaaaacggtaattttggtaaagaaaaaaaaagaaaaattaacagaaaaattttgagcaagtcgccaaaaatgttatcgcgtcaataaatatttttattttgaaaattttgccaaaatgttatcgtgtcaaaaatagtttattgcgtttttgttaacgaaattctggattttttacgtgaagaaaattttttattttatttatttatttatcgataaagaaaaaattgccatcagaagggcggagaccacttactctgatgactgatcacagtaaaatagtcacagagtaagtgaataaatatcaagtgagatcacaggttaaaaataaacaataacgaaaaatttatatgaaaataaaatcgaggtcaaagtcaataaaatgcctcaaaagttaataattgctttatacattggcgctttcagaatcaagagtcaattctaataattttttaaaggtgtttaaggagctagacattaacgttttatcaagggcattccaggccttgactgatctgttaacaaaagatttggaagattttttagattgtaatttaacatttaaccggaaaaatgacttgtttcgagtatttaagttcggtcggggtcgttttcgcgtggaaaagtcgcttggccgttttcgcgtggggacgttttcgcgtgg

SEQ ID NO: 26613 - DNA, 665 bp, Heterodera glycines
ttgagtgccagtgattgtaatgctcgtgggttgagtaccagtgattgaatgttggtgggttgagtgccagtgattgaaatgttggtgggttgagtccagtgattgaaatgttggtgggttgagtgccagtgattgaaatgttggtgggttgagtcccagtgattgaaatgctcttgggttgagtccagtgattgaaatgttggtgggttgagtgccagtgattgaaatgttggtgggttgagtccagtgattgaaatgttggtgggttgagtcccagtgattgaaatgttggtgggttgagtcccagtgattgaaatgttggtgggttgagtgccagtgattgaaatgttggtgggttgagtccagtgattggaatgctggtgggttgagtcccagtgattgaaatgttggtgggttgagtcccagtgattgaaatgttggtgggttgagtccagtgattgaaatgttcttgggttgagtcccagtgattgaaatgttggtgggttgagtccagtgattgaaatgctcttgggttgagtgcccagtgattgaaatgttggtgggttgagtcccagtgattgaaatgttggtgggttgagtgccagtgattgaaatgttggtgggttgagtgccatagattgaaaatgatggtggattgagtacca

SEQ ID NO: 26614 - DNA, 2188 bp, Heterodera glycines
  unsure (1)..(2188): unsure at all n locations
aatttctcatctttcaaacatgaaaaagaatcgttgcancggcttttgcccgaaattgacgtgtcgtccttgtttgnccaatttcaccgcttttctcagcgaagacggaagtgccacgacggaggagtaagtgaagaattaagaatcaaaaagcagcaaattttaattattgtttatgttactattatttgtaaggttcagacagggcctgggatccggcaaaacgcattggttttcatactggaaactctggccgagtttcatttatgggaaatacataattcctttgcatttttatacattcaactaatcaaaccatttgtattttaattattattgtgttctaattcgtggtatatttgagagataacaataaattgaatcgtccgaaatttttttgaaatttgcccggtccctgagcatgggtttacccctttgttttcataatttaacctctaaaaataattgtttttttctttccatcgtcagatgtcttccgcgaatgctcccatgcgaccatttaagcaggttttgaactcaaaataaaaggaaaaacagaaaatgggggcaattgaaacattaagatttcgttcattctccggatggtgcaacaatctcaagtaataagcaaattattaccaaatttgctaattatacaaataatttagacacccattttatggcaattcgttcactcccttgcgccatttgttgccgccggtttatgacgacggtgaaacatttaaaatcatattaaaagactaagtagggtaatttgtgacacaatttttaactccatggctaatgaatactgattgttttaattatactaattgaattaattacttttcaggttttgatgcaccgcggaatcgtgccaaaagtggtcagtctcaatttattgggatggagttacgccattcttttatcattggggaataaccaacaaatgtgatcattgatttgaacaaagcaaaaaattaataataatcagttggatgatcaatcatcgggagtctcgagatcaaacaattcttagtataaacaatgattttgattagttatcagtgggggggggcatatttaaattttaaaaaaacgacgaaaaatgtgtatcattttagccaaaaagttgctacgtttttcaggcgttccgttgccctccccccggcgcatttccaacgcggtgcacgtcgaccgcgacttcagccatgccaagttcacacacatggtcatgcagttcggccaactgttggaccacgaactgacccactcgcccatccaccggggaccaaacgacgaaattctgaactgcacgcggtgcgactcgcacgagacaatttcagtgcattgcatgccgatcagagtggagcgcggcgatccggtacggtgcgggggatttgataatttgatttattgaaatttacaaaaaaaaataatcagaattcttattgatgtaaaaaattcgatctaacaaaacttcaacaataatttgactgaatttgatattgcatattctctaattggattaatagcttcaataaagtccattataattagggattggatttttatgttttccctctttttttcttgtaaaaatgttcttttggggcttttcaggatcttattgttagcagttcttttgaacttttccaatattttaagtataaaaatgcaatccatcgttataattatcccatttttcggtatttttatacaaaattcaaaatcattgaaaatttaaaaacctattattgttaaagatcattttccattccctgcagcactttcccacccatttgccaaatggggagccgcgctgtttgcccttcgcgcgctcattgcttggccaactgacgctgggctatcgcaatcagatgaaccaaatcacagcttttattgatggttccgtggtcagcaaatttttttaatgggacccgaaattatacgttaattaaatgttcattttctttcattatttaaattgaccctttcagctgtacggctctacccaatgcgaggccaatcagttgcgtctgttccgccaggggctgctgaacttcaccgaccttggcaattggaatccgatggcattgccccagggcaaccaggagaaggattgccggtgggcatttatgagaaattcagagccattaattaattaaataattagccaantaaataa

SEQ ID NO: 26615 - DNA, 1257 bp, Heterodera glycines
agaattttattttataattcacaaacctatccatgttcctttcggaaatttttttttattaaattcgcaataaatgaaaaattatggaattgtgttggtaaaactgtagtggaagaattgaaataacaatgtcatttttaggtaaaagaataatttgaaatgacaatggcatttttttttggcaaaagaacagtcttgaaatgacaaaatggcatagtgttgtcgaaaagatttagatgacaaaaagaccgacaaaaaatggaaaatgacggggcattgtcaaatgaaattgaaatcaattttttttttttgctcaatttaaatttaaacataaaaacaatacgatagtttgactaaaatattcaaatatatttaagtaaattgattccattggcaaaatttgaaaggacaattgcaaaccgataatatggaagaagatttgaaatgaaatggcattttttgttggaagagtttgaaatgacaaattggcattgtgttggagcaactgtagggaaaacaaatagcaaggcatcgtatttgaaaaggcaatggcatcgtatttgaaaaggcaatggcaccgtatttgaaaaggcaatggcatcgtattgaaaaggcaatggcaccgtatttgaaaaggcaatggcaccgtatttgaaaaggcaatggcatcgtattgaaaaggcaatggcaccgtatttgaaaaggcaatggcaccgtatttgaaaaggcaatggcatcgtatttgaaaaggcaatggcatcgtattgaaaaggcaatggcaccgtatttgaaaaggcaatggcaccgtatttgaaaaggcaatggcatcgtatttgaaaaggcaatggcaccgtatttgaaaaggcaatggcatcgtattgaaaaggcaatggcaccgtatttgaaaaggcaatggcatcgtattgaaaaggcaatggcaccgtatttgaaaaggcaatggcaccgtatttgaaaaggcaatggcatcgtattgaaaaggcaatggcaccgtatttgaaaaggcaatggcaccgtatttgaaaaggcaatggcaccgtatttgaaaaggcaatggcatcgtattgaaaaggcaatggcaccgtatttgaaaaggcaatggcaccgtatttgaaaaggcaatggcatcgtatttgaaaaggcaatggcaccgtatttgaaaaggcaatggcatcgtattgaaaaggcaatggcaccgtatttgaaaaggcaatggcaccgtatttgaaaaggcaatgg

SEQ ID NO: 26616 - DNA, 1667 bp, Heterodera glycines
aaaaaatttattttgctgttgttatttgttttttaccttgtacttgttgaagctgttccaaaattggatttcctggagcagttccaatgacgggttgttcgcaataatgcctgacaaaaatgagtgagggttatggacagaaaaaacacatattctaatgggatggaattttcgaaaaaccgcttttttcttgtcaccaaatgcattttgattgcacaccgattaatacaacaacaacaacaatcaaagcaccactgttcacccacctccatcaatgtatttgttgtccacactggcaaagtaggtaggggcttaaaatttttttgtaacttaaaaaaaaaattttttttttacccgccgatgaacgccttaacactttccacagcaacaaatcgtcgggcgtccggtagccgagctcctcattctcctcgtcatttgtcggtagtttgtagttgcgcatcagctccagctgaaccgggaagaactcggcccgcgtggtggtgaacataagtctggaaattttttttttaaatgaggaaataatttcaattttcaaattttatcttcccatataaatatttttcggcaacgtccccgaaatttaaaaaaaaagaagatattttcaagaaattttacaaaaaatttttttgctttcaacgacacatatttttcaaaaaaaaaattccaaggatttttttccgagatttttttcggcgatgctatgtccctgacacattttgggaacaccgaagcaaccttggccatttgaggtcgctgaacattgtctcggcccccatctcctggcgaatgaacttctcgagcacctgcgtgttgtgcggcctacggttgtcgaacaccatgtctttgaagcgcaagtacagctgcaaaagcatgcacacaaaaatcagtaaaataaaaaaaaattatctaaatttttttgagtttttttaattccaaaactttatacttttcagcgtaaaaaatactaataagaagtgtttaaaaaaccaaaaaaaaaaaaaaaaaaatttttttcatgtaagatggacagacaaaattctctgcttggataaataaatttagattatgttgaattgtcaatgcgataaaaatggaaataataaaaaataaataaaataaaacccgctgaatttggtgcagtgtttggcccattgcgagcccggcagagaccatggcaccggtggaagtgccgccaacccaatcaaagtaggggaaaatcggctcgcccataatgcgctcaacacagatcagaagctgaaaatatggcggaattagcattaccgatttgaatggcgtggttttgtgagaacatttttaattatatgaagaaggaccgtaggcagagtcccaaaaactcaaaaaaaaatttctttttttccccctaatcgttctaacaatcgtgtcccgacatttgcgcctttgtcaaaatcgggttcaaccctacatttttcaatccctgatcgggagcagcccccaaaatgggggacccccttcgcatcgaggtggggccggcgtaagaggtggaggggggggggggtcgtagtgaaggggaaatgaaggaaatttctgaaacccccggccccccttttcgcaaaattttcttgaaaaaagcgcgccgcaaaaaaagtgctttgaaaagcaaaaaa

SEQ ID NO: 26617 - DNA, 1379 bp, Heterodera glycines
gaaatgtttttgatttgggttgtatgggcttaaaataataaagaatgagatttttggaaattttattcaaaaccccatttttttttcaattttaacacattttttaccacatttttggcatttttggggtttttacacattatttcagcattttttagcacattttttattacatatttcagaatttttagcacataataatccggcccctatgatttatctccgaaacgaagttagttgtggtaaagaatttatacaattaaaaaataaaaaagcattgaagattttgtataaaaataaaaagatgaaaaatttttttttcaagatgaaacagaatgccaaaataatcaagaaatgaaaatatacataaacccaaagaaaaactgaaaaatccgttaaaattatacagcaaattatgatttctacaaacgatgacactgattcaagttggatagccattgacaacggtatgtacctgagtattttccttctgaaattgttttctctgcaccttcacattggccttgcgttctataagccttacaaaatttttgccaatctttgcttgtaactaaaatttaaaattgaaaagaacaaaaaaaattgaatgttaaaaatatatttaaaaagtaaaaaaatcgagttgggtaatatttttgagtttagtttaatatccatttctagatcttcaatttttttacagtcacagtgctcctttatttttgtcttaacataaaatatttaaaaaatgattcggaattcaaaatttacgcgtttaaaatattttggatgaaaaaaattttgccagaaagaaaaccctgaaaatatttgctattaattagaataatttatttcttaattaatctgcgggaagtgctaaagaaaaaataattcaaattcacatttgttcgttttaaataaagaagtaattcctctcaatccgtgcgacacaaatttgtttgatttggtcaaacgcaggaattctccgcccaaaatagatcggttgccgaatccatggcttccgtttttcccgttcttaaatgggttggacgacgaactgcttgaatgggtattgttcgagctatgaaattgagtttgataagttgccgaatttgtttgattggggggctgaactccaaacttgtcactattaaaaggtctcgacactgaacgcatcagttgttctaaggaattgttttgaaaatttgacggatttggttcattgaatggcctcgaaacagaacgcatcaactcttcaaacgttttgctgtttttgtcgctcattccttcacagaaattggcacacaatgccaaagtattcaatgccaaaagcagcggactggcggaaatttgtttcataatgattaaggctgcaaaaa

SEQ ID NO: 26618 - DNA, 1027 bp, Heterodera glycines
aaaaaaagccgttcccataataatcccccggggaaggggggggggaaaccatgtttccaaatttttcaatttttttttgttttatttttctcaaagcggttcagaattcaaaaaaaaataccatccccggggcaaaaaatggggtttggcaagtttatgggggaaaaaaaaccttttccaaaataatacccctgggagaaggggagtggaaaacatgatttcaaaatttttgttgaaatatttgtcgtgctctgaagggcgtgggagggggggggcgaaggcccaccacgaggccgcgaagaggccgagtgagtaccttcggtgcaggaaaattattaaattttaaaattttttaattgctttttaaatatgccaaaaaatgtaggcttaacttttttagtgaaaattcgatcactcatattttttgctaattgagcagaagcgtaccaaactatgcagggatactccccggtaaaggactaacttacactgaaatgagcgccgagctagctggctcaaaaaaaattttcgaaaatctgagtctttcgtttttatttattttttgcaaaattaattcataaatattttttcagaaagggttctgaaacgcaccaaattttatttacaagttaataaggctctctgatgctttttctatcaataatggaggtgaataaaattttaaaaattttttaattgctttttaaatatgccaaaaaatttaggcttaactttttagtgaaagtttgatcactcatattttttgctaattgagcagaagcataccaaactttgcagggatactccccggtaaaggactaacttacactgaaatgagcgccgagctagcttgctctaaaaaatttttcgaaaatctgagtctttcgtttttatttattttttgcaaaattaattcttaaatattttttcagaaagggttctgaaacgcaccaaattttatttacatgttagtttaggcactctgatgctttttctatcaaaaagggagatgaataaaatttttaaa

SEQ ID NO: 26619 - DNA, 1375 bp, Heterodera glycines
ccgctatgtatttcctggcgatcacaagtgcctaaaaatgtcaaaaaatcatttttaacaaataattcagttttaagttcgctgtacgaaatttctttttttgaatttttgttttggcatttcgtcttcgtcaaatgttttttgggtccatttgagttcgtccccatataacaacgattttttggatttttgacccctttattcgccgtttcgttcgacttgggggcagtcgggtcaaactcccccccccccacccgggtcattagcaaaatccgggattttttgagcggggggggggggcgtccgttggacctgtgctgcggtgatgtgcgcccgtgggttagtttgcttcagctgcacgatgtactccaccaactcggcgtccagctcgtccccgataagtttgggccgtccccgtcccctgccgcgcaaatatcccccgcctccgcccccgccgctgtaattgccctgctgccacagctgtccgatctgttccatgcccgagtcatcgccctgtccgtcgccaatttcaagctaaaaagcgtgcgattaaaatcattttagcgcatttggaacttccccccttttttcccctcttttgtccccacttttgtgccgtccccgccggccatcccctgctgttgctgatggaccgaaatggaggcacgccgtgcactgacgccgccctgctttttgaactctttgcggtagtaataggcggcaactgcgggcggaatgttgaatttacgggccgcggcggtggcgccatggcattggacgtaactggcgacagtctgaggagggagagaatatagggagggaacaaagccaacacactctgcacaaccccctaccattaaacccatctgttcaaaaatgccaagaaaatcgccaaaatttgaaatcgcccgagaatggcacagacgggcaaaagcccccccgggcgagcctcatccgttcggccacacctttttctcctccggcgtgcagtatttagagcgtcggccccgcggtgccgattccgcgccgcttccgctcatgtcggcaccgccggcggagaacagactctgctgttgctgagtgccgggcgtcgcgaaggacgacgcggcactgccgctgtgcatgttgccaagtctagcggcgtgttgcaaatgctgcgaggcaatgccattggacacgggcagtgccacacagtgctgcacacgctgcgcgtcttggcactcggcacaggcgcacggcgcgacgttaagcgcacgcatcagaagagccatctgacggggggggggggggcaatgagagtgattagtgctgaacaaagagtgaacacatctcctgatcaaacatcgcacagtattaaactgtcacaattcatgcg

SEQ ID NO: 26620 - DNA, 1518 bp, Heterodera glycines
tgagccagctagctcggcgctcatttcagtgtaagtcagtcctttaccggggagtatccctgcaaagtttggtacgcttctgctcaattagcaaaaaatatgagtgatcgaattttcactaaaaaagttaagcctacattttttggcatatttaaaaagcaattaaaaaatttttaaaatttaataattttcctgcaccgaaggtactcactcggcctcttcgcggcctcgtggtgggccttcgccccccccccccccctcccacgcccttcagagcacgacaaatatttcaacaaaaattttgaaaaattgactagagcaatcgaacgctaacggacgacctaatggaaaaaaatccccgaaggagagaatttaattaaatccattccttcgggggaccgtgccgggtgccgcggggtaagcagtgctggttcgtttcatcacggcaccgaaccttttggctagtcagcaatcgttgcttaacttgccagatcggacgggtgcgcatgattccactgttccaagcaccccaccaaaagcaaaacgatataaccaaaatataaggaaaaattttttaaaaaattttttctccatcttcctttttgatactaaagcatcagagtgctaaaattaagttgtaaataaaatttggtgcgctttagagcactttctgaaaaaaatatttatgaaacaaaaaaatcgattttttcaagtgtccgtttggggtactcaaacatttatggggagcaaaaatccaacgcagaattaaagtacaggctatagggaagctactcccgaaggattcggtctccccataaatctgggcgcatcggttcgggggggactgcccccgaaaacaaaaaaaatcgatttttttcaagtgtccgttttggggtactcaaacaaattatgggggagcaaaaatccaacgcagaattaaagtacagactatagggaagctattccggaggattcggtctccccattaatctgggcgcatcggtccggggggactgccccgaaaacaaaaaaatcgattttttcaagtgtccgtttggggtactcaaacaattatggggagcaaaaatccaacgcagaattaaagtacaggctatagggaagctattccggaaggattcggtctccccataaatctgggcgcatcggttcggggggactgccccgaaaagaaaaaaatcgattttttcaagtgtccgtttggggtactcaaacaattatggggagcaaaaatccaacgcagaattaaagtacaggctatagggaagctattcccgaaggattcggtctccccataaatctgggcgcatcggttcggggggactgccccgaaaacaaaaaaatcgattttttcaagtgtccgtttggggtactcaaacaattatggggagcaaaaatccaacgcagaattaaagtacagactatagggaagctattcccgaaggattcggtctccccataaatctgggcgcatcggttcagggggactgccccgaaaac

SEQ ID NO: 26621 - DNA, 2102 bp, Heterodera glycines
  unsure (1)..(2102): unsure at all n locations
ttttcatttttttcataaatttcaaaaaattttgcgaaaactttaaaatttaaatattaattatttttttttgaaaattcatttttttagggggcggaatgccaatgggcagtggcatgggcggtgacaatggcggcatgggcggtggaggaatgagcggcggtatgccaggcggaatgaatggtggaatgggtggcatgggcggaggcggcgacatgggaggtaagcaaatccttgttgaatccctgatctgatctataaaattacaaaaaaagatcatcacgcattcatgatttaatcctatgaaattaattttctataaattaaatttaattaaaataattaaaattttaatgatttttatagcaaaaatactttattgagaaattttttcggaagattttttgtggtgagagggtttgatgatgtcagggttagcgccgaaaatttttaagattttttataatattagttagcatcgcctggctaaattttgaaattttttaaaaatcaattcgagaatttttataaattatacatttttaattttggttctcttaattttaattgctagaatgattttttaatttcaaggctacggctccaatcagggcggcggtggtttttcaaacggaggcccaagcggttttggaagcgcaggtggagcctccggtaagacaaacgatccgctgatgggtcccgcaattgttgtgccaaaatttgaagacaaataagaatatttccaccaaaaatgtcattttaggaatgttaattatttatttattattgtaaattttgaacgaaatttatataaaaaaattttttggaaaatttcgaaaaaatttaggcaaagaccgagtcccatcggatctgaagaaggttgaagcttccatttctcgcatttttcctggctattttccttcatatagcggctataattcaccctctgaaaattaattactcttgacaatgcaccaaaattgttaatttattatttaaaataaaattaaaaataagaatttgtatttaaattaaattaaattaaataggacaaacgctgtaaaattcacaaaaaccaaaatttttcttaaaaaatttcccgccaaaaaaattaaaataaaatgaataaatattaggtgtaagaataattttggacttctaaattggtgctaaaagatatatttaaaaaataaaattactaaaaaatttattttttattttatttttttaatttccaaattttagggatgatggaaagcgcgcgctacgtgcaaagcgcgcaaggcttaccacccattcaaattccgccatattcggcggaggaggacgggcctgggtcggctggccacaaaaatgcaatgccgccaattcaaattcctccgtacagtgcggaggagagtgatgataagaatgtgaagtcgatcattaagccgttgttgccgggcaattagtgggactaattagcccttctttaaataggcaacaaaacaatggattggattaacgggttaagtgaaaagatgttttgttaaaagcggttttttgagggtagaataacgaaaatatttaatatatttattaaaaaataaaaatttaaatcatattaaataaaaatttatcaaaaaaaaatattattaatttataagaaaataataaataaaaattttaaaaatatctattataataaatttattactaaataattcatttaaaattgattaaacagaaacaaaaatatcaaaaataaatgcattatcttcgttttccaatccataattttggtctaatttatactttatttaatttttttttgttaatgaatattaaataaattgtttgacttttgttataataaaattgccaatccataagaatattaattaaaatcagaatatttacataacatggatcgagccattaaatgccacaataattaaataaaaacaaaaactcttgaaaaatatttaaaataaaatattcattaattgattttgtactttaggcatttaggaccaatttaaaaatagaaaattatacctgaatgaacataattctaactanaataaaaagcaataagacgataaatatttaaacatatattt

SEQ ID NO: 26622 - DNA, 2333 bp, Heterodera glycines
  unsure (1)..(2333): unsure at all n locations
aagtattaatcttccctatagaaataattaagctattaaatgataccataaaatcttgattgcagttgagtaatgttatcaatttatttttacattttttattttagaaatatttcaacaaaaattctaatttcctcttagaatttttcattgaaattgttcagtaagtttttaaaaaaattaattatgaaatttttttgaacattttcaaggatgacagttttaacaaacgcgcaaccccatttaacaatcgcatcgttatctgttgaacggacactgtgaatgtcctcgtcacgaaagccgtcgtcacttttcacgtcgcttccaccaccaccaccaccttcagtttgtgcagcggacacgatcatcggaattgcaaccgtggcgttcaacacgctgcgcattggttccggaattgctgttgctgcagctatttgggacgtcacacggttggcctcccgtatgacggccgcggtgtgctgttgctgcagtcgcccgctctccccaccatcactgaacatgcttcggattttagtgtgttcgttgttgttgttgatttgacgccgagatgatgttggcgtcgacgagtgtggcgacggcggtggcaataagaccggagtgacgaagccagcgtacaaccgacaaccaacaaatgatgaacaacggcagtatgatggcgtagttggtgaacaggagcagtgcggaccaaatctgcacatacatgactggggctgctgctgttgggtccacaccatctgcgctcatcgtaacgttcatctcaacggcagatggcacacttttgctcgtcagtgcaattccttaaatttacaaatgtctttgctgggggtgatggttgacataatgcttgggggtaatttcacgctgaccgctgtgcaatggcgaaatgagtggcgcactgtcaatcacccgtgctggcacttcaggtctggcattgaacaggggatgtggcgccaccagtccgtcccctcgtggctcatacaaaatcacccagcttaggtttggcatgtttatcgtgggcagacaatatatgtttatgtttgtgtgaggtttatgaataagacactttgttgataggtacaaatttggagcgttgagcaatgtgttgttaatcataatatgggctcctttttatgcaatttttgagtcggatacaatatgacggttgtagtcgatcatgatcaactgatcgaattccccgagcacgaccatctcaacgccgcctgccggtatcgcttcgttgaacgcgagccgaatgctggtggtgccggagcggagcagttcaaagccgcaactgtcgtccagcgtcgatgtcattggcaccacgaagatggtccatccgtcgtggaactgctccagcgtaatgtccatggagcgctccgagttggccatgcccagcgcctcgtacatgtcaacaaatggtcgaatgtaggcacagccggagaagtccatgcggtgtggcactgccggatacacatgaccggcagcgtgcacgctgatctcacgaatcgcgtagggcttgaagttgaacggtgacaatgccagctggccgttgaatgctccgttcgccaccaatgcaatggtcagccgacgcgggatggcggcggaaaatatgttgtgatccatctcggtacggccggcggtcagaaacacggacttcacctccgtcttccgtaccgcataggtggccggctgcttttccagcgtcttgtagatggacaggttcagcgacggttgcacctcaaccatcttcacgtacagctttatgtcgtgtaggtacagcgcgtaatgttggcccgccgctgctgctgctgccgctggcgctagactttgtaacaggaacgcatcctttgcccgatagatggtgaacaggacgtccatgttgttcaacagatacagctcctggttgcccaggtcgaagtccagccgagaaaggaagcgtgctttacgaccgcccgcgaagcgcgcacagcgtgccagaaaaccggcgtccgtcgcgtcgtcgtgcttccttgatgggtggtagcccgcgctggccataaagtgtccctttgcactgttcggaaaggacagttcgttggtcaggtacgccttgtaggggtagagggttccgctgtcgtataactccgtgttttggacctcaacctgattaaatttgatgctggttattgcagtcatgaggactgtgggacacccaccttgangtgttgtacaaatgtctgtccaatgcattgngcgggcgcgacgagtttgatcgcggccactgcagcttcaatgggcacccaacgtccgccgccatcctcccttttggatgg

SEQ ID NO: 26623 - DNA, 1492 bp, Heterodera glycines
gtaaagggcgaaagggtggagaggaggaggagactgatcaatcggggccatagcttgggagaaaaactgatcagatgtgatcattcccctccttcacacatttattaatgcttgtatggggctgatcaagacaacaaattggcattggcacaattcggttcaaaattttcggaatccaaaatcgaaaaaaaatcaaaagttttgattagctctgatcagaatgttgtgttgtttctttgtctgcctgctgctgatcacttgcaatatttactactcacaaaatcactgtttcccatgggcaaaattaatgttcggcttttttatttggaataaaaatggcatctcgtcaatcattagccataaattggcccatatcggcacactaatttacggagacactgccaattaaatacctacctataaaagaatacacatataataatcccatggtgcgactatcagttaaattggtcgcatttttggcatttttcaaattttatacccacaattaacatctcaagtagtgctgttcgagactctcggtctcgagtctcgactcgagaaaagtctcgggtttttttggtctcggtctcgagtctcggtctcgggtttttaagtctcggtctcgattttcgagactcgagaccgagaccgagacttttttacacccctaatgattggctttttgcaaatttaaaattaatatatttttggtaattttttgcttcattgtttactcgtaggtgtggtccggtgggttgttttcttggttatgttcttcattttagcgttggatcagttcccctccaagtaaatgttttttcttctaatttttcaaaattattcctttttcgataggaattcaatcaaaattttaacatttaaaatcataaaatattgtcatttttggactaaatcaattaacaaagtgcactaaaatttcaaattttccccagcggcgcctatcggcaccgccggcttttgattcataattttgcagttgaataaatgcaattatttcaaacgtaatagtaatttttcataatttttaagaaataagaaaattaaaaaaaaaagtaattcccctccaagtagttgtttttcttctaatttttcaaaattattcatttttcggtgggaattcaatcataattttaacaattaaattcgtaaaatattttcattttttgaactaaatcagttaacaaattgcacttaaattttaatgaatttttgttttgtgcgtttttgaaatgataaatattgtaccaaattgaatcaaaattaaaaaaaaaaccaaaaattagttaagaatagagtcaaaaaatgtttttaacgatttttaagcgaataggaaaattttttgaaaaaagtctcgagtctcgggttttttgggtctcggtctcggggttttcggtctcggtctcgggtctcggggtcgagtctcggtctcgagtctcgggaaatttttggtctcgaacagcactagtat

SEQ ID NO: 26624 - DNA, 1572 bp, Heterodera glycines
  unsure (1)..(1572): unsure at all n locations
ttgttttttaaattaataattnatatgataatttaaaaataaaaaaaaacataaanatatgccattatntaggcacaatgcatatcncatggagaatnttatatgaaaaatgtaagtaaatgaatttttcgccaataattttttatttttggggtgtttttccataaaagtccgttttttaataattatttagaagttatttaataagcctggtatcattcgtctaaaagcacccgttttggcggggtttttgggttcatcatcgcaactttttaaccttttccgagagtctcgcattcacaaattcacaaatctttttgacaaaaaaattattcttccagttccgacaagcatcaaaaatgccatcaaattaacagatgttgttgtcacagaaatcagcatggacaaaagccaagggagaaagtaaaagaaaagcacaaaagaaaggaaaagagcagaattatcagaaaatattagaaaaagagtaaaaaaaaggtaaatgaattataagcaaaacataaaatggcattattttgctaaacaattaaaataaatatgaaaaaagatgaaaaaagtgagcgatttttggcacaaatcataaaattagcttggaccaaaacccaagtaaaaattcagacaaatttattgaactcagatgaaaaattatttttaaatattctgattgattgggtgtggggtgataagtaagcaagctaacaataagccgtaaatatttaaaacattttaacacagaaaaagtgttgcaataactataattgttagtccatttattttttaattaagttaataaatcttttctgaaattgccatcggattggctttatttgtcacttggaccaatgctctttgaacatcgtttggaagaagctgctttcttaaaaaataaattctcagcagaatttgatgaaaaaattaaacaaatttgtgataaacggaataaatatttggagagttacgaggacatgagcattcttttacccaatgtcgacgaaaaatcggtacaattgcgcatattaatgttaattatgagtaattgcacttaattaaccaaattattacataggattaatcactttttcaaagatggagctgatcattgaacacacattggacgtggcggaagacgggaaaagaaatgacaaaaataaactcaagaccatcattgaatggttcaaaaatggagcatggactttagaaaaggagggggattatgattatggattagcttatagccaagacaaacaaaaagcacttaaacgagttagagtcgtagtttgttgaaaatttttggcatcgcgataatttattaattattcccaaataaatttgaattccaatttttaaagttttatttttttttaaatcgaaaagagtacgcgataatatatataatagattgccctgctaggttaaagtattttaaaataaaaattgatatgaggcggagtgaaaagctcgataacgatgcgatttatgcgcgcggcggaaagagtgggcggattaaagatggatgaagatggaatgagaggagagagaggccacgagaccggt

SEQ ID NO: 26625 - DNA, 1062 bp, Heterodera glycines
tgtagaatagaatgtgcatcgctctgcgcgcgtctctccatgctgggagcatttgtatggtacaaaatatctctcacaaaagagatagacatttttctgtcatagagagtaaatataaaattaccctgtagaatagaatgagcattgctctccgcgcccctctgcccatgctgggagcatttgtatggtacaaaatttctcgcaaaaaagagatagccatttttctggcatagagaataaatttaaaaattccctgtagaatagaatggccattgctctccgcgcccctctgcccatgctgggaacatttgtatggtacaaaatttctcgcaaaaaagagatagcctttttctggcatagagaataaatttaaaaattccctgtagaatagaatggccattgctctccgcgcccctctgcccatgctgggaacatttgtatggtacaaaatttctcgcaaaaaagagatagccatttttctggcatagagaataaatttaaaaattccctgtagaatagaatggccattgctctccgcgcccctctgcccatgctgggaacatttgtatggtacaaaatttctcgcaaaaaagagatagccatttttctggcatagagaataaatttaaaaattccctgtagaatagaatggccattgctctccgcgcccctctgcccatgctgggaacatttgtatggtacaaaatttctcgcaaaaaagagatagccatttttctggcatagagaataaatttaaaaattccctgtagaatagaatggccattgctctccgcgcccctctgcccatgctgggaacatttgtatggtacaaaatttctcgcaaaaaagagatagccatttttctggcatagagaataaatttaaaaattccctgtagaatagaatggccattgctctccgcgcccctctgcccatgctgggaacatttgtatggtacaaaatttctcgcaaaaaagagatagccatttttctggcatagagaataaatttaaaaattccctgtagaatagaatggccattgctctccgcgcccctctgccc

SEQ ID NO: 26626 - DNA, 1245 bp, Heterodera glycines
ctgattgtatgtgttatctcttctttgcctttggatatgtgttgtgttcacttacatttaattaaaataaaattttcctgacgcaatttatttatttttgaaaaattagtaaatttataggaaattgtaaatttcgtttttttaaatgacttcggcggcggcgcttgcaccaatgaagaataatccattttttctatactttatcctcgagtgcagcggggccgggaccgggaattcccggtcctccgagatcccggtcccgggttttgaaaatctcaggtcccggtcccggtagggcaaccgggaaccgggaaaaacaagcactggtaagaatgggggtctagtgaaaaattagtgaagaaaattggagttttgaaagtgtaaaaactgatttatttcatcaaaatttatatttcaattgtagaggaaataataaaaaaaatatttttgaaaattttttcccatttaggcttaatagattttggctttgtcctacccttgttggctaaaattactctcaaacagagggccaaccacaccagaaaataatcagttaattttatgggacctccccaataaaaagtgacttggatttggctttgattgattgccaatttccccctccccctccccctcatccctcattatcattttgtttagtcaacagtgggcctccccatatttttatcatttctctccccatttgctccacaattattaaaacgtttagtgccacgttttgtctgccatttgatttatgcaaattcttttcccacttcaaaaaatgggtacttgtactatttacagcccataggaatttttttttttaattttcaaaagccatgaaaattgtttccaatacttttcggaatcgctgatcatgaatccagcatccaaatactcagaaacgaagttgaaaatgatcattggttcaataaaagatcattaaactatttttatactaaaaatgtgaaatttgaaaaatttaaattttctactcttagttcggatttgggtccgggtttcgaaattggtcgaaatgaatgttatattcatgatcagcaaccccgaataggtattcatggaaacacgtttttatcttaaatataaaaaaatttagatttttcggtacgtgaatataaattaagtcataggaaatttgaagaaaaaaggcatatacctcaaatccgggtccctaatattgagatgaatagagacttgaaatttacaaaaaaaaaaaaaaaa

SEQ ID NO: 26627 - DNA, 1465 bp, Heterodera glycines
atcgctttttgtattttctaatctccggcgcgtctccgtcgctcgcggcactgtttggattcacattcacttggaccttaaggattggactgagaaggacaacggcggggagggaatttgccaattgagtcccgccgtttgagtcccgcggatggcgtctcaaattttaatgcgcagtcacattatgaattagtccatctttagagctttcgtttgccaataaaattgttttcctagaaagagtttttttcgtgaaaatttgaatttcgtttctgcactgccttttgcctcgacggggcgttgactcggaatacgacgggacatgtcgagaaattgaacattgcaaagaacagttggaggcgtatttgggctgggcaagcaaaaagttgaaatgcacgccgaaattcgtgggcacaggcagaaattcacaccaattggaaatccccgagtcggcatgtcacaatttgacggacgatttccaattcacgtcccaacgaaaagtaaaacggaaattcgaagggaggtggaggtgacgtaaacaatttgtccatttataacgaaggggtacaaacgctacacgactaataacctgcaaaaactggtggacaagctgaacgatgcggagacaaactgtgccacgatcagtgcggaggtcacccgtagagtttttgctgatttggatgtgcggtcggttgaccacgccgaaacaaaacgcatttataattaattcccttttataaaccatcagaaaggacaaatgggcttcaattgttcaccaaattgccactttcgattgtctaatggcgctctctctgtacgcgcagtcatcgcctcacaaaatgtgttttccggagtttgtgttcgaatttgacatggttcaataatacgttgattgtttattcgaccattgttttttagccgttcgtcgacattcagcgtgggttccatccgtcgttggccgaccttaagtcggcgtcagccggcagtttcaattacattccgaacagctgtgtgctgggctgtggctcgaacacggcccacacgatgttgctgacagggccgaatatgggcgggaaaagcactttcatgcggcaagtggccacccttgtggcacttgcgcacattgtgggttctcaaattggcgaactgttctctaattaatctttgccgttcgctatttgagggctcaatggtgccggctgattcgatgcgacttacgccggtcgatcgcattttttgtcggatcggcgccagtgacagattatctgcaggtgtcctttggctaatcagtttcgtgcctgttgttttattactcgactcattaaggacaatcgacatttttcgtggaattgtcagagacgaacacaattttgtcgcaggcgacgcgacattcgctggtgcttattgatgagctcggccgacgcacgaggttcctttgatactgaaaagcacgtatagtgaagtt

SEQ ID NO: 26628 - DNA, 1588 bp, Heterodera glycines
  unsure (1)..(1588): unsure at all n locations
agttcccctccaagtcattattttttcttctaatttttcaaaattattcctttttcaatggaaaattcaaaataaaatttaatatttgttagaattttttcaatttaaatgaagaataaaaaatccatattatgaacattgatttatttaataaaaagggccaaaatttgcaccttttcacatgccggcgacgcctaaaaccaccatatttcttaaaaaattagctcaaaatggaaaatttggacattttttgtaaaaatctgttaataaattgaaaaagaaaaatggattgtattgtaactttatcaaattcaacatatgttatggcagaaactgtacttatttcaacttttctaaattgaccaaattttttcaaattttccaggcaaatagagaaaagattggctatcgaatgattcctagaatgtaaaatttgattgcctttaggcaaagttatgccatgttttgtcgaaaaatcgcacaatggtggattttacgaaacgacccagcacgatttcatatcacagaatctgtacaaaaatttataatattttaggctttgtttctgtgtgtgccaaaaagccaattccaaaaagtggcattttctactttgaagtaaatgatctaaatgggtttgcatcattgtaagtaattctgattgaacgtatttatatttgctaaagacgccaaatatgtgaatacatatttgcaaccccccccccccccaaatattcgcaaaaaaattccaaaaaggccaaaatatttgtcagaaattgaacaaaaattgctaaaaaataaattaattaatttctcaaaaaagtctcatttttattcatttcgctagcacaatgctaatcaattcaatgttttttgcagtaaatctttttctcgctctctatgattgactaattttttggaattttcttcgccaaaattccaactttggattaaaaagtgaatagtcatgaaaaaggtcaaaaaaataaaattttgtacaattttgggcattttggccaagaatttgggtgctaaaaagctattttttcaaaaaaaaaccgctaaattattattaaaaacctcataagtccaaaatattttttatatgtgcaaaaaatttgagcttttcatgcgctaaaatgttcgcaaaaaacatttaaaaatatataaatccgttccccgtaaatatcccttaaaagttttggaatgcttaatgtttttcagtgcagccgttggcttggcaccaaaagaattgccattgggcgaacgtgccgtatattttgacggcacaaacactgaccagcaaaacaattcatacgaatacagtctgcacagtgttggttttgcttcatcatttttcccaattttcaaaaatttaccatcgcttgaacctggcgatgtgatcggatgcggcgtgaatttgaacactcgcgagatcatttacacaaagaatggaaaacgcataagtgggaaaatgaagcaaaacaaataanaataaaatatattttttatttgttcaatcgcataattaataattaggctccaatttatagttttttcactttttatgagctctcagtggcctgaaact

SEQ ID NO: 26629 - DNA, 1259 bp, Heterodera glycines
cccccccccccccccccatatttacgggggtggagaaaacagacgcattagcgcccccggggtgggggggggggttgaggggagaagcatcagttcactccgcaatgaatttttgttttggcaaaatatttttttgcctgaaaagtgcctcaggcataaatccgagaagcctttaagcaaacaattttataattttatgtgtcaattcaaaatgaatttggaatttttattttttgttttggaaaaatgttttttccgggaaaaagcctcaggcgtaaatcttaggcaaacaactttcatctttttaactagcatttctcgtacttattttttttttgtttgttcacgtcaaagattgtggaaaaaaataagacaaatttgatgagagtttgccataaaaaactttgccatattttaattatattttttcagtcaaatttttaataattctgaaagaaattttaaataaacattttttaaattaaactttaattattcaaaaaagatttttcgttacctaaaaaataaagacagttattttcatttatttgtaaattttttgaacttttaattattcattgaaatttttaaatattttttttcagttcaatttttaattaatcgtaaagaaattttaaataatttttttttaaattttaattaataaattactttttaaattattcaaaaaatgattaaaaataaagacaatattatttgatttattttgtaaatttttgaacttttttctattcatcaacggtaaatctgttaagtcaacattaaatacaaaaagatttctcttaatagtttttatgttctttttactgaggaagatgtcgtccaaaattttgaaaattaaaatttaacttttttaaataatattttaaattaaaaatgttttaataaattaattccaatgtctcattaattttcaataataaatatttgaagcgatgtgagataaaaatcttatctgtgtgaatttcttgccccgatttttaattaaaatgattccaaagcgtttaatcaaaaaaaaaaaatgaaaaatttaatttttttttaaatatttaaaaactaaattaaaatttacaaattttagcgaatttaaaaaagctaacaaaatgcaaaaaaatttggctttacagcaactcatggcaaacgttgtgccagaacaactaccatttcgaccatcaatgccggagtacacagatgtgttgccaccgccaaaccatgacgatgtccaggcaagagacaaa

SEQ ID NO: 26630 - DNA, 1713 bp, Heterodera glycines
  unsure (1)..(1713): unsure at all n locations
catccgctcaggttactgtaataattggcctaatggcaattttttattctggtgtattcaaatttaaaaatttaattttactctcattaaatcatccaaatttctgtaatgattagtcaaaacgcgtttttaggctctaattaattgacatccttttcaataatccaaaaatgcttttttctaaattcctaaaattgattttcttgaccataaaattctcaaaaaatagaaaaattatattttttgagaaaaaatgtataaatcaatttacatccattaaatttgggccaatttttgcaattttttttgcatttttacctattttgggattatcaaaaaatttaaattttctaggttggatttcaaaaaaataattgcttttttcgtcgatggcttcatccgttgaaccgtcctccatgctgctgctgcccaacccaaacatttcgccaaaactttcactccgaccgctgacacccaccaacataagcccggctgcggcagcgacaccgcgacggcacacaggtggcctaattgcggcatttttttcgaaatttcgacatttcacattttatttttcagtgttcgcctgcagtgattcgaaaaggtggggaaattaaaaaaaattaatacttttaaaattggatcatgtcacagtttgatttgctaagttacaaaaaaaaaacctgaaaatttcaaaaatataacttttttcggacatttggccataatttcagttttttaaatcgattcactcttcggtacaaaataaatattcattttttattacttctcctacactaatttttatttaatatagataaattattaaatgtcgtcatctcacctcacttcacccattctcctccccatgcttctcttgttccgttgaccaattgttatagtcattacattttaatgacagctgctgatgctgctgcttgacctatttctctctctgctgccagccgcttaatcgttcggttttggcctttgaactcaccgccccattatcgccccatgggaggggcgggtggcatcgtcattggcttccttgtggacaaatgatggtgtgacgtcagaaaaatggggcctcccaggggactaatggttggaaaagcattccacatatgccagaaatcactcattcctttgtttgcagcagcgagcgaatcaacaacaattaagttggcatttccttaatggtgccaactagagagaattttaaatttccatttttgtaagcttctgaactcctgaatttccgtaattatttgggcatcggcattacacatccttgatgcccttgagagtgatcaatgtctaactgattgattacagcggcatttgcacattttttgggttgtgccataattaatttgcggcgcttttcggcactgcctctgacccaaaatgcaattaagattttctgatctgaccagaaacattaaaaactcaaaatgtgagagggatgcggggatcaaattaaaaaatataatcatagaacccaaaaatttaatgaccattagtctcagcccgagtgttcactggccaaatgggtcgtttaattaaaaagaaactgttatttataattacctcataaatcatatcaggaaggcaattatttttgaaaaatactttatttctcgaaaattttttttttaagaattttttcagttttttcacatcgatnaattttaatgctttgattttttt

SEQ ID NO: 26631 - DNA, 2009 bp, Heterodera glycines
atgtgttccgattcgcccgcgcttcccatcggcggcacgcaaaaagggttttctgactccgtcgttgacgactcaatggagctggggacgtacgccaacgaacagacgacgaccgcgccaacaaatgacggaagaggcacaatgtcatcggttggggtggaggacgaagagggtggcgccgaaggtgcgaatccatcggacccattttggcatccgtcgcttaactttctgccaaacgtcgcattcggtaggcattttccatcacttaatttgctctaataaaaccattattttgtgctcttttggctttggtctcgcccgaaagcgaattgaacaaatatttggaagcactgaccacgagaaaagggcaatcgcttttcgattcgacttttcctcatcaaatatggtgactgactgtcttttgcattcattttccccctaaatttgctcctttatttcactttgtttctgctctaatcgcttgcttttccgcagattcgttccctcggcgctctctttcgtttccttgaacaacagaagggcgtttcctcttcctccgctgattcggccgccgtcgtcacttcagaccttcgctcattaatcgccacaattgacacctatattctgtagttcttccattttccagtcttaattttgtttttttttggtttaagtgaggattgtgtggaggttgactcagtcactttgcgtgccctcgagattttctactccgattacaacccgaagtccatccggcaaaagtttgtgtggggcaaccaccgaagggaaggcatgagcattttcaaactgtgcaatttgtgtcggtcggtgcccggcaagcaaatgttaaggtgacatgttttgacaccgagtcctgcacaagccacaaattgtaccgttccttcagaatgtggttcgaacgaccctccaaagaccggccaatgctcatggttcgccatgaggcaatttcctatttgtaccaagattgcaacttggaagtgaccgcacacttacgcactctgctgaaggacgtcaccagcataagagttgtcaacaaatgcaaaaaagcaaatgaaaaaagcacattttaagggcattctcaagcgaatgcgccgtggcaatgtgccgatcagcgattggaagagcttttttacggttaatttaaagggattttgcgtaaatacttttcaagactttgtgcacattggtcaaaattggcacttatttcgacgaacgcgatataaacttggccatagtgaaggaaaaattgcactttttgagggatccgctcaaacagctcactgccattctcatcggagtggtcggtcacttttcagtctttttttttattggtgttatgttcttcacttttagattgattttaccgaatcaataagtgaaaatcgtttggtcatctgcagaggtgtcgaccccgagcttgacaaaagtattaccatttttatatattcttaagaccgtgacgccccaaaaaacacacaaattattccattcgattttaataagcctggtacagtggaaatggtctttcattttacacagaaaaacaattgtacgaaaaattgccggaagatttaacatcggtggcacttttggaggcggaggacatttccatcgaaagttgttccgttgcttacgttccgatcatcggatatttgcttatggtggcggaaagtacgcaaattccaacggacacaaaagcgctcgtggaaattgtaaaaaagcgcaaataaaaatgtttggagtatagaaatttaaaatccatcccttcacagattttttcttccgagggaatgtcctattacaaaacgaatcgaatgcgtttgttggatgagaacattggtgacattaaaatgcaaattgtggacgcggaaacgaacattgtgcttaagtgggtcaattaaaatgcaaaattgtctaaattcttcttcgttttcagtttacaaaaacgtattttggacagcaaagaggcggtgctcagtgccgtcgaa

SEQ ID NO: 26632 - DNA, 1491 bp, Heterodera glycines
tacaacagtgattagaagaggtacaacagtgattagaagaggtacaacagtgattagaagaggtacaacagtgattagaagaggtacaacagtgattagaagaggtacaacagtgattagaagaggtacaacagtgattagaagaggtacaacagtgattagaagaggtacaacagtgattagaagaggtacaactgcaattagaagagtgattagaagtggtacaacagtgattagaagaggtacaacagtgattaaaagaggtacaaaagtgattaaaagaggtacaacagtgattaggagaggtacaaaaattgttggaatggtacaacaatggttaaaaagggtacaatcatggtattaaaattaaataattaaggaaatcgtttattaaaaagtaagattaaaaattgaatgtaattaataaatttttaaaaataaaataaatttccttttattaattaaaaagagtgtttgaaaagtacaaggattgaatatttatttaaattgaaattaatattacaaattctaatttaaaaatacaggagttctttaataaaagtaaataaattattattttaatttaaaagatttttcacaaaaaaaataatttaatttaaattaaaaaattttattttttatagattaaacaaaactatttatatttattaaaatgaaaattaataatataatatttatttaatttgaaatgaaattaaacatgtaaaagtaatcaaaaaatgcacagaaaaataatgtacaccggccggattcgaacctgccgccccccccccataagatgactcagaatccccaatcacacagggattctgagggcttaacgatgtaataactgaaatctgatgtcagattagtgatcagcaccctcaaatagccctaatgacatgtttttgaagatttttgtgaaaaaaaatttctcaactcaaaaatcatgtgctcccccctttggtccagaatcccaaaatcacttttatttttataacattttttaaaaatgtgatagaaatgccaaataaaatttatataatagaggaaaaaattgcggatttttgtagtattttacttttacagtatgacctttcagaaccgagttatgaatttttttctgaaaaatcgaaaatttccagaaattctggaataactttttttcttttgaacattataaaaccaaataaacctcataaaattctcccgattttttgctatttttaaagctttaattcacttaaattgagcagtccttcattgagttatgaattttcaaattttaacccaaatttccaaggaccaaaaaaattaaaaatattttagaatttttaaaaaattccaaaaaatctgaaacttaaaataaacatcatatttgtgctcaggaccctaatttaccccagaaaaatatttttaaccctctttttcaacccaaaaaaaatttttgaaaatttctagggggcctagctcgaaaatttttgaaaa

SEQ ID NO: 26633 - DNA, 2451 bp, Heterodera glycines
  unsure (1)..(2451): unsure at all n locations
tattcagccaattcaagataaattccagtaattttgtcaggtcgagatttgaatcgcgattttgcttcatcgagtcttttcattaaaactaaattaggattaaatttgggttcgttaaaatattaatgacttttatgaaacggatatttcaacacctgtatattccttgtccttcgcaagtgcatttctgcaaatcatggtaaaatataagcgaataaattttttctaaaaaatgataataacagaataggtcttcacaattgccgttttagaaaaaaaaatgacgaaatgattttgcaatttgttaaagttcttaaaaattttttaagattttacattttttgacaaattttattccttctttaattttaaatcagggctgccaagttttttttttcaaaaaaaggacaaacgaggctaaaacaaagatttggaccccaaaaaaaagattttttgaaaaaattgattgttaccttgtaaaaacagttaaaaagcattattggcttttataaaagcaaaatacaacaaatttgcacaattactccggttttattattgaaattaatattgttttttcaaaaaagagtcattcaaagtatttgtcccatccaccgatctgatccaacagtttgtgattggaaatgagcatctgatacatttctgggcaagtcccggtcccgaagaaaaatcgaggtcccggtcccggcaagtcccggtaccggttttgcccaaaattcccggtcccgctctactctacttttgcataattttcacaataaatatttttgcgtttttggtggggcatttggaaaatgtaaaaaaagctaaaaatgggaattagttatgcgtctgacaacaggttatggatgagaatgctcaaaaaaacaaaagttaagttgagagggaaagagaggaagagaaaatagtattaaaacgaaaataaataaataaaatatcagcgaaataaatcattaagcacaaaaaatttaaaaagtttggggaagcctaaaataaaggacaatctttaaaaaaaggacattttaaattttaaagatccggcccctccaaaaaaggacaaatctttaaaaaaaggacacttggcagccctggttaataatgatctgatgtaaaaatagatatataatggcataaataaaaaaatatttttataaaaaatgccatgcccataaatgaaatacgcgcaaataggggatgaagacattaacaaagaaaaatgtggcatcatattgaataccaatgactgacgtaagcaaagctagcgcgaaactaatttttttttattacaattactaatttaatcatttttttaacttttacagattctactaacgaacagggaggccaaatttaaataatgcccggaagggttcactggtaccgagggattgaaaacagggcatttttctctaattcaaaaagctctcgttgaaaaaatttgaaaatctctaaaagtctcattttaacattgatatttaaaaaactatatttatatccaatcctttgaaataaagttattacgaaaagctcgtctgagaaaccctggaaaaaggtcgtttggcgctccattggcaaaaaagtgctttttgaaatgccattgccctccggcgtgttcctttgaattaaattgtaaggccatgagtggacaattactttctcaagatttttgattattgctcaaaaaataaatttgctgacaaattgtccactgtagtgattgatgctccagagtctcagtctcgactcgagaaaagtttccggtttttggtctcggtcatgactctcgagtttttggtcgcacttttcaaagttccaactcgatatttttttacgtccctaatattcggcttctagcaaaatttaaaaaatttcgtttatgagaatttaaggaatttcgatgcaattattttataatttttagccaaaaattgagcaaaaaataatttttattcactgattgcagttgcaaatgagctacatttcctttataaaattctcttagcaaatattgacattttttaaatcaaaaattttgtcaagaaaaaaaatttgggggaagaatttttgaaaaaatttatccagggtcacgagagacccgacaacagaaatgattctgtggggatgatgtctccccaagtaaacagatcatttctgacattgacaagtccccaattttctcaaagaaaaatagggacagggacaagacaaacttgttccctttgttgtgctatgggacatcctccaagtcgatgtccccaatattccacaccaggagcacgcagaaggcggctcgcaaaacagcgaaaatgttttaattgccttatgaaagatcataaggcacaacaatgccaatctccaaagagatgcttgcagtgtggtggaaagcaccacatatattatctgttatcatggagatgctccaattgnggagca

SEQ ID NO: 26634 - DNA, 1123 bp, Heterodera glycines
cagacaagagaaggcaactgtggtaccaagttgcgggtaaaaaaatgagaaaaaagagatagccattttttggtcaagaatttttttgtttgcgtttcaatatcgtaagattgtttgatagggccagacaagagaaggcaactgttggtaccaagtttgcggtaaaaaaatgagaaaaaagagatagccattttttggtcaagaattttttttgtttgcgtttcaaatatcgtaagattgtttgatagggccagacaagagaaggcaactgttggtaccaagtttgcggtaaaaaaatgagaaaaaagagatagccattttttggtcaagaattttttttgtttgcgtttcaaatatcgtaagattgtttgatagggccagacaagagaaggcaactgttggtaccaagtttgcggtaaaaaaatgagaaaaaagagatagctattttttggtcaagaattttttttgtttgcgtttcaaatatcgtaagattgtttgatagggccagacaagagaaggcaactgttggtaccaagtttgcggtaaaaaaatgagaaaaaagagatagccattttttggtcaagaattttttttgtttgcgtttcaaatatcgtaagattgtttgatagggccagacaagagaaggcaactgttggtaccaagtttgcggtaaaaaaatgagaaaaaagagatagctattttttggtcaagaattttttttgtttgcgtttcaaatatcgtaagattgtttgatagggccagacaagagaaggcaactgttggtaccaagtttgcggtaaaaaaatgagaaaaaagagatagccattttttggtcaagaattttttttgtttgcgtttcaaatatcgtaagattgtttgatagggccagacaagagaaggcaactgttggtaccaagtttgcggtaaaaaaatgagaaaaaagagatagctattttttggtcaagaattttttttgtttgcgtttcaatatcgtaagattgtttgatagggccagacaagagaaggcatctgttgttaccaagtttgcggtaaaaaaatgagaaaaaagagatagctattttttggtcaagaattttttttgtttgcgtttcaaatatcgtaa

SEQ ID NO: 26635 - DNA, 1395 bp, Heterodera glycines
tatatttagcaatggagtctttttgctgtgtttgtaaagcaatttatggaggaactacagctgttccgtctgcaaaatagagaccggacgggatcgggatttcttcgggatcccgcgggattaaattcgggatcccgacctcgggatccgtcccgagcgattttttaaattcatcgggattgatcgggatccggatttcatcgggatccggaagcgggatccctcccgaccattttaccaatcccgcgggactgaagtcacgataatttttcgaaaaatctccattttttaattaaaatcttgaattttaaattaaaaaatattgtcatttgataaattctgttaacaaattacatacagaaattgacattaattgattaaattgtaaaaatatttaaagctatgttgttaaatgttctaatttttgaccctagatattctaattttggaaaaaaaatttataaaaacctaatataattaccatccctatttttcacaatcgaattgatcaattataaatattagataagcacttgaacaaaacttagcacaaaactaaaaattaaaaagccactaaaaaaaaattgggttttagcaaatcccgataatcccgcgggatcccgaaaaaaatcttcgggattcatcgggatcgggattcggtcgggatcccgactcgggatccctccgaccccagttgtccggtctctattgcaaaagcccgcagcaatggacataagctcaagccctatgtgttggtcaacagaaagcgaccggtgccgcaaattatcaaccaatttgctggaaaattgtttcgtttttcagaaaaaattagtgccaaacaatgtactcaaaattctatttatcccccatgggggataaatggagactgggtgattattttttaaactcctcagaaaggggggataattggagactgcggtattaatagagactgggctataattagagcatatacggtatattaaattacaatttatttttataaaatttagaatatttttaaaataatattatctattattacagttgcttttttatcatatattgagttatgacactttcttaattatataatcgcttgttgtttaattatttaaaaaagtttttaatcataaagaatttaaaattttttcttaaaaaaagataatttctattgtaagaataccgtattttctctaattaaggcccccggggggattatttttcaacctcttcagaaatgtggacataattggagacagggcctttaatggagacggggggattatttttcaacaaatttttaatgactagggccgcgacttttagtgatgaaaaatctcgaaaataattaataaaataatgtagaggggaccgggaattttgagcaaaacc

SEQ ID NO: 26636 - DNA, 1394 bp, Heterodera glycines
ctcaaaacggttcagaattcaataaaaataacatttacggtgcgaaaaatggggtttgaaaagtttattggggaaaaaaagactttacaaaataatacccctgggagaagggagtgggaaacatgatttcaaaattttcaattttttctagtctaatctactcaaaacggttcagaattcaataaaaataacattcacggtgcgaaaaatggggtttgacaagtttattggggaaaaaaagactttacaaaataatacccctgggagaagggagtgggaaacatgatttcaaaattttcaattttttctagtctaatctactcaaaccggttcagaattcaataaaaataacattcacggtgcgaaaaatggggtttgaaaagtttattggggaaaaaaagactttacaaaataatacccctgggagaagggagtgggaaacatgatttcaaaatttttgttgaaatatttgtcgtgctctgaagggcgtgggagggggggggcgaaggcccaccacgaggccgcgaagaggccgagtgagtaccttcggtgcaggaaaattattaaattttaaaattttttaattgctttttaaatatgccaaaaaatgtaggcttaacttttttagtgaaaattcgatcactcatattttttgctaattgagcagaagcgtaccaaactatgcagggatactccccggtaaaggactaacttacactgaaatgagcgccgagctagctggctcaaaaaaattttcgaaaatctgagtctttcgtttttatttattttttgcaaaattaattcataaatattttttcagaaagggttctgaaacgcaccaaattttatttacatgttagtttaggcactctgatgctttttctatcaaaaagggagatgaataaaattgttaaaaatttttaattcctttttaaacaggccaaaaagtttaggcttagcttttttttcagaaactgatcagaagcgcaccaaactttgcagggatactgaaaggaagagaaataacctattttaaatattatctagtcagttcatttaaataatttttatccaaaaaattttttttgggttttcggggcagtccccccgaaccgatgcgcccagatttatggggagaccgaatcattcgggaatagcttccctatagcctgtactttaattctgcgttggatttttgctccccataattgtttgagtaccccaaacggacacttgaaaaaatcgatttttttgttttcggggcagtccccccgaaccgatgcgcccagatttatcgatttttttgtttcataaatatttttttcagaaagtgctctaaagcgcaccaaattttatttacaacttaattttagcactctgatgctttagtatca

SEQ ID NO: 26637 - DNA, 1435 bp, Heterodera glycines
ggagggggggggggggggagaattctatattgttatgaaaaagtaagaataatttttgaaataaattaccccccccccccctatttaacaggagccacgacatttgcggccccgacatttgggcctatgcctaaaatcggattctcagttgaattttttctaatagcctaacagcattaaaattcagaaatcgtcgtcttctgtttattaggagcattaattcacttttttaaaataattatttctaagatttgcttactatcaaattatcaggcacaatcactttctatcattaggctaccaaggcttgaaaaaacttaattttgaaaccgatttttgacattggcgcaattgtcggggcacgatttaacatatgatttacattaacaacgaaaggatgggggagagttccaaatatgctccaccctgaacacataataaatcagccaatactcacaaggatggagacgaacgtcagtgattgggtgaatagaattttcgaagtaaaatcgtgtgctaatttggtacacttccgacggcttcggtggcacatcgtcaggcatttttgacggaggcggagggatcggatgcgggggacagggcggcaatttcggtgccgagcaaaattccgttgggaaggaacgcacggattgacaaggcaaagagacggagggacagaacatcgaagacaacggaggaacggacgaagaagaagaagagacattctgggaggtcaaagcattggcaacactgaaaagggaattgaaagtccagaaaagcgtaacaggtcattcccccagaccccgaaaattaaaaaaatcgaaacattattgttttcgaaaaccatagaattttttaaggaaatttcatgaaaaaccaatttaaattttctagcgattttttggaaaaaattagtattgggttggtgtatattatgttagttttttatgaacattaaaaaacagcaataagatgacacaccacaagtctccagcgctgcgacaactttcaattccccgctcaaagaagtcgatcaacacttttggcacattctatgtcaaggtctcatttttttggcattttctggggctttcttgcaggaggaaattttctgagagagtaaagcacgtaaatcgaatggggccatgtctaacaataaggaacaagatgtgtgaaaaaaacaccttccaaaacaaatgttatttttcagaaaaaatactttttttgacatataaggtaaagtacgaaaacagatagaacaatagttagaatgtaaaaaatacccaaaataaaaaattaagaagagttacatatgcaaataagaaaaaaacgaacgttttatacgccaaacccataattcatagtagattttgaattgtaagaaaaattttctaaatttttttgaggatagctagctgtttggaatttaaaaaaa

SEQ ID NO: 26638 - DNA, 1162 bp, Heterodera glycines
tttcatagaaaaatggtccaaaaattgcaatatttgataattttttagtgaaaatctgttaacaaattgtattcaaattttcaaaatttttcggcggcgcctaccggcgccgcaagccccctcttcccaaagttttttgaaaaaaaacatgccgctaaaaagctttttatttattttttaatttgaaatagaattttacaaaatgataatttttgctttatgattttgactaataaaaaagttgtagaaaaaatttcgcgtttcgcaattttgcgttttttggaatttcccgtttcggatttattttcatttcgcattttttactttcgcaaatttcgcgtttcgcattttattttccgatttggcccatccctgatacgtaccacgctttacccccccctggggggcctccctggctacgggcctgcatgacacaaacctcaattatattctgttgctggtgctgattctgctggtggtacccttgctgctggtgatccccgcaacgcattggctcaattaaatccaaatcgaaatcgtctgaaaaatatgagtcttacaattaaaaaacaaaggtgcattttaactatctttctgacagtgagatgatcaggtgagggaagacaaaatatagctgtctgtccgttttaccatttatataccagaaaatcggtttgtgaatcaagaaagacttgttaagtatttaatttaaagaatccatttaaaatcaatgttttaagagtttgaaatactctgacataattcaccttcattggatatacttggcaccacgagatcatcaacgagcccatcctccacaaaatcggagagttggggaaaaactgaattcgaagttgaagaagggtgaaactgctgcgctatcggcgattgctgcagcatttgcttcgtatgtattgacttttgttgttggtaaaagtcagcggggctcatttgttgaagcgactgatgcgaaggaggcccctgatgatacgactgattgttattagcgttgatttgcggaacagaatgaagcgaaaactgctgttgttgctgctgctggggagtgtttgtccgcgagtgttccacggtcgacccaccgcttccgacgggcgtcctccgctgactttggtgctgctgatgaacgctgccagtgctcccatgg

SEQ ID NO: 26639 - DNA, 1818 bp, Heterodera glycines
  unsure (1)..(1818): unsure at all n locations
tgtgactaatgcgtaaaattgcggagcggaaaatggtgatggcaacacggttgcccaatttattgcacgcccccaagtggtgccctatgctaaattgggaacaatgtttccaacaccatttcacaactccattcttctcaataaaacttttttatttttttcatctaaatgtttggcctagtaagaaaaccttgaacaaatatgcacagcaaaaaaaagttgaatagggtccgcgaagtggcaaagaagaccaacggggcacatgggggtgnggggggggggcacaaacgcttgtgttggtgcggaccgggtggagggcgtaataggcccagtgaacaccgttggccaaccaaccgaaggtccagcgaaaaaaagttgaacagggcccgcaaagtaccagagaagacaaacggggcagaggtggtgggggcggaggggggggcgcatacgcttatatcggtgcgggtcgggcggaggggggtggtggtctgatgggcgcaaataggcccagtgaacacagctggctggccaaccaacccccaaggtcaagctaaaaaaagtcgaatagggcccgcaaagagtgtgccctatatctactaaccccaataattatttaaaacattttttaatgattttgcagaaattttcgaaatccttgtggcttcattgataccgccaaactctaaaatgagtttcacaataactctttttataattaaaatcaattaacaaatgaagttttcttgttgaatttttattttcataaaaatttcgattatttttttgtttgataaatttgtccactaaattctttcatagtagagaatcgattcgtttacggattaagagaaaattttgccctttttaataactatcacttttaattttctgaatatatgcgaaaattcaaaatttaattaataaaatttgaattttctttggtatttaattaaaaaagttgatttttctttgatatctaattaatgaaatcgttttctttgatatttaatgaaaaaaattaaaattttctttgatatttataataaaatttgaattttctcatgactcatattctccttttttaggcgtctgtttttagtgtctcgtatctgctggtattttgttttctttctgtaatatccctcctaggcccaagcaagcctaagcctaaagcttaggccaaagcctagatccaaagcttagatttagtttagcctataagaatttatatcaggcttgagacaaaaaataacaagtttttatattttattagtcaaactttcaaaaagcttttagctgcagattatgcggatacattaccatataaatatttccattttttccataattttagtctatttgttattgaaagattaatgaaactttataatattttaaaaaaattcaatgtaatctggctaatggttttatttaatattaagtaaatttaattatttttttgatatccaaaaaagcttttagaagaatatatacaatatgtcaagcataatttaattaaatttatcttaatttcaatttttttaaagacaataagcttatagataaaaaatcatttgaaaagtcagctttttgatttttacaatattgtgaagctaaatttgcactttttatgaatcgacctagcactaaaaatcgatcaatatatacacgtaaatgcacatcagatggagaaattggcaataaaacaatttttttgtaaaacagcaatgattcttctataataaataatattaaaaaataaatttaaaaaatactaattatgattaatttaaagcatttgtttaaaacttttttttt

SEQ ID NO: 26640 - DNA, 1200 bp, Heterodera glycines
attttcaaacctagaaatttttataaaaaaaattcttaggaactttcttagtacgaaaattccaagaaaaaaatttttgagaaatttttcaaggattttttagaaaattttgaaaaaacttagtagttcattataaaatttctaaaaaatcgctgaaaaatatctcaaaaaatttttttccttgattcgaactaagtaagttcctacgaattttttttataaaaaatttctaggtttgaaaattttttttttaaaaaatgtttcggggggggggggaaatgaagtccacccatgatagggatatcattcaattttgttttaaaatatttatatttgcccctcttcagaaggccgctgccgtactttggcgtcgttttgccgacgacgacggcaccggaatggacattgctgcggacactttactgcatcccatcgctctgttactgctccgtctccactcgcgacgcgtgagcgagacgagcagcgaggtggaggacattgtcgtcgcggaactcacttcgtccaataaagtgttgagcggaagtgcggtgcgcaagttccacgacctgtgggtgttctgtcggagtgccgtcattgaggaggtgtacgccggcattctgctcaagccgatgaacaggtgatgccacggagagagtgcgctaagggttttgtgttgttgggacatagtttctaaccccaatgaacacagttaaatatgtagttgaatagaaagccatggtgccgataccgtccagtctgggaaattaaattattatgtcgtctcataattattaacaccccttaaaaagtagcctatttattaaaaaaaacaaaaaaagaaattgaatcgaaaatcgaactatttttcatttttttgttggtcacagtcttgcactttctctggaggctttccaattcaccacctcaattttcttctagggttgtgatggttctgctcagttttatcgccgatgacaagctcagtgcggaacaggtggagctgaaggcgttggcctacgcctggtttttggactgtgcccatcacaacgaactgcacaaaattgttcaaatgctcacgcttatgttgctgaacccagtgacggcacgggtaaaaactgttttggcactgacaatgaatgtcaaaaaattcaaaaattccccctgttttttgccaggtttccatccaatttgtgcaaatgc

SEQ ID NO: 26641 - DNA, 389 bp, Heterodera glycines
  unsure (1)..(389): unsure at all n locations
cgaaaaaaaaaaaaaaaaaaaaaaaaaaaaaaaaaaaaaaaagagaggggggggggggggggggggggggcgccccccccccccccccccccccccccccccccctcttttttttttttttttttttttttttttttttttcccccgccgncgtgtcnaaaaaaagagaaaaaaaaaaaaaaaaaaaagaaaaaaaaaaacaacccccgcccccccccccccccccccccccccccccgggggttttttttttttttttttttttttttttttttaaaaaaaaaaaaaaaaaaaaaaggggggggggggggggggggggggggggggggtttttttttataaaaaaaaaaaaaagaaaggaagggggaggggggggggggggggggggg

SEQ ID NO: 26642 - DNA, 1109 bp, Heterodera glycines
  unsure (1)..(1109): unsure at all n locations
tttcagtcttgagcatcccggaattatttttttacccgaaagtccttaaatccaagggcaaattgcgcaagaaatttgatcaattactccccccccccccctcaatttcagaatcccactttttctattttgctttcgagaatgccgtctgtccaaattatgtgacggagaaattttggaaggcattgcgcaatttggtggtgccaattgtgttgagtcgaaaagtgatggaagaagttggcattccgaatggcactttcattgcggtggacgactttaacagtgtgaaagcattggcagaatatttgaaggaattgcaaagggacaaggacaaatacatgaggtaataggggtaattatggaaattgattgctcaacaaggtgtagttaggaaattgattgccctatagggggtaattagagggaaatgattgtaagtgagggtaattaatggggtgaggaaaattggacaaatggtgctacatcgaccgacgaaaaatgcaaaattgggcaagtgacgaaaacattcaaaaatcatttttaaattttcaatcatttttatttaaaaataaaaaaattaacacatttaaatattcattttaaactctttttcaaatgaagcaataatataaaaaaacaaaatattgtaaaaattaatataatttattagaaattaatttgattaaccaaatatccaaaaatatcttaaaagatccgataatgctaaaattcattgaaataagatgttgaagtcggggtaaataaaatagataaattttgccgtttataccaaatttgtgacgtttatttagctatttcaattggaccaaaacgtaccaaaagcatcggagtgggcatggcattcagccaccgctgtgccaattgtgcgaaattgcgcacaaacaaaggcacagcgacacattcaaaacgtacaccgttcaattggacaaattttggcccaaaggccaatgcgaacacaattttgtgcaaaaaagattcaaagacatctgacaaatggaagacagaagagaagaaagaagatgaagcggatagacaaatgaaaaagggagggacaattaattaacganaaaattacattttttaattcg

SEQ ID NO: 26643 - DNA, 1817 bp, Heterodera glycines
caccataactttttcaagaagattccaaattaaaaaatcttttggagcgccacgagagcccgcaacggccgcgagagggccgctttttagcgaaaaatttcgatgagtttcaaagaagcgggtgcttctagaaaaagttatagtgctgatcaaaaattgatcatttaaggtgttcaaagatttaaccaagtatatctttttcggtaaaagtcgtagccccatcattcaagagggaaatcagtagagaatggttgtgctctttcaagtgggcttgcccattttctctagaaaaaaattaaaaaatttgtcggtaaaaaaagctgggatcttgatcaagaaaaaaaaaataccaactcttaatattatgaacagaaagccaaaaaattaacaaaatttttatttaagcttaacagaatttaaataaaaatgtcaaaaaataaatatttttaagattattaatcaaaaaaaaacaaaattctattgggaaattatgtcaaatttgtttatattgaacaaatattgaaacgaaaaattggcagtgctattgataaaaggcaaaatttaaaagattataaatcggtatattcatcatttacgacaaaaattaaaacaaaattaagattttcaaagtaattattgtgctatcattcgttgcaagaccgagccgtcggggggcaaaatgtcggggccgggtcgggaggggggggggggagctcaattgtcgggggtcagggaccccgatcgggtagtgatcaaaattttattttaatgaaaaaaccattttttctttttaaattctcgtaaatcttcctttttgtcagtttaataatctgatttcgttagaagctggcctttaaaccagggcttccatttgtttttatttataagaatgctctgattttggagtagcgatgaaaattgtgctgatttcttaaatatacttataattttgaaattttgtggcataatgtcactattttatcaagaaatttaaactctgatgctaaattttttggtcttttgatcccaaatgtgaacattttaagaaaggaggcagaataattaaatattatttaaattaaatgtgcggtttcatttctgagtatttcctgaactgaatttatttttcatcaaaatctaaccattatgaaaattttaactgaattaaaaacaatacttttatagaataattgaaaaaatataaaagaaatggactcttaaattaattaaaaaatttattaaaatgttatgaaataaatttaatttaaattaatgcgacaagagttccaaagaataattcacataaaaatgagaaaacgaattagcattttactaatccgatcctttttacaagtgtgattttcaatgaaataaataaaattgttagagcaaggcaaaagaaataagtagaatctatttaaataagtgtttgaagaaagaatttaattgaaaatgtaaaaaaaaactctcaacaattcagacagagttttaaatgtttcaataaacctaaattttatatagcatttttaattaatttttaaaacaaaaaattaaaaattttgttaaatagtactcatttaaaaatttattcctttattaaatcgtttataataatattaaaatttctaaaaattaaaagacaaaaaaaaattgcagtcctctcacgaaataatacatttgatagattgcaattattagtccatatttgttcatttttaaactttttatccatatttcgagcttttatagtccatatttggcgttaccgggacctcggagaacagggaattccctttgaaaaattaaaaagataaaat

SEQ ID NO: 26644 - DNA, 707 bp, Heterodera glycines
actcacaaattgctgttactgtaatagtttatgaacaatacggtaatgaaagatgcctccccaatgcttttgctgcttcttcttccttttcatctcattttcccttttcctctctaattttttaaataaataatttttcccttttcgtttttctttttcaattgaatgattcttccataaaggacacttttcttctctctctttgtccctcctcctccttccccttctccttcttcttcttcttctttccctttttttgctttgttttcccacattttgttgctgaaattccatccttccctttttggagagggtcgagaacaattgacgaatgactgaatgaatggtcgagaatgaaaagaaagcaaagaaaggtgcttaaggctaacatctctttggcccatttgggcacttaaaatccgaaatttgttgggcgatgcttaaaatggcaacgggcggagggggggggggggggggtaaaaatgccgaagacgagccctttttggagttggagcacgggaagaaggagcatttgatcaacggacgggggagtggaggcgaagccgagccgagcaaacattgcccgggggcatcgcttagaaatgcatcccccggcaccaacgcccacttggccctttacttggcccttttccttccctttcatagcaattaaaaatttccgccccaattcttccaaccactttgcg

SEQ ID NO: 26645 - DNA, 1067 bp, Heterodera glycines
aaaaaagagatagccatttttctgggataacctctaaatataaaaatcctctgtgaaataaaatggcgattgtgcacagccctccgtctatacgcaagcgcttttgtgaggtataaaatttctcaaaaaaagagatagccatttttctgggatagagtataaatttaaaaattccctcaaaaataaaaggtctattgcgcaccgccctccctatcatgctcgagagcatttgtatgtgtataaaatttatcaaaaaaagagatagccatttttctgggataacctctaaatataaaaatcctctgtgaaataaaatggcgattgtgcacagccctccgtctcatacgcaagcgcttttgtgaggtataaaatttctcaaaaaaagagatagacatttttctgggatagagtataaatttaaaaattccctcaaaaataaaaggtctattgcgcaccgccctccctatcatgctcgagagcatttgtatgtgtataaaatttatcaaaaaaagagatagccatttttctgggataacctctaaatataaaaatcctctgtgaaataaaatggcgattgtgcacagccctccgtctcatacgcaagcgcttttgtgaggtataaaatttctcaaaaaaagagatagccatttttctgggatagagtataaatttaaaaattccctcaaaaataaaaggtctattgcgcaccgccctccctatcatgctcgagagcatttgtatgtgtataaaatttatcaaaaaaagagatatccatttttctgggataacctctaaatataaaaatcctctgtgaaataaaatggcgattgtgcacagccctccgtctcatacgcaagcgcttttgtgaggtataaaatttctcaaaaaaagagatagccatttttctgggatagagtataaatttaaaaattccctcaaaaataaaaggtctattgcgcaccgccctccctatcatgctcgagagcatttgtatgtgtataaaattatcaaaaaagagatagccatttttctgggatacctctaatataaaatcctctgtgaataaa

SEQ ID NO: 26646 - DNA, 1615 bp, Heterodera glycines
cgatagtctcttgggaaaaaacagtggaaaatgaattggcataagattcgtcattatatcctttgtaattattcccaagaaatgaattgccgataggcaccgccgggaaaaattttgagaatttgaatgcaatttgttaacagatggttgttaaaaatgacaaaattttcatcaaatttttaagcgcacgcatttttagctttcataaggtttatcgtttctgaatccctcctaattatatggtcgaagcaaatttcaaaaatgcgcgaaaacacggcatatttatgcgggagatgcgatgtcaagctttatcactagggctgggaatttaagccaaatgacttttttttgctgactctaaatggcctttaaatgacttaaaaagtgttctaaacttgtttgaagcttctgacatgcattttttgtgatttttttaacttttttacactttttgggatttttatgactttttgagtttttgcgactttttcgtgattttttttactttttgagtctaaatttgaattttaatgaagaaaatgccgaaaaataaaatttcggccgataaaaggcagtgaaacttggatgaatttttttaatcaattgttggaagaatctctattttatgcacattttaggtacctatttataaaattaagtgtctaaaaatacgatcaaaatgttattctacaaattattaaatgggatttttttaactttcgcataatttttcaggactttttattttttacgtgttttttggattttttgtgactttttggttagtttttcaggacttttgaagatttttcgtgacttttttgtttttttatgactttttgtgtctttttggcgattttttatgacttttttagtcgactttttgaagatttttagtgacttaaattcccaaccctatttattaaaaaagagaagagattttataaaaataagaattaccaaggcacgaaactttttcattatttacatttcttgatgttaggaaaaatagaaatacttatagaaataatatatgatttcattaataaagaaaagtaatactttgacctctttaaaaaaactattttattttctaattattcagtaaattaaataacatttattagagaattaattcaatgaaaataatcaagactataaaaacttaaccaaaaggcaatcatctaaccttatttttctatcacaataatctataaattcatattatttttataaattaaatgaattagcaattcaaagagtaaaattctaataaatgttcatgtatgaaagttaatgtctttaattgaaatgaatgaatttgtgtcattataaacaatttaaaaaatttttagattatcttagaataattttgcctgaattaagaaattaatttaaatgtttaaagaaaatataatttaaaaaattaattagttaaatgcatattattattaaaaacaatttttcaatattattaaacatgcaatctaaaaatagaaaaaaaaaaactttgttttctacaagagaaagacattcatacatcgagtgtttttaattattgatttttttgttaaaaagaattaagttcggctaatagcttatttaaacttataag

SEQ ID NO: 26647 - DNA, 1254 bp, Heterodera glycines
aaatttaaaaaaatgtttatatatttatgtgttttatagcttgcgtccattttattcgcaagaatctcggctcaatttcctgttttttgtaagcctagggctcggagaaattttttgtttttaggcctaggagtctcggcaaatttctttgttttctggatgcccaagactcagagaaattttcgttttttttgtacgccttggtcttggagaatttctccttttttttataagcctaagtctcggagaaatttctcaatttttggagacctaggtctcggagaaatttcatgtttttttgtaggcctagatttcagggaaattctcaattttctggaggcctaggtctcggagaaattttaaggttttttgtaggcctaggtttcagagaaatttctcaatttttggagacctaggtctcggagaaattcctaaatttctaatttaaaaaaagaatttccattttttggctttttcaacttttatcacgtccatcatctttatttgaatggtacccaaaaaaagcttcaactcgaggggggaaaagcataagaaatgtgtgcactattttctattattttcacccctcccgcgccaattgtttcaaatttaaattttcgtcacaaaaaaataaaaaattttacgctttaagaatttccattttttaattttattcttttaattttttgacgcattatgaccatgaaaagaagccaaccaagtggacaaaagccggttgcttcttcttctgatgacgtcttacagcagcaaaacggcggcatcgccaaaagaaaaggtaaagccgcactttaacaaaaaaaaagatgatgatggcaatttggcattatttggcacatttaaaaacggcaaatctttggcattatgtatgtattatggtgacttcataggtgagcataccccggtcggccaccaaggccaaaaattacattccatgcactttttttgaaaataaaaattgccaatcgcctaattttagtattaaaaatggcacaaattttattttaccatattcttgcactaatgatatgcctactgtagcaggtaattaattagtgaaaagaaaacgcatcacgcttaacaaagagtggcgccgcttaattgtttttttttgaaagctatggcctacagtagaacaacctatttaagttcctacgatacttttacgccgtgctgaaaactgataaacaataaaaatttcaaaaaggttacataaagggggggggggtaaataag

SEQ ID NO: 26648 - DNA, 1552 bp, Heterodera glycines
aatttttattacgctttggacaaatctctttcgtttgttatatgtcgcattcaaaaatttcaacttttcgaagttttcatgtataacttttttgttaattgtcgaatcctgagctaaacccctaaaatatgcctgcagtaaatagttttatttcaccttttctatttcgcgaaatttggtaatcataaatgtaaataagaaacaataatggtcctgagccttacgccattaggcatggatactcgtctggaaaattggaacatttttaacaaagaatgttcgatttaaaaaaaaattataataattatatatagcttaaaaatttgtgtatcatattaataaggaattatttataccaatacaagaaagcttaggaggaggagattattcggaattgggtcaaaagctttcgcccagtgaaaataaacaacataaataaatttcttattattgggcgaaagtcaattgattttcgagttagggatttttagaatagggcatataattgagtttttccatatataatgaaattggatagacatcatagaaaaaccagaaaatatgtaaaagtggttggatttaaataaaatgttttagaaaaatgttcgggatatcatttaacgatgtattatttatgttagaaagttttgtaagtgaaaataaatttcaatagggatgtaagcgtcattgttctgaaaattctggtaaacgtcagaatgttctgtaaattcttgtaaacatcagaattgttctgaaaattctgttaaacaccagaatagttataaaaattctggtaaacgtcagaatggttctgaaaattctggtaaacaccagaatagttctgaaaaattctggtaaacgtcagaatggttctgaaaattctagtaaacaccagaatcgttctgaaaaattctggtaagcgtcagaatggttatgtaaattctggtaaatgtcagaattgttctgaaaattctggtaagcgtcattgttctgaaaattctggtaaacgtcagaatggttctgtaaattctggtaaacatctgaattgttctgaaaattctggtaaacgtcagaatgtttttgataattctggtacacacgggaggagggcgggggtgggggtggcgcaaagcgcccttcgtaaaattctatcctctgcctccccgttccccgcctctagcctgcatccctcccgcgccttcacgccccccgcctcaccaacgccgcactgatgcatctgcgcatgagctgctactgccctaccagcccggctgctgctcgaataaaattaatttaaaaataagcgactttcagaaattaaataattcaaattattttttgtattcattttaaatataatatatatgttaatgtttaaataaataatgaaggactcaaaaactcataataatttaaaaaataaattttagaaagctgaaaataaaaaaagcgtgtctcgaccatgaaaagaatgtcagggaacttttgacatatttgtaccgttttttataattagaagaaattaaatcataataaatttatttctataaaa

SEQ ID NO: 26649 - DNA, 1836 bp, Heterodera glycines
ccattttgacgcaagatctatatcattttgatttcacagcaaaattaaataatcttggtatgattttaagtggcttgatagcgcctattaacctgcaaagtttcaaaaaatttagctgagaaacaaaaaagttatggccaaaaaacctcaaaaaattgcattttcctggccattttgttggtcgaattaaaaaaaagttatgaatctttaaacttgtctgcgccaaaatggcctgcgccaaaatgaccccgacccttaaaattgtgtgtgtatttggtatttgttttagctgcgcggcgcggcagggattggaccgatgccaagaagatgtatgaaatcggtattcacttcaaaaaatatcgggaatacgtaatcatagtccggggtatcaaaatctcggggagagaattttggaaagcggaaagttcaagcttcaaaaagttttggaaatcgagaatcgatttgagcggtttgaaagaaaataattcgagagtcggaaagcgcaattccgagcttttggaaaacagaattcaaatactggacggagaattacgaggctcaaaaagtttagtttgcgcgaaaagtcatgggtcgcctcctcccatcactgccagataaatataaatcacaaaatgaggctaaagcctaatgaacaaatgggattaaggcaagcacgaaatacttaaaataaattaaattattgcaaaattttgtggcgcgctatttgcaaaaatttactgtggaagagaaggcatagagatttttaaaaaaattttttgcttaatttgttaacacacaaaaagtgttgctatgacgttactcaaaaaaccatcaaaataaaaaattttttttggtataattttgctcaaaagcaaccaaatttttaattcttgaagtcacattgattgtcctaagtggttttttgcaaaatttcataattttgttaattttcaaaaaagttattaccaaaaatgttcaaaaaaagttggttttttgaatttctcaggtcataactttatttaaacttaacgagtttttttttttgaaattttgcaggataatagaaaacacttagggctatagaaagataatcaaaattatttaatttgatttattttgggcgaagttatgagtaattttctgtcaaaaattttccatttgatagttttttgagtaacgacccggcacctaaaaaatgatttttttttcttttgtgttttttataatccattttcaatatttcgctgatttttcttcaccatttaaatcgcttgaattttttgaccaataaatcggtttacatttccgaaatacaatataaaacaaagccctggatttttagatttttcctgaattcaggatggaaatacatttgtcctgaattggagaaaggcaatttgaaggtcctaagagtttccagaaacttgtcctgaaatggagatggattgaaaattttcgccaaatttcctccctttaaaatctgaaattttcaaatttttttaggcttacttttgagaaatgtcatactaattttgtaagttaaaaattttctgcgttcttaaatgaaattccaaaaagtaacttttacccaattcaggtcgaatctaaaaacccaggacatgtttaatcgtttggatgatctttctccaattcaggatgaatctttaaaaattaaagatattactgccccataaaaggggcccgttgagctgaagcaacagcccccacattcattcattcctaattaccctttccaattcttttaattgtcattaaatttagcccggaatgaatattccttttggcttttctctctcctccgttggcatttctgct

SEQ ID NO: 26650 - DNA, 1200 bp, Heterodera glycines
agagggtgatattgatatttgaatacatatttagtgacctcttttgtgggctgatcgcagctccagagaatttgagaagcacgctaaagcttaacgatgtgccgcggtggctatgagagagggtgataattatatttggaatacaaatctagtgacctcttttgtgggctgatcgcagctccagagaatttaagaagcacgctaaagcttaacgatgtgccgcggtggctatgagagagggtgataattatatttggaatacaaatttagtgacctcttttgtgggctgatcgcagctccagagaatttaagaagcacgctaaagcttaacgatgtgccgcggtggctatgagagagggtgataattatatttggaatacaaatttagtgacctcttttgtgggctgatcgcagctccagagaatttaagaagcacgctaaagcttaacgatgtgccgcggtggctatgagagagggtgataatgatatttggaagacaaatttagtgacctcttttgtgggctgatcgcagctccagagaatttaagaagcacgctaaagcttaacgatgtgccgcggtggctatgagagagggtgataattatatttggaatacaaatttagtgacctcttttgtgggctgatcgcagctccagagaatttaagaagcacgctaaagtttaacgatgagccgcggtggctatgagagagggtgataattatatttggaagacaaatttagtgacctcttttgcgggctgatcgcagctccagagaatttaagaagaacgctaaagcttaacgatgtgccgcggtggctatgagagagggtgataatgatatttggaatacaaatttagtgacctcttttgtgggctgatcgcagctccagagaatttaagaagcacgctaaagcttaacgatgtgccgcggtggctatgagagagggtgataatgatatttggaagacaaatttagtgacctcttttgtgggctgatcgcagctccagagaatataagaagcacgctaaagcttaacgatgtgccgcggtggctatgagagagggtgataatgatatttggaatacaaatttagtgacctcttttgcgggctgatcgcagctccagagattttaagaagcacgctaaagcttaacgatgtgccgcggtggctatgagagagggtgataatgatatttg

SEQ ID NO: 26651 - DNA, 1207 bp, Heterodera glycines
cccaattttgtgggccaatggaccagtgaaatattggggttagacgggattgggctctcgaggaaaaaccggaatacgaaaagggcgcgattccgggaccaaatccggtcgggatcgcaatcccatctagctctcccaaaacctatgtctcctctctcccgctaaattggaataaaaccagcagttgatgagcatttatttgtgtgtgtgtgtgtaggttgccactgaccactttttccacaattttgagtagccgagtccacgcgtcgaagtcgtactggtcctccttgaccgctttgagcgcctgctgaagcatcgcttgttcaaatgaatttgttctaaacaaaaattatttcaatttcaaaaacaaaagcgcactaattgagatggaaaagtttgttgtccacgacatttatgaccaaaacttgcaaaaaattgtgggttactattacattttatgagtccaatttcacgagagccaggaatgtcatttgtgatttgaactcataaatttgtaatagacccattatgtctcggtgccagagtttttgccgccctcaaactttctgatagtcaacaaaaacaacaaacttggttccaaatccaacattgttggtaacattcgaaagctcttcagatgctctataagctttacaaaaaacaaaaagatttagagcctgtaaaaaattttattaggaaaacatttcaatttttgactttttcgcaaattgcatgtggatgccaaagaaatgttatagccaaaagataaatttttttgatatctgcccacagataattaacaagtaccgttagaacttggcctcgttttcctgggcccaggtccaaaggtctttttggcagcatggctttttctgggtctgctttttcccagaaaattaaggccaagactttttcaaaatgctctctgtccatatgttttgcaagccgatgttgaatttggaaggataccaagtttgtcatatttgaggactattacaaaagtttgggcaatcttgtaaaattcggccggttgccagcccttcttttggcaaaaattcatgccacttattggactgatacaccaagtcttgccaagattgtgtcccctcactccgtttatttaaaaacaataaaattcgaaacccgtcatcgcgttctcgactttcgctccgatggcgatggtttctgaccgggctgatgctgacgt

SEQ ID NO: 26652 - DNA, 1708 bp, Heterodera glycines
attgaattttacctgaaaattttcgaaaaatttttggtatggaaatggcctaaacaccttagtatggaaattgcggtatggaaacggtggcatggaaacggccggtatggaatggaaatgactggtatggaaacggcggtatggaaatggcggtatggaaacggcagtatggaaatgggtcgagctaagaatttttccgaaaatcatgaaatacttaggcgcctaggtattattttctttgactcgccttgctttgcttattttatttcttcatatgcatccatttgtcttacgtaattttctttctgagaatgattggccgccacttcgcctttggacagatgattatttgacagaaaaattagggaaaggacaatgtttaaatgtacgaattggtgaaaagagacattttcgtggaaaggtttggttgaaatttccaaaaactataaaatataaatgaaaacgttaggttctgcacgagcatcaatgtgatcgacatacttttgagaatagtgcttcaatgctcaaatggatgaaaagtgctaatttcggccctgtcaatggaaatgaagagacttcatcggcatacccaaacccgaacacacactgggcctacttggattatcgggacgtacttgaactgttagaacaagacgaagctcaatatgttgattggtcattgttggggatgaaaaacgcaacaggggagggcgaaaactggcgtaattccactgtttggatcggtaagaggcgcagattaccaaagcaattggtaattctgtagcttgtgtctcaaaacaagtttcatgtggttttctgggtcgcgatcattaagtcggcatcaatttcgaccaatcccggacacgaatttaaataaaagatgaaaaaaaataaaaatttaaaaaaagtattcaaaaacttctttctagggctctttggggtcgctggtcgcgaatctgacattcatttctatcaagtccgaaccccagacccgaattcgaacagaaattagaaaattaaaattttcaaaattctcactacaaaattgatttattaaagaagcaaaaattagtcataaatcatcaaaacacggcaatggtgtggaattgcggtcccgacggaaaaaaatattaaaatttcaaaaagcttttttctagggtaaaaaaatttgctgatcacgaatctaaactctgattttgaaaaatcattgattttatctatgccttttcatcaagtactagattttttccaaaatattaagaaatatttcggtgtaaaaaacccatatacagatgttctagagctttcgaatgagctattgaatatatggagaagtcaagtttttaatttttttacaattttttgaaatttaattattcatgcctttaagagtcatatgagatggggtgtgggttcgagcccgcttggctgcggtttattttttatgctgattggtgaaaaatcatagacaaaatgaaggattttgaaattttttttatcctaaactcattggaaagaaaatactttaagaaaattaaaatttgaaaaaatctagtcttgataaaaagtcatagaaaaaagggctcaagtacagtttatgcgtccaatggacttttgtgcgtccaatcgacttttatgcgtccaatcaatttttatgcgtccaatcaaagtttatgcgtccaatcaaatttttatgcgtcgcaatcaa

SEQ ID NO: 26653 - DNA, 1658 bp, Heterodera glycines
tgaccatttttaagattttcactgaaaattagcctttaaatgccttatgtgtttttaatcaattctctacaaaaataatttacatatgataaaataatttaaaaaaagcacataaattattattatgaaaaataaatatgttcaagaaaaaattttataaagttttttggctatatggcttaaggcaaaaattgaaaaacccgaccccgaacgatttggcaaccccacccccgaaccccgacgattccaaccccgacaaccccgaattttccaaccccgacttcggggttgcaaccctagttgaatagtccaagtcacttttttatattttcctagaattattatttgtgatagggaaaaattagataaacaagttttcttacaagctttttttcaatccatgtggccacgtgcgaagagatttcttgtagcataattccaatagcgtgcatttctttctgaattttttcagctttaccagctgacgaaatatttgcgcattgtgtggcaataacggtctaaaacagataaaaattattctaatgttaagatataatttataataaattcttttcaaaacatattattttcatacggttttcatcaaatcgaggcgaacaatttctgcaaaatggaaaagttgctcccgtcgccaatggtttccttccataattgtttttagccaacatctaagaattttaatttaattgtgaaaattttaaaatctcacaagttttcgtcttcgtacaaacgtcgatgtaagattttaatttcattttcgacttctcctgtctgctcattagaataaaagactaaattaaaaatgttgtgtatcggttatattagggcccggattttatggataaaaaatccaaaatatggttataatatggacaaaaacatgaaaatattgactaataatttcagaaaattggattgaatttttaaaaattcataaacccatatttttttgtcaagaaggaaaaaccattttaattcatgaattatagaatttcacaattgagaactataattcttatttattatttactgaaatattgaatttagaaaaattgcaaaaattgtaattttctttaaaactcatttttatacaaacgttattaataaaaaatgtttgcacaatttttatattttttcaaaatttttggattttatgagcgtatcttccaaaattttccatctttaggggatgaaattctcgatttgttatatgaaaatgccaaaatatggaaatatggacaaaaatccgaaatatggaaataaaatgcatcctaaaacataaactaagcaaaaaactattcatgtggtattaggccaaaataatgtgcaaaaaaaaatatggaaatccataaaaatcagatctctagttaaattttatattaggtcaatgaaagtaaagttaaatgattacaattttatttagcataattactttttttaagctcttccgaaacaaagacccatgaagctttggaaagaattgcttaaaataatttagctttttatttaaataatatagatttttgtaaattttttattatataaaatatttttttctagattcttacattgttttatcgcagcatattcgagcgaagaaaaggtaaaatttttatggtgatgcttttcatctgctg

SEQ ID NO: 26654 - DNA, 1250 bp, Heterodera glycines
ataattcaaatggataaagacgaaaaaatcaggaatatttttaatattttgtattcttattcgcaggacaaaggtgaaatatcagtacacatttgatataattaatgaattaggtgccaaaaaacacgctcaatttgctgcattaaggctactgaacagaacaaagagttggcctgttttatttggcgatgattaattttaaaactatggcactactgacataattaggcactccttaaaattcatagtgaaacttctgcttttctaggttataatcctttttttttgaataattttataaatataaaattaacaaaaaatccaattaaaattatgacggaattttatttttttgagcattttaatttgcgtatatttgctttataattattgtttttgtaaaaactctaaaactggcaatgctcatttataatttgatgacggaaaggaaaaaattgaaattataaaaaaaattcacttcaatggtaaatgaatataaagaaaaaagaaaatattcacacaatgaatggaaccaaaattatgccaaaatttgtaagaaaatcggagttagtcaaacaatcattagaagatggaagaaacaattttggaatgaacaaatttataacggagaaggaaaaaatgggaaaaataaaatttattggcaaaaaaatggttaaaccaaaaaatgagtgataaaaaaaatgaaaattgatagaacgacaatttttagatggaagaaacaatttggagataaaatgcaaggaagattgatataattatgatgcgatttattttaataccttttgtttttttcattgcaatttgtgaggatttatttttcaaatttgtataattttaaaattgttgaaaagtaattaattatttcgtgaaaaatcctaaattgaattaacaaataatgaacttatttcgcattgaattcagctgcccaaaacaatcagctgatgagtgcccccaaattcttagctatttttgtttcaatttttttccatccttttgctgaatattttcttcctttttgcttaattttctcttttattttataatattttcttattatttcccgtttcttctgttcattttgcgctttttcttcccatttttctccaagtatttcgccaaaatgacttttgctgtaattttttattttctgattcaattggactaattagagcaattacaattaaaataaaacagaataatagtaataatttcatttttctggaattata

SEQ ID NO: 26655 - DNA, 1076 bp, Heterodera glycines
  unsure (1)..(1076): unsure at all n locations
aataaaccatcagctgatataagaaaagcatgtgnntctgtccttttcctatttatattgccatttcggcatcggtctaacaaagctgcgcatggctttgggaaattcctcaggaattaatttttcgttgtctaaagaaatgcactagtgtcgggcattttgacattaaaaagccattaaggcaccgttgtagcaatgatgcacgtggtccttggaaattcctcaggaattaatccctgaatttcttctattttcttatcactcacaaatcactgggggaaaattaagatgattctgatgattagcgttcttgttcgattttggcgctagtgcgatatttattctcatggttcttggaaagtactcaggaagtatttcgatttttgtaaataaaccatcagctgatataaagaaaagcattgttgtctgtccttttccaattatattgccatttcggcatcggtctaacaaagctgcgcatggctttgggaaattcctcaggaattaattttcgttgtctaaagaaatgtactagtgtcgggcattttgacattaaaatgccattaaggcaccgttgtagcaatgatgcacgtggtccttggaaattcctctggaattaatccctgaatttcttctattttcttatcactcacaaatcactgggggaaaattaagatgatactgatgattagcgttcttgttcgattttggcgctagtgcgatatttattctcatggttcttggaaagtactcaggaagtatttcgatttttgtaaataaaccatcagctgatataaagaaaagcattgttgtctgtccttttccaattatattgccatttcggcatcggtctaacaaagctgcgcatggctttgggaaattcctcaggaattaattttcgttgtctaaagaaatgcactagtgtcgggcattttgacattaaaaagccattaaggcaccgttgtagcaatgatgcacgtggtccttggaaattcctctggaataaatccctgaatttcttctattttcttatcactaacaaatcactgggggaaaattaagatgatactgatgat

SEQ ID NO: 26656 - DNA, 644 bp, Heterodera glycines
cctcctctcccttccttacccctccctccactacctttctatccccttcccctctcctcccatcctcctccccctctctcttcctcccaccccctacctactcccgcctctccctctctcccctcttattcatttcttccatccagtgggttatgagaatactcttgtccactaatattttcttttgatgcgatcgatcggagacctctgttaacagaccataatcacaaccaattggcagcaaaaggcgttttatgggacgccttataataaagactatagcttaaaagaccaaatctgtccgatggttttgagaaattaaaaagagccttcctcctctgtctattaattcatatttaattggacttctagtaaccacctcactcatatttgaaagagaccgttatgaatgttacttttattcccaacggatcgaatcaaatttgaaaatgtcccaaaaagactactgaaaagatgtgctgacactgggctggattttgatgatgatgtcctgaacatttgcgaagtgttcagcaaaggctaccgaagtcacgttaattgctcttctgtaaccaaaagaacaaaaaatttttttttgaattttcgtacctttagagattttgcccggttacgttgacgtccca

SEQ ID NO: 26657 - DNA, 1851 bp, Heterodera glycines
tccttcgcttcgaggattttctttacgttcagaaattttatgtcaatgcatccaaattggctgcttcggttatttcgattatttctttgacctttcatccccactttttcagatttatttggatatgattgaaacacctcaaaagtttacggacaaagtcactgaagaagaagggaatataagcgcagcagagatgaaaaagatgcgaagaaaagcgaacaaagtgaaggcggtcgaagaaaaggcgaagcaaaacggacaaattcaggggaaacaggtgaaacaattgggaaatcacaaaggatggaaacaattggaattggtaatttagaagagacggactgacggtgaattggatgtgatagagcccgaaccattggatccgaaaaagttggccaagcccaaaaatccgctagatgaagcagcaaaattcatccggcccatcttacaaatgccgtgcaaagacgtggatttatgggtggtcgcattccgggtttatttccacaagaacaaagtgaccgacctattttaacattttgaagaagcaattggacttctgttttcagctgctggtcatgttgcaatgccttaacaaaatcgtcactttggatccgtcaaatgagaacacaaaaaagctttttggcaaatatatggaaaaatgtttgttttttgtcgatgattctgtattttaaacccccgggaaaaacttcaaaaattttaatgtcaaaatctgaattgatcggagtgaatgtcacattcgtgacatgttcttccttaaaaaaattaagttccattaatttttttagataaaactgcctctggcgatcgtgcgacggatcagctggtcaaagaattaacccggtctttttccgcaaggattggttttattgccgacagtgaaattgacagataggaaaagcctgctcaccgacatttattatgcttgttttgttttaaatgcaattaaagaatggtattataaccgatcgattgtttatgttgtattcattgttgtggtaatatgaaatgtaatacctaaacagaaagaatatttttagttctgttttttgttttatggcattttggctttgataaacactaaaagcgggtgaaaccgatggtaaatgaccgtgcagagggatttggaagaggcgattcggggtgacttgtcaaatggtgaccattcaaaaaataatgtgcttttttaaggggcagggcaacagccgagcggtttttaccgtatgtatgagccaaaagaggtgagtgtgtgcaaatcgtaacgaatccgatttgattacaacatggaattgttattgaattggccattgtcaggtgatcggccggggactcgcttcggttgtgaggcgttgtgtggagaaaggtgatttagggagaactgctgaaagcacatcgaaacgatgccatttttattttgaagagtcgaggaaggaatacgcggtcaaaatcgtcgatctgagcaccgaacgacagtccgaaagggaagcgaagcgcctaagcgaagagactttttcggaggttcgcctcctcaaattgttgtcgggccatccgtccataagtacgttcttacgccttcgtaaatttcctctgatttttctgcgtttttcagtttgtttgcatgagttctttataacgacaacatttgtatttgccattttcgagttggcacgctgcgaattgttcgaagcgttgaacaaatcggtgacattcagcgaaaaacggacgcgactcgtcatgcgacaactgtttgtattgttttatatgaagttgaaaatgttattacgtttaggttcgacggtgtccattatttgcactcggttagttatttacaaa

SEQ ID NO: 26658 - DNA, 1176 bp, Heterodera glycines
  unsure (1)..(1176): unsure at all n locations
aaaatgatcaaatgattatcaattttatttttctaattccaaaatgaattcgaaacgcaaaaatntaatcataattcatgtggtaaaaaatgcatttaaaaataaaaaaaattcttgaatttgcttctgaattttttaattttaaatagaaaattactttttcgaaaattttgcacaaataagaggcggagaaattcaacgaaatttttattaggattttgatttaaaatgttgagaggtttaacaaattttgatgttgagaggtttaacaactgaatgttggatcgtcaacaccaatgagaaatgactaacagaaaagagggagaaaagggcgttggcttaggaaaatagcttataataaaggagagacgagcagacgatgagtgagagaaaaatagtggtaaaaatggtcaactgctgcattggcagagtcagagaggggtcacaaagagttcgcacagcatcgaatatttccttcattttgggcgtcattcttccccactgcacttctttcttcggtttaattacccaagtttgaggtacttggcgtgtcctgcccataatatctgtggcatggaataaattttggaactgcgctgcctaacggcggtgcttaaagtgcgctaaaaatgatcaaatgattatcaatttttatttttcttaattccaaaatgaattcgaaacgcaaaaatttaatcataattcatgtggtaaaaaatgcatttaaaaataaaaaaattcttgaatttgcttctgaattttttaattttaaatagaaaattactttttcgaaaattttgcacaaataagaggcggagaaattcaactaaatttttattaggattttgatttaaaatgttgagaggtttaacaaatttgtacactgaatgttggatcgtcaacaccaatgagaaatgactaacagaaaagagggagaaaggcgttggcttaggaaaatagcttataataaaggagagacgagcagacgatgagtgagagaaaaatagtggtaaaaatggtcaactgctgcattggcagagtcagagaggggtcacaaagagttcgcacagcatcgaatatttccttcattttgggcgtcattcttcccactgcacttctttcttttggttattttacccagtttgaggtacttggcgtgtcctgcccataatatct

SEQ ID NO: 26659 - DNA, 1259 bp, Heterodera glycines
  unsure (1)..(1259): unsure at all n locations
gacaaatggcactccaacgagacgttacgattcattgtttatagaaactccattctttgttcgatntaaggttcaaattgaagttgagacgatggacaaggccggcggattcattggctatatgttcgtgccggtcttaggcgagaaaggaatcatccataaaaacctttccgaactgcttgttgaggctggccttgccagtgtgcatttcactgctgatcggtcttcctattacaatcatttgttggcagcggaaaaaagcgcaaaaggcgcgaaattgggcatttggaagcattttgacgaaacaacgggcggtaacacaacgacaaatcacgaggaggagcgacgaaagcaggacaacgatgcgtcagaacgcaaattgcagtttaagaaagtgctggccaccgaaatataccctggcttccggtttgctgctcagtactttgacgatggttagtttttggggggaggggtaacaaaacatggacatttgtttattcaaggaccaaccattgaaaaactgatgcaagctcttcaaattgagatgaaaggcgtgccgactggccaatttgttcccaaacgacaacagatttgtgccgccaaatacactgacggcgacctttggcaccgagccaaagttgaggctcaaaagggcgacaaaattgacgtgtaagaaatagtctttaaaaatttattttccactgcttttcagttattacattgactttggcaatgtgagttctgagcattgtttcttttactgttcgactgagaattgacttttcagagagaagccctttcactcgaacgaattgcacctcttccaccccaattccattctcagcctccactggtcaaagaatttcaattggctcttattgcaggtgttaattaacataaaaataattaaaaatgatttttggtggataataaatgtcttatggattaataccggttttttactagaaaataatataaaacgctttgaataaatttatataacttgcaattcagaagttatgcttaatttgttgtcactagggttccaatttttaggctctaaaaactgccaaaataggtaggctctaggctctaaaaaaccccaaaaataggcactaaaaacctcatttttaggggtgtaaaatggcaatcaaaaaagtaaaaaattaggccaaatcagtttgagttaaatatttttaaaatcacaaattcttgtcaataaataaataaataaattttggagaaaaatttttgaaaaa

SEQ ID NO: 26660 - DNA, 1987 bp, Heterodera glycines
  unsure (1)..(1987): unsure at all n locations
ttaaattattaaatatattattgtgttagtatccctcaacgaagataattaattataaattnttcaataaaattaaaaattgatatataatcatgttcttcgtacaagtattatttcggttaacataatgaattgcatttaatagaggcttcataatatatctttataagcgtcagtcaaatcattataattttgtttaattctagttctatgcaggttttatctttcatattcttttcaaaggattttttaacaaattttattttaatatttgattataattattttattcaagtgaataagtgatattttatattatctaataacttattatattaagattaatccaatgtttgatcataaatatttatattattctcagtttaaattcttgatattagtgtaattttctttatttatatttcaataaagatattacaatccaaatttcacatgaagcacctttcttcactacactgcccggaaaattaattgagaatgagaagaatctcagatcaggaccacagacgccttgagcattaagtgaatgatgccctttacgatcatcaaataaatgttcatcattgcttggtgcaacaattgtgaaaagtgaaccatcaattgccccgcagcaattaacaaatcatgtgggttaaactaatttaaaaattaataatttttaacccggtaagtttccgaatcgtcctttggatttatgaaaaaattgagtagcaattaatcgacattcattctcgtcatttggccatttaatattttgaaaattatttatgatagcgttttcgacggcaataacacaactgtgtgccgttcagggctggacgtaattacggattacgtattacggattacggaaattacggcctttttggagttacggattacggattacgggttacggatttttgggatttttccgtaattttgatccgtaactggctttttagattatttttcgagactatttcttgcaagattattttttataaaatgaatttttttttctatttttattaaaagactacccatatttcgatttaatctgacttattcttggtaatttgtagtattattaacatacataaagggggggaggaggctagcaaaggggaaaagaggaaatactaaaaatttggctattttttaacaaaattcgttaaaattctgaaaaaaattttcctcggcggcgcttatcggcaccgtccgccccaaaaattcctaattatttttaaatattagctccaaaatcttagtcatttttagacaaagtcttatagcaaattgcataaaatttttcaaaaatttttccggcggcgcctttcggccccgccctgaacaaccccccccccccacattccccagttttttgggaaaagcacaccgcgaaaaaaactatgttgggattttcacctcaaaaaaacaagcagatattctgatcataaattaatcttaacaatttttagattggattttttaaatttaaaaattttttaaattaaaaaaaaattttgaaaattacggattacgtattacggattacgccaaattacggccttttttgacccccgtcatgacggattacggatggccgtaactgaaaaaatcgccgtaatgacggattacggatggccgtaactgaaaatcagttacgtccagccctgttgcatacgccgagcaaaaatggccaaccgaaggagttttgttgctcgcattatctttaatggaaataaacaattggttcgacaatcacaaacagcagcaggtggtcgacaacaaggataatatttgctttcacaatttctgcttttgtcgacagggattttcgagactaaaaaaagtgtcccgtttttccttgaccgcgttggtcctggcttttccgcccaaaaccaatcccttacagcagcagcagtttatttggttgcatgcatacatattaggcgtgctgagtcgaagcacgaaaatgcaaagt

SEQ ID NO: 26661 - DNA, 2525 bp, Heterodera glycines
  unsure (1)..(2525): unsure at all n locations
agctttacaccttcgataaatcaagtgcggacggaactagttattttggagatgcgaatacaagaactcctgcaaagggagaatttggacggatttggacgatcaattcattcgtttggcaactcctcatacctgtccagtgaacgcagcaaatgttgaggcgcagaaagtgaagacggcaataaaacgacgagcactcaccacgttagaaccgccagcagtgatccgatccgaagcacttcagaatgtgccatctccagctggacttttggttacgcaggatgcttcaaaactggtactgtttagtcgatgatatgaaaagcaatcacaatcttaaggtaattaaaagggcacggcacgaagtcaatgcaccacctgcggttccacaaagcgttgaccagctgattgttcctcccgcttaccagacgtacgagtcaactgacggcgaagtggagcagtttctgttggctgactctggtgtgtattacgaggccggaaacgaaaacccgcagaggtaatttttttttaaaactataatccattttaactatttttttcaaggattctgctgtttggacgtgaatctttcgggcgatgggctgatcgaatgaaagactgcttcggggacggcacattctcattggcacctccgatgttctatcaaatctacacaattttggccaagtgctgttttaatttgatttcacgtgaaaattgttttaaggcgtgggtcgtgggttatcgtcgtgtgccattgcttgctgacgtccaagtcgcaagcgtcctacgagaggatgtttggacttctccgtcaagcgtggccgacattctcgcctgcctcgttcaacatggacttcgagacagctgcgcgcaacgccgctgttgccacgtttcctgcatgcgaaatcaaattttgcttcttccatttcgtgcggaatttgcaaaaaaaaatcaaggaacaaaatctctggcaggtcagtaagcatattcagtttgtttttgtaattttcgtgtctattcagagatactgtactgacagtgttggctgagaatctgaggatgctcacttctgtcgcgtttctaccgctgagtgacatcaggacagctgtcatcgcattagacacggagtttgggaacgtcgcggcactccgaccgctcattgactggttggtctcatcattatcagaagtgtacttcaatttttgtgcaatttttaggttgctcaacaattacattggacaaccgcggccaaatggaacttggtctcaaccactcttcccaccagaacaatggaacgtctcgaactctgaatggagaagcaaggacgaacaactacgcagaggcagaacaccaccgtcttcaaggcgccttcaattgccgtcatccatcgatctggcacttcattgacgttctccgccgtgagcagaagggcaccgatgggaagtatgcgtcatttattgctggacttgagccaccgaagaaagctaagaaataccaagcggctgacgagcgcatctttaatttggtgcagaattataatccggtgaatccaaactatgacaatgatcacaattaccacataaatcaaaatcatcatatcattttggaatttcttcgtggcatttcgcgcaattatcatatgaacccctgaattgttgttattttttcattttgttanattttacttatatttgaaaaaaaaatctttttcctttttttgcaacatttttgaaatttacgtctttccctttttaatttttggcttcgcgccaaaacgtgggcgccaaaacgaccctggcgccaaaacgtgggcgccaaaacgtgggcgccaaatcgtcagcgccaaaacgaccctggcgccaaaacgtgggcgccaaaacgtgggcgccaaatcgtcagcgccaaaacgtgggcgccaaaacgacccagtcccctccattcaaataattttgtcatgtttcagctggatttgcaacgacgtttggctgaatgttctccccttttttgaccgttcccaattcttcctcaaattggcattgctttcttaccgtttcaatgctttggtggacaaacattttgatggaagaactgaattgacgcttcggagatggaaaagaattcaaggaccaaaaccgaaagtgtctgtatttaccggtggcggttttcccgaatttcctttgccggaccgtccgcttcccaacggaattcgctttaaggacctttacatacagtaattttaattttttgtttaagtatatataaagtcatttcatatttcttcaggtacattgaccactctgtgctcgcatttctccgctcaaataagcacatttgggacagaggcacaaaattattcattcgagtaaatgaatttgaaaatgatactacggagatttggaatgttttggtccgtgaaatttggcccatttttacggagacgacaaaatgccatcattttccccatttacaatgctgatcatctggccaatttgcttcgtctcacatcgccaacaattctctccgat

SEQ ID NO: 26662 - DNA, 1264 bp, Heterodera glycines
actttaattctgcgttggatttttgctccccataattgtctcccgtaccccaaacagacacttgaaaaaatcgatttttttgttttcggggcagtccccccgaaccgacgcgcccagatttatggggagaccgaatccttcgggagtagcttccctatagcctgtactttaattctgcgttggatttttgctccccataattgtttgagtaccccaaacggacacttgaaaaaatcgatttttttgttttcggggcagtccccccgaaccgatgcgcccagatttatggggagaccgaatccttcgggagtagcttccctatagcctgtactttaattctgcgttggatttttgctccccataattgtttgagtaccccaaacggacacttgaaaaaatcgatttttttgttttcggggcagtccccccgaaccgatgcgcccagatttatggggagaccgaatccttcgggaatagcttccctatagcctgtactttaattctgcgttggatttttgctccccataattgtttgagtaccccaaacggacacttgaaaaaatcgatttttttgttttcggggcagtccccccgaaccgatgcgcccagatttatggggagaccgaatccttcgggaatagcttccctatagcctgtactttaattctgcgttggatttttgctccccataattgtttgagtaccccaaacggacacttgaaaaaatcgatttttttgtttcataaatatttttttcagaaagagctctaaagcgcaccaaattttatttacaacttaattttagcactctgatgctttagtatcaaaaaggaagatggagaaaaaattttttaaaaaatttttccttatattttggttatatcgttttgcttttggtggggtgcttggaacagtggaatcatgcgcacccgtccgatctggcaagttaagcaacgattgctgactagccaaaaggttcggtgccgtgatgaaacgaaccagcactgcttaccccgcggcacccggcacggtcccccgaaggaatggatttaattaaattctctccttcggggatttttttccattaggtcgtccgttagcgttcgatggctctagtcaatttttcaaaatttttgttgaaatatttgtcgtgctctgaagggcgtgggagggggggggggggggggggcgaaggcccaccacgaggccgcgaagaggccgagagagtaccttcggtgcaggaaaattattaaattttaaaaat

SEQ ID NO: 26663 - DNA, 469 bp, Heterodera glycines
aaaaataccaagaacgcttgaaaaattttccatttgcggcaaggtgcctggaattttttaggcattttgcaaacacctttttttagctatttttattattttttgtaactttcagcaatttcgtaatgacgtttggctggacattttggcaattgtgaagattattggtcccacaaaaaaaaagaataaaaaaactaaaaaacatgtttttaggggttatttgatgcgctgagcacgaatatgacatccatttcgaccaatttcgaaccaggacccgaattcgaacaaaaagtcgaaatttaaattttcgatttagcacttttattctaaaattgactaaaactagcagaaaaaaaatcataggcaattttaacagcaaaatgagtcattctatgcaaattaaaacatacccagaagtaaaattcaaaaaataaagactttcgactatgttcgaactctggtccggggt

SEQ ID NO: 26664 - DNA, 1398 bp, Heterodera glycines
ggctgcgctgaaccccgaatttgatcccgccattgtcataggagcccaatattttttttagtttcgaggtggctttaaaatgaggcttttgccaaattagctctcgagactgtagccagacggaagcagggcccagccgttcgtccagttgactttttacagaagtttggggtggtatttttaccaatcagttttttatcctgtttcgaggtaggctttaaaatgaggcttttgccaaattagctctcgagactgtagccagacggaagcagggcccagccgttcgtccagttgactttttacagaagtttggggtggtatttttaccaatcagttttttatcctgtttcgaggtaggctttaaaatgaagcttttgccaaattagctctcgagactgtagccagacggaagcagggcccagccgttcgtccagttgactttttacagaagtttggggtggtatttttaccaatcagttttttatactgttattgatcgtatccaactgagaatctgctgaatggggtttttggctgcgctgaacccgaatttgatgccgccgttgtcataggagcccaaataattttttaggaattttattgtacctgtttcgaggtaggctttaaaatgaggcttttgccaaattagctctcgagactgtagccagacggaagcagggcccagccgttcgtccagttgactttttacagaagtttggggtggtatttttaccaatcagttttttatcctgttatcgagtagtttaaaatgagaatttgccaaatgggctctcgagactgtgccagacggaagcagggcccgaatttcgtccagcctttttacataggagaccaattaattttttagtttcgaggtaggctttaaaatgaggcttttgctaaattagctctcgagactgtagccagacggaagcagggcccagccgttcgtccagttgactttttacagaagtttgtggtggtatttttaccaataagttttttatactgttattgatcgtatccaactgagaatctgctgaatggggtttttggctgcgctgaacccgaatttgattacaatcaataacagtataaaaaactgaaaaaattatttctaaaatttcgcgcactttcagtgtcctttatttcccgcactaaaaattggggacccaaggctttggtttttgcaccaaaattagtgaccggggactcctttcatttttaatcacttttccgagttttaaaaatactctttttctctaattctctcctctctcctatggtgaatgcgcatctcagagtaaaagatctgcatgttttttgaggtggaaatcccaaaatatgggcctaaaccgggagaaaaatagcaaaaataggggtaaaaatggcagattc

SEQ ID NO: 26665 - DNA, 1467 bp, Heterodera glycines
  unsure (1)..(1467): unsure at all n locations
aaaaacgaaaagttttcaaagcctgtaaaaaatttattnaagaaaaaacttcnaaaaatttcgacttttcgcaattttcatgcatacntgttttgataattgtctaatcgcaaagcaatacnttagaaaaagcttctaaatagattaagctttcgaacgacatcaacatgttggatttggtttacaaagaaaaaagttatagccaaaaacatgctggcgccgaaacgggagcgccgaaacgcagtggacccggtaagtgaatatcataccatttagcacaaatttaatgctttttggttcaaaaaatttattaaataatatggcatagtgtttattttttaaatttaatttcagtgacgaaaggttcagtgacgaaaagttcggcgctacttgtaaatagtacttttttgaattttatcaaaaacaaaagggggaccctttcgttttgcaaaatttttttgtgataaaaaaccatgaaaatttgttatccggggtcttagaggtcgctgattatgaatctacgcataaactgtacttgagcccttatttcttatccccttttcatttctttcctatcaaaggtatgcgcaccaagcaaaatgtgcgggaaaaagttatcaaatcactccttcatggtgacgggacaccccaaaatacagtgaaaatcgggcaaattttagaagaagaaaaaaaattcccatgggtttttttgaaattaaatagacccattggaaagagcacaaattctctacaggattgccttttgagaatggtggttctatgacttaaacctacaaaacttgcattttctgtggagaatttgtgctcgtttcaataataaaattttgaagaaaaaattcaaaaactaaaatacagtgaaatcgggaaaactttcgaaaaaattcctaggggttgggaatttttttttgaaaattttgattaggcttatnggaaagagcccaaaatttactaccgctttgctttttaatgtttaatctacgtcttatacccacttaggtatggccattttatttttgatgatggttatttctactgtaaacactgttttcttaagaaatacagtactttttgtagactccgaaattgattttgatcagcataaaaagttatgtttgcatgaattatttcagatttttctgtgctctcaaatttgagattcaaaaagtggtgttaaacatatgcaccactgaaaatggggtatggtacacaaagtcaactgtaattcgggtttgaaccgatatttgcttaatgattggtatcattcgaaagcccattaaaaatgctacaaaaaatgtcaaaacattttggtcatcaccaaccatttaactttttataaagccaaatttctcgaaaaggctagtggtgttaaacttatgcacctgactgtattgtgtcaaaaattaaaaagataaatacctaaaaactgtattattattattttttgcc

SEQ ID NO: 26666 - DNA, 1416 bp, Heterodera glycines
  unsure (1)..(1416): unsure at all n locations
atcagaccattccttcacggtaaatgcaatattccttaaatggcttaaaatgtagatttcataaaaaaattctattgaggctaaaaaattggctgttaaaattttccgtgaaacgtgatgcggaccgaatgtttttttccctaaaaacttcccggtttcagcgcattttggagatattgatcttcatgaaggaaagatctgatcatcttcggtgtgattagaatttttgattgtaaaaaaatatgcgtacaaattttttcaattttttaagtgaattgtagatagtgccgaatttggggccatttacagaaaaaattcattatttattttttttatattttcgaatttattttaatgttttttttaaagaatctgtgcttggtaattcacggaaagtgttcaaattcacgaaaaattgagatgtattatatttgatacgaagaatatatatttatcatcagaattatatatagaaaaaagtttccacttcaaaaaactatcagaaaataatatgaaaaatcattaactttatttagggttacatgggtttgacccgaccgggtccagactagaatacacggctttttcaagaaatcattcaaaaagaaaaaagaaaaaccgtgttcttataaaaatctgttgtttatttaaaaaatttaagcatcaattatttttgccaaaacgcatcaactttatttttttaatgggtaataaaaaacttattttttttcaagatttggacccaccccattccatacaaattagtcatttgccttacgattgcataatgcgcatgggcagccagctccatccagtcccttttttgtccactgccaatgtcatgtttctgcagctgctcgtttagccattgaacgaaacgctccatttcttcaggtaccttatccggatccactgctcgatgttgtccaaccttgattttttatgtttaaattaatacaaaaatttatcacttctaatttttgcctcaaaattttattgtattaaaatatttaattatttagaaaagctgtcgcggtttatttatttccctttaaaggaattttttaaggttataaaaagtcaagcattgtgtgggctgaaaatttaaggaattcttttaaagtcaaagaaagtgttttaacaaagctcactatttaaaaaaataaattcttcataataaactggtcctcggatacggtacatcatatggtataaatttaaaaaaatgcttgaacattctctaaacgcagttgcactatgcgccttaagtaatcaaacaaaatgaatttttaagaaataattgatactctacttagaaataagatagtgcctctatttaactttgttttctttgttgtcataatgttttatngtattannatcatcattgaaataaatcgtctataacctaaacag

SEQ ID NO: 26667 - DNA, 1719 bp, Heterodera glycines
ccgtttttgttgcataaatgtgaattttttgaaaattgaattttcgagttttcgtacgagtccgggttcggggttcgaaatgggtgtcataatctgattcaccgtcctttaaaaccatttattgtgtgtttttatttttgggttggcgccgaaacgtgggcgccgaaatgaccctttcccgctgaattgtccttaaaattaaatattacaccttttacctcgttattcattgacatttgaaaaatgtattagcaataagcaatcttaaaatttttaatttttgaaacccatttttgctaaaatagaaatttctttttttattttaaagcaataaacaatgaaattgtttggaaaggtcttgttgtgcggttgaaacgcacgctcaacatttataaagaaaaattcaattgtttttaaaattaaatttctgaaattaattttaagtgaatttttttttacgaataaccaccattttataatttgcgattttgagatgttgttttcccaggatggcatttgcacctggccatttttcgaaccctggaccagcattttttacttccttgaaagcgaattattttttattttttaaaaattccaaaaattcaattcttaggcggtgtattaggcttagttccaggtccaggctatttttcggcaaactgggtttgtcatgggcctggattttcctgggtttttatccagaaaaagcaagtccaactctgggtttcctggataatattttcgaatttgtttttttgagtaccacttttatggcaagttatcaaaaagattaaatatatttaaaaacaataataataataataataaatattctgggtttttgttcatgaaatccaggtccaggtccaggcttttttcaaaatgtcgagctctaatggatttatacggacaaaaactttaaccaaaccaaataatttaaacacaaaaaatcactttttaaatgcaaagaaaaaaaaagtatacaacttataaccgtcattatatgcttcatttcacaactaataaccgtcattatatgcttcatttcacaactaataaccgtcattatatgcttcatttcacaactaataaccgtcattatatgcttcatttcacaacttataaccctaatcattaaatgcttcattagttcatgtttttccgcgtgaatgtttacgaaaagtgcaaagttgggccgataaacaattttacggccctactgtaccaattaaaaatacagtatccatttgcgcatttccctttccttgggttaagcgagtaaattggccaattcgtgcaccgaaaactttgcaaatttccaatcagaatttttttcgctagaaaatgaatttttttctcattattgaaatatatttttgatatttctgaagtttatttaaaaaacaaaaattaaagaatttttcgtttttctaacaaaaaaattcattttaattttttgctttttgagaattcgagattttatttgaaactctaaagttttttttgtttttgtctacgagttgcctattatagctttgctttttgtctgagttgtcattccacctggccaaacgatgatagccatgcgaaagttgagaatttgctaatattattttatttttattttgagaatttgcaatttttgagaaaataaatatttgccaatttttttttaaatatgtagcaataaaaaattttctgaaaccaaaccccaaa

SEQ ID NO: 26668 - DNA, 2372 bp, Heterodera glycines
atttcaaattattaattttctaaattccacctttttggtgttccgcctcctgccaatgtaaacggtcgcttttccattgccaatcggacaaattttggcactaatttgttcctgaactgtcttggcccgtagacattgttcattcggaccataacataaggcactttgtaggaatgcttaatcaaacggaagcaatgatcccccaaaagtggttttgaacggtcggttaaatccaatagctgcgcaagagcagttcacacgcggctttgctgacagcgtacggattggtcggctccatcggactttgctcccttttcggctcttcggcgttcagacagtcgccatacacttcatctgcagttttaaaacaatggatgtttttttgtcatttcaaattgcgtaattgcgcctgtgctaatgtgcactaatttggccaactgtccgtggtctttcgccgcttccagcagtacggtcatcgctaccgtattttcctgcatgtattcggttgggttcgcgtacgattcgtccacgtgggtcaaagcggcgaaatggacaattgtgtcgatctgaaaagagtgaagtgccgcgctctctctctgatcagttcggtgtgatcggcagctgaaactgacccggtttctggttaaaatgtttcggacgagtgtcgcttccgtcagatttccttttacgaataaatagcggtccgaatttcgacatttcttttcgatgcgttcttccgaggcgcccggtgccattttgtccaaattcacgaacctttatttttgaaaatgattaaaggaaaataaaatgggccacactttgcttggggccatctgtcaaaagcgaaattcacaaaattggagccgatgaagccgcatccgccggtgatcagaacatttgcagggaaacattcagcggacaacgcatcattcatcatttgaatatttttaaaatataaaattaattaaataattttcaatgaataaaaatcgattaaattgggaaggactcggccgtaacattcgtttgggttgcgcacacacagcgaaattaaaggcaaattccgatatttaatttgttccaaatggagggagaaacttttgtacgtctcttcccaaatgacaaattgcgcataatttgctaattgggccggtaattgatcattctactccgatcattcattggcgggctaaagacagcacttttcattgtgccgaaaatgactcaaatgccctgtctcagtttaaattcgcttgtcgggtaattaattgttttattaaatgaaaacaaaaatagaaacaaaaacaaaaaagcaacataaatgaacagttaaatatttgttttttcattattttaatttataattcatgccctattcttttctcaactcggcactcgaatttcggacaatgaattgttatgcccatttcgcgtttgattgagggcaaaactttgccaaccgaaagctgaaaataaatgcaattaaattttaatatttttctttggttgttaaacgcactctgtactgattgagaatatttgcagtgaacaggaaaatttccattttggccattgattcggcaaaacattttctaaaattccaaaccatacaaagcaataaaattaattaatgatttttttaaattttaattattgtaattttaattattcattgaatttttcaaattttcttaccgccgtccaactgaaaatggaatcagtttttcgcatgtcacaaaattgccattttcgtccaaaaatctttcgggtcggaacattttcgggttatcaaatacctaaatttttaaaattttaaatgatttttgtctttctgttacttcgtcatcggccaaaaccaccgaaatttgtggcaaaatgcaagtgcccttgggaatttgaaagttgccaatggtcacgtcgacgaatacacgtcggtaggcattctgcacgatcatgttggaaatgcgcagaaactcctaaaagggaatggcacagtttggcttaaacaaataaaataataattattttattttttcattttaaattaattatttatttttgcttcctttccctttttaaatatttttgctgtaatatttatttatttatttttgtcatttccgtcacatttatcgttgcgtttgtgtaaggcagccgcgctttgtcccccgcgttgatcagtcgccgttcgtcgcccatcactttgtccaattcgtcgtacactcgcgtcaaactctgcgggttgttcagcaagtgcgccatgccccaggcgatgattgtactgctcgtttcctaaggcatttccgaatttggcatcagtcaaattgcattttcatggcatgcacttcgcatttctataatttaattaaatt

SEQ ID NO: 26669 - DNA, 1284 bp, Heterodera glycines
  unsure (1)..(1284): unsure at all n locations
tttattttcatgataaaattttaaagattttggtttggatttttcatgactgggactcggtttaaaaactaggactctgacccggctttctgtacccggcaataccctgacccggtatttgcctaaatacccaggcccgtacncctaatttaatatacgattttgaagttttttaaattaaaaaataaggctacagaaaaaaattgaaaaactctcgtcctctcgcctctcgccaactctcgtgtttttggggactctcgcctctcgccaaactctcgctctcgtgtttttggggactctcgcctctcgccaaactctcgctctcgtctttttggggactctcgcctctcgccaaactctcgctctcgtcttttctgagacaagtcacacccctgctgtgcagcagcactgtgtgtgggaaaagggaagaagtgagaaaaataaagaaggaaatagtgcactgtctgactgtctgtctacgcttttgaaaaatttgaccaaaatataggacccaaactagaggagtaccaaaaattctgggctgctgtagaacataaaaggtaactcgcccggtgggactcgaacccacgaccccagcaatccgtgccgtgctctaaccaactgagctacggacgcctcttttaggggttctctcaggtcctttatcccactttctcccacactccgttccttctggcatcacacttcaaatattttccattatacccaacaattcaacccctttaccagtatgaataatgccggaattcactgtgccgtcggttcccccctctgttaccaattgacgcgcgttcttctcaactctttgctgtgcaaagaacgtgtctccttctccaaacagcacaaaaaagttcaaaaatttcctttgccattttaaaattttgttgtaaatttcctacataatcctcggatttaagcaccgcaacttttccgagcgcaatcgccaaatccgatggattctctccgtgggccggcgctgggccctcgggctgaacacgctgggcttgtcaatcgcaattttggacagagtgttggaccgactcaaagtgcagggaaagtgcgttttttttctttgggacgggggaaagaaaggcgctattataatttacgcgtcaagttaaatgtataattttgaaaggagcatcaaattaaacattcttacaattattagcattcgatagctctaagaattttttattcgtttataaaactaaaaaattagcttttcacacttttttgccataagaatcttgtttttttcaa

SEQ ID NO: 26670 - DNA, 2113 bp, Heterodera glycines
ttaattgattaaattttgccatttataggaggaactcagcactcccgtatcctactacagttttgcaccatggagtgatcgatcagagctgagagcacgcatcaaattgctcgatggggacaccacacatttcaacatttatttgctccacgacgccattgaacctgtcaaaaactgtaaaagcgcattttggatacgatggttgggtattttaataaattttagtgggcgctaccgtaatgcaactggaggtgaccgtatccaaagagaatgtgtcgacaatcgaattcagcgaattttatgtaggaattattctaattaagaaaaatgttggtctccatttccaaattctaaccagttattttaaccatcgaatccaatccggaaaatcccggccaaatggttcgtttttaaaattaagatccccgacaccaatcctagatttttcaagatttccagttttgaaatacgagtccttttttcatttttttttggcatcttgctctcgggttatcgtttttggaaaatgaaactaaattttaaaaatcttgaaattattcgatagccctaaatgttttctattatcctgtaaaatttcaaaaaaaaaaattcgttaattttcaaaaagttatgacctgtgaaattcaaatttttttttgtgttgaacatttttggtcataactttcttgaaatttaaagaaattttttgaaattttttaagatcatagaaaacaagttttttagggctaacaaaatgctatcaagaatttatcaatttgattgcttttgttaaatcaaaatttccataattatttttgcgtcaggcatttccatcaaaatgcccccctcaaattgactttttgccttaaaattttttacaaattttagaaaaacgacaaaagacccttcgacatatacagcaaaatgatcgaaacccagttcaatgcatttctcaacaaagaacagcagcgcgcatttgaatttaaaattaaattgagcggacggacgtgcactttgagtataaatggtgtcaaattgtccaacaatcagtttcggcaacttccagcttgggccacaaattacattcgggtgggtgtgtatgtacagctgttggccaattccaattagatgttttcggaagccaaaaaaaattccgaaatttaagcatccaaattagggtggcaacaacccttgcgcggagggggagggggaaggagacagacggcattctcgaaattttgcccacgtaaacaaagttttacccttttttgccgacccaggtcggttacgaaaaactggtggcactggcgaaattttcaaataaaattttcaccgcttttttccgaatattttttgaaaaaatcgctctaaaatttgaaattattctttcttcgaattttttttttcttggcggtgtttcgggcattttggggttcatcgttatattcattccttattaatttacaatttatttagctcgagggaaatgtgtcaacattggattaccttgaatattattataaagatgaggcacgctataaaactgataagaaaataaattctgttttaaattgttattttaaaacaattaattaataatggctattaaatataattttttttttaaattttaaacatacttaaacatttagctgaaaggcggatggaaacggcacgagaagaaggccaagattgatcctaatgcggtaaaaataatatacaaagcaatgtaaaaaaaaaaaaatgtcaaaaataaatgtatcggcagaaaaaccctaagaaggaattaacaaattaaccgtatgattgatgacttacccccaacccccccaaatgggttataattagggtcgttacgtttaatgacgaaaaatctcgaaatatttaactaaaatagtgacgataaagtgccaaaatagtgaaaaaaagtccgaaatagtgacataattttcagccaaaaatcgagcaaaaaataatttttatttactgattgcagttgcaaatgaagtaaatttcctttctaatcttttcttagcaaatattgatatttttaacccaaaattttgtcaagaaaaaaaatttgagggatgagtttttgagaaaattttctaaa

SEQ ID NO: 26671 - DNA, 1703 bp, Heterodera glycines
  unsure (1)..(1703): unsure at all n locations
aaaagcaaaaaaaaatttctttaattaattgttttgcagacacattagccatcgaatactaatccaagaaaaatatccccgacccagactctcatcacttaaaattgattaaaggtgcgccagcactgtcggccgaaaattcccaaaaagttccaaattggggccaaaaataatattttacccggtggcgcaaaaattaaaaatttttggcaaaaattgaccctgagccccaaccccggtcggttgggttcacccccaccccacgtatcgcccccgacaaattgcgttcttccactccaaagcctcgggacgcaacccttttatgaattaaagcagaaaccttttgaaaaaaaacaaaacacgaaaaaatatggcactaaataaaaggtgaaaaactgaaattaccaaaaagaaagaaaaagtaataagtaaattagacttacccatacgtcacggcatgtcttcaataagtcgtcttgcaggttccaaaggcattcatttaatgcctaaatcatataaaaaatatatttatataattaataagcaatttattcttttttaaacattgattaaagaccgtttctttttcttcatccaatctttcaagactgcgaagaacttcaagtctctttataaactccaatcgttgcttgacatcttttttgttggcatttgcaaaaaggtcagcctccattttatttatttcctcattttttgtacctgattggacaatggactgaaaataatgaaaataattattcagaaatttatatctatttaaattgttttattaattttaaacatacttttgttattttatttttttaataaattttgataataaagagcgaattaaattcaaatttatgaaaaaagcataacaaaaaaaattaaaaattggcaaataatatataagggtttattaaatttacaaacaaattcttgattaaaattttaatttattaaattaccaaatttatcgtccttgccgcctcatcatatttatcaattttgtaaaaataattggctttttgatacagaattcgtcgttcattgaccattttatttatgtgattctgacaataattaattataaaatcattcctgcacacaaaaaatatttatcaagggcatataacctatatacttgaaaagctgaatttcgtgttttctcattgctatttttctgcaagtcatatttgctttcttctttatttataaattcacaagactttaagccttcgtttaacaccaagaaattagtcaatgaacagattaaaaaaacttatggcctaacaaaactgagaatgatcagtgattgaacgaaagcatatactgcagtacagccccaaaaaaatctcaaaaatactttttttctaaaatatgtacgttttcaataaatccttggttttgctggcaccagcggtgccgaaaggtgtcactggggaaaattctaaaattaaaaaggcccatggttgcacattttgcattaaatgcactttaccgtaattaattgaaaaataatggaacgaattattttgcatttttaagtttaccgccaatttanaaaaaattagcaatttaaatttggtatgaaaaagccactgngccaaaaacatagctgcactaaagatcatatgaattatatgcnccattcttagctgtaagtgattaataaatgaggcttgcagcattttgttgct

SEQ ID NO: 26672 - DNA, 1286 bp, Heterodera glycines
  unsure (1)..(1286): unsure at all n locations
agcaaaaaaataaatttattctaaactatttaattacattcaaatcaaacaaatgattttctgataatattcatcggcgggtggactttgtttagccgattttttatgcgttttttgatcggttccatccaaactttgatcaatgctttacggaacaatgagctaaataaaataaagcaaaatttagagatttgattggattaaatggaattaaacctggcaagtgcataaattatgaaatttgttgaaaaattaaagcaatagagaaaaaaggaaatggaataaaaggcgtaatatttttggtaaagtgagtcattagtgacggaggcgagcacaaatttgagaacactgcgcacattaaaaggcaaattgaaagccacgaaaacaattgggatgaagaagaggacgacattgttgcatttgatgtcagcggaagaggaagaagaagaagaagaggaggaggaggaggaagagcctaattagtgggagaaaatttagaaataatttttaaaaattggcacagataatttaggaggggtaattttagaaaataaatgaggtaaattatggagtatattaaagagacaattaaatatcaaattgattaatcaataaggaggaggaagagcctaattagtgggagaaaatttgaaaaattaaaaaaaatcacaaaataaattaggagggggtaatcttttagaaaatcgacaaggtaaattttgattgaattaaagaaacaattaaattcattcatcaattaatccattaattattaattaatttattaattcatctattaacaattagtgaataaaaataaatcttaattaataaggattaattgattgaaagtttcaaagtgtttcaatttgctcacactgaccttgaatgatgttcagagagcgaactttgaaggcaattgccaggttggcaatcagaataattgtaaccggcaaaacaaaagtaaaaattaatcggggccaataaaacaaaaactaaaacaaaaataataaattaaaataaattaaattttcaatgtttaatacaataatatatttacataagcggatgaatttttgtagtcgtaaacgcatttcacattgtcaccaaaggacgattggacaagaattgtgtagggatcactttcagtgtttttgagggcgaagaacaaaacattggcattcagaanaagggtgggcaccaaccaacaaatgatcaatttccatctgccgctgtttngatactannacataacattntaaatanatgaataaatggaggaaatt

SEQ ID NO: 26673 - DNA, 2217 bp, Heterodera glycines
ttcttatcggccggcgaattctcctgaacagctgagacaaaaatgcccgactgattgcctccgatcacgcggatgccaagtccatgggagcctttgtggaaagtaatcgaatgcatttcacggggctttctctgctgaaaggtcgaaacggagacggactgatgggaagcgacgaattgctgctgttgttggaagtcgagcattctgaagagacaaattaatatgtaaatgccaaatcaaaagtcaatggaatccgtgtttttgattggtcacttgttcgaaattgctaaaaatggcacagaatgccctcctctcccctcctttcctccgtttggttttcttggccaacctttgcctttggtcggccaaaaatcgctggtgttgctcataagaatgtgttgctgtttggttgaattgcgtttgttgctgctgttgttgttggatggtggcgttgttcatcgaatggacggaagacggcgtttgggagagggggcggacggaaggggcgggcgacggatgggcggaaaggcgctgagagtgtgccaaatagggcgattggtgctggaagaattaagtttattatgcaaatgttaaatggactgatcagattaaaaagagcgataaaatggacagatcagaggaggccaaaaatagaagtgaaagatcgcttgttctgaccaatttgatcagacccgaattaattggattcggtgtgaacagttgaacaattttaatgataaaaaaaaaattgccgagcaaatgctcaacttttttttgtttctttgctgggatgtaacaattgatcagatgaatgttctgatcagttcgtgtctcatgttctctctttctctcacctgacatgagtaatttggctgtgtctgcgccggcggcgtgtaattaccaccagaattggtcattgggtcggagtaccttttggcaaacattgaattgtccaaatttatctcagcaaaccgtttgaagccaggcaagcagttctctgagccggcggaacatttgcgggcaattgcccctgtcggaggggcgaattggccgtcggcggatgagtgggcgtaatggacgggggtgggcgactggcggggcgtcgcctgcacactgcccaaacgttcgtacacctttttaggtggaattgtcaataattttttgtggggatggcgttgtgccgtggcacgcgaattttaaatcagaatgggttcgcaattcgcattggcattttccaatgactgaccgtcgtttggctcggccaacgcgacccgcccgccgtccctctgcgcacgtcccgctgcacaaccaaagacagtttctcgcgcgaccgctgcaacagtcgcgcggcttcgtccaaagtgaatccgtccagtgtctgtccgtttatcctcaaaaccgtgtcgccctccttcagtcccggctctttctccgccaatttcgggttcaaaatctctttgatgaagaagcgacagcccaaaacgatgccgaagtcatcctttttgcgcgacttggacagagtgaatttcagcgttcgctgttcaaactccacaaaaggcactggcactcgtcgcttcacaaccttcagaaaggggaccgattttattcatccgcaattgtcttcttggccaattctgctgaccatgttaagttgctgtgcgtctttcatcaccgccacggcacttgcgtaattcgcgtgttcgagtgggtagccgttgacggagatgatccgatcgccgacttggagcagaccgaaggccggacccgattttatgacgtcactgacgagaatggcactttccttgggaccacccgaaattgcgatgccgaaaccactttgagaagcctgcgaggtggaatatcagtgtaaatgaattacggagaaggagcagacaaagaagtggatgaggagaggagggaaagtgatcggaaagcaaattgatcggaacaaagggacgaattgcttaggaacaacaatcggcaacactccgccgatcgttcgttgtccgactcccccggggcatcagttggccaaagagaggccggaagaagcggaggaatgaatgactgaagagtgaatgaccaggtggccagccgatcagccaataatggggattaaaggattaatggagagacggattgagagaaagcgaagcgaaaatgggaagaatgaatgttgtgattaagaggatgaggtggaaaaagggaggggggagt

SEQ ID NO: 26674 - DNA, 1626 bp, Heterodera glycines
  unsure (1)..(1626): unsure at all n locations
agacgtaatacacnggggaatattgtaaatttgcacaaaaatatagttcaagattataaaatttatttcataaagaaggtatagataattttaaattatagcttttatattatccttgcaataaatttatacattttccgtctagtgaatcgtgatcagatagctaaactatggagttattctcaaactaaaatcgaaaattttaatcaaacaatctaatatcttgagaataattccagaatttttcagtctgattccgagtcactagaagcataatatatataacaatttgaaggataaaataaacatacaatttaaaaacacgtgctaaaattatcaaaaataataatctaaatgtttatcagaattttaggacattttcctatttgttctcagagaattacgattaattaaaaaaaaaataaaaataatacattaattaaaaaaatatttgaaaccatttaaaaatttactataattcttgagtgatttttcaatcttttatttttaagaaccgccccaaattgcgtttgtctttccgatggatcagagtgactaatatagaaagcaatttgtgggataactcaacaaattgattcgaaattgtttaaattttgttgaaataatatagatattttttgcctatgttttagtaatttctcacatttttcacagagtgctccattgttaggccgttgtttattaggccttattttatttcttaaaatgaatatatcgggatagctgaataaaaaacaagacgaatttcaaaacgctttccaaataaattaaacgattttcttaacaatttcagataattgttgagaaaagtttgttcaaaaataatctgggatttagtctcaaaattaatcacatttatccatcgggaatactcaaggcaattggagtgatttttaaaagtaaaaaaatagaaaagctttaaggaattaatctcaaaattttatctggtttaatataattttcttcagggcatgacttatgttttttggtgattaagacgtaatacacggggaatattgtaaatttgcacaaaaatatagttcaagattataaaatttatttcataaagaaggtatagataattttaaattatagtttttatattatccttgcaataaatttatacattttccgtctagtgaatcgtgatcagatagctaaactatggagttattctcaaactaaaatcgaaaattttaatcaaacaatctaatattttgagaataattccagaatttttcagtctgattccgagtcactagaagcataatatatataacaatttgaaggataaaataaacatacaatttaaaaacacgtgctaaaattatcaaaaataataatctaaatgtttatcagaattttaggacattttcctatttgttctcagagaagtacgattaattaaataaaaaataaaaacaatgcgttaagtaaaaaaatatttgaaaccatttaaaaatttactttaattcttgagtaatttttcaatcttttatttttaagaaccgccccaaattgcgtttgtctttccgatggatcagagtgactaatatagaaaacaatttgtgggataactcaacaaattgattcgaaattgtttaa

SEQ ID NO: 26675 - DNA, 2213 bp, Heterodera glycines
  unsure (1)..(2213): unsure at all n locations
agtaaataatacacaanaaaaagaataaaattaatataaattatgaaatattaatgaatacaaatttcagttggttatgctgatgaatggattngagacgggtaaattttatttttttaaaagttattaattgggcataattcccttaattgaggcttattgtccattaacggcgcagttttctgcacttatcctgacttgatttacacatccggatcagttggtttatgtaagaatttttggttaaatttcgatttttaaaaaattaaattcttttttagccctttggtacgcaggtatttaaaaatttaaataataatttttatttcgaaacttattttttgaaaccggagctgaacttttgctggctatcaaccgttgtctggagcttcttgctccaaaataaaaaactttattttaatttttatgaaatatataaacttttggcgaaaatccgtatttttctttcattttaggttttttaattcaacaaatcacacaaaaaatgcaaattgaaaactaaaaatattttgttcaaatgtgtgtcccagagaattcccaatttttatgcatttttgacgacttttttgattaaaaaaaaattattagaataatttagtggtccttataatgaattatttataattattttaatatttttcaaagcttaactttccgtttcaaaacaaaaatgaattaattatcttaattacctaattaattacccattttgaggcaatcgcacttggttgctgtgcattgtgccgaccgtttatgccattattttgtcattgtatacgacgcccattctgttctctgggctgtacatgtcgtggttcttcaacccatacgtcggttacgtggacgattttggcaaaattgtaaagattttcaacatattttccatttatcataccgtatcactttcgcaattacagtaccacagcccaatgcacacgtaggttttgattttgatctttttttaaaaaacatttgaaatgttcatatcgccaataattaaccaaactttgccagtgtataattatttttacaaaaacaaaattacagtatccatgacatgttcgtcatcttcggcttgtccgccatttacataacattttccgttttgcttatcatccagacacaatcctacaacaatgtacattaccaggccactctcgcccaaaaattggtcgaatttacgatttaaaaaatatgacaggcatttttagatgcttaaaatcccaaaaaattcaaaatatgcaaaaaccaaaaataccaaactaatattttagaaaatcattaaaactgtttttccacgcaattttcaaataaatttttcatcgattgcattttttaaatattttttaatttcttctaaaattttatagactttcctccaagttgtgctgatcagcttcttcaacggaatggctgctggcatttacatttacatgcagtcagtgcgtatcagcgatgcactgatcatcgccggaacatacgcatggcttttggcacacggtactcaaatggcagcttttcatttcttaaattaatattcaaaatgaaattaattaaataattttaagttaaaggaaggatacaatttttaaaaagaataatttttcctgaaggaatttctattacttcaaaataatttttttgccactatatttcccggttcgtgccaatagctctcactgagaccgaaaatcaaagaataggattagactagtcaaaattagcatatgagtagtgaaatttttttggtctaatttggactaaataaattctagttaaaatcttcaaaatttgacaatttacttagtataaggaagaagctggctgggcggttaaaacgtttaaagtggggttgataggatccataaaaaatggggatgtgcttggtagctcaatggttgagatgcccacggaaagagtgcacgagcgggttcgattaccacccgaggcttaacatttacctatttcttatgttaggtaacaaattgttatttttcaaattttggacatcagaatgttctattgtaatttgcgtgctgagccgaaccgaaaatggtctcagtagggacgaaccggaaatagtctcagtgtcaataaaatatttaaatttaatatacacttcaattcggtatcgaaaaataataaatttaaaaagatgtatttaaaaaaataaattaaaaaagaatattata

SEQ ID NO: 26676 - DNA, 1221 bp, Heterodera glycines
  unsure (1)..(1221): unsure at all n locations
agatgcgtcacgtcaatcggctgctcggcatntgcagnnaacaaaagaaagtgcgggcggcgcattagtcaaaaatgatcagttgcgctgtgattttaagggaaaatgacaaaatttgagcgcatcgcttaaaaatgcaactcccaaaaaaaagacttttaaaaacccaacccccataagtttaatttttctgaaaaatttttaaatattttttttcgaatacaagccatcataacagatacagaaaaattggttaattttaagtacagtttgctctaaattcaaaaaaaattgcctagttttcgagttgaattggtaatttgaatattttatgcttatttcctgtctattttagggtggttttcttatgtttttttgcctatttcgctatttttgtgcctaaaatcacagcccttatgatcagtcattgttataatttgccatatttggcggttttttttaataaatttatttaataacaaagaaaacaaaaattttcacacgttttgccattctaaaatagcataacttaattaagttaaatgtcacaactttattttattcatgcgttctccccccccggcaattcttttttttgtttactccggccgctcgacttcaattgacaaaaatggaaattgcctctctggcacttcccacgccattcattccatcattctgaatttcggcaaatttgcgcatatgacaattaaatgttttccggcacaaaataacacacaaaaaatgccaaaagtgaaccccccccatcaattagagaagcgaaaaatgctggaaaaggggcagaaaagacgaaggaaacaattaacattagcagggaccaaatttaatgggtttataattgtatggttttcttaatttaataattttttacgtggttccaaattgccaaatagtcttagattatgccatgacatttattcttcgccataatggtaattttgcattaatataaatttaactttaataagttagtctaaaaaatgcccaaattcgtgataatattgcatacaataatcatttatataataaaagtaaattatttaaaaagaatttaactttttttaaattttaaataaattcgctttattttgcattaatataattttttagaccgaactttaataagtttggctaacaaaatgctcaaattgctattaatatttcactgatgaaatcattaggattctaaatatttaattt

SEQ ID NO: 26677 - DNA, 1189 bp, Heterodera glycines
tctcattaagcgatttgtttcttatttaacttcgcactaatttcggagagtaatcattcaacagtttaaaaaaaagatacttagcaaaatgtgtttataaatttgtttgttttttagttggaaaagggaacttgggttctcttcacactgtccactcggacggcctttttgcattctgtcgaccgaaaattggttgaccgcgtgtccatcacagaccaacgtcgtgagacagcagttgacagtatgaacattcaggtttggtttgggggaagcaaatggactagcaattttatcgaatttgggaggggcaacaattcaatagtcgaaaaatttgttacttattacactcaaacagtcctttttcccttctcatccgtccgatgttctctcccttttcatgtgatggcattcgttcgctccttccgacggtacaacgattattatcgcattggcatggaccaactgatcggatgggttttggtgtcggaggattcatttgtccgaagggtcgtcctccaagaaaacctcgctgctcaagtaataagttcttaattagtttactaacttttcacatttctattacctcttgcttcagatgtccatcatcttcaaacatgactgtgtgcgtggcttcaattgggtggccgtctcggtgaacgaacgtcgtcaggaagggacggaatgttacagaaaggcgtgacttttcattgatttttcatagaatttcaaattcgtaaatgttgtaacaattttatttgttagcacagatcgatttcgacaattcttaattacaataatttatcttttcgacaattttatttgtttcagcttgagcttttgccccgttttatggacgacaatgcttcaatgcattacaactcccgcgaaaagcaattcgccacacgttaccaattgcaaaatccgctgccttcaatatttgtcgcggaatacggagattgtccgacaatgaaaaaagtagcaaaattgggcaatgtgcactaaaaagggaaggggtggtaatgtacaaaaattaaaagatgctggccgacgagtacgccttgggattgctctttggatttgagaaagactacgagagggacatcaacggagcagatatggtgatgaacggagggacggatgcaacacctccactgatctttattattaaacacttcgcatttaatttttg

SEQ ID NO: 26678 - DNA, 1271 bp, Heterodera glycines
cgtgccacacagacaaagcgaacgaaactcgattagactttatttttgtgatacaattgaatgatttgccccaatatgcccattctccgtcccatttagtggttatcattccctctagaagcctctgacgttggcacgaccaaaccgaacactgcgcagccgccgaaattgcgcattcaccgcgtgtttcgaagcgtggaaggcgtcgaaatcgtacgttcggcggagaaagaagcaaagaatggcctggccactgatttgatgagattgaccattagtttaagcaagggcatcatgtgcaaagcgaacgaacacaaaaaatgccaaaagattttttttgaaatcggccgtttttcagtcccaaaaagctaaaaattaaatgaaattaataaccgcatcaaacaacattcacttcttttccttgccaatccattcgcacatttccttttgttcagcgccaatgcgaaaccgtcgctgatccgcgccttgtggagcagtacctgaagatgcgcatgttgtgcagcagagaacaactttggcaattggccttcgatgacgtcgactcggagagggtttggcggggaattgcgacgcttttggcaatttgaagaatttttgaggatttccgcgcgatgagacgccggctgcagaagcgcttcaaatattatgagaagaagcaaaagttggaagagacggcggcacggaaaaaagcgacggcagcagagaaaagagcaagggaaacggaagaggagaagccggacgagacgaaaaaggttggaaaagagagaggaaagggagagtgtgggagagaaaaagaggaaatgggagggaaaaaggaagagggaaaggaaaagaaaaagagtaaatgggaaaaagggagaaaaaacggctaggaaaatgtgagggagggaaacgaaaaactagagggaaaacgaaaaagagagaggaaagggagagaaaaagaggaaatgccagggaaaaaggaagagggaaaggaaaagaaaaagagtaaatgggaaaaagggagaaaaaacggctaggaaaatgtgagggagggaaacgaaaaagagagaggaaaacgaaaaagagagaggaaagggagagaaaaagaggaaatgtcagggaaaaaggaagagggaaaggaaaagaaaaggaggtgaagggaggagatggaaagaagagaaagtaatgggaaataatttggactccaaaaaggagaaaaggaaataaatggccaaaaattggtggatttttgtcacaaaaaaaaagaa

SEQ ID NO: 26679 - DNA, 1407 bp, Heterodera glycines
tgtccgttccagcccgctgcccctcttttctttaaattgttaattgtttttgtgttcctttcctccttgccgcgcacaatttaaccgctaattcatcaaatcgcaacttttctctcccaatttcattacgatttttgccccgttcctcccgcccaaccgccgtaaaattgtttgtcactaattgcctcctctgttcatgtgtgcggtaaaaaacccaaaaattggtgtgatcaaagtactccattccctcccctcccaatttgtgatcgaaataccccatttttcaccatttctccaattgttgcccgtctctcatcatcccatttttcgcccaatttctgtccactttttcaatttttttatgtaattttgttaatatttaaatggcccaaacgaacccaaattcgcatttccattttccaattgcattttccccatcagagaattgtcccattgtgcggtgaataaataatttttatttgttctttgatcatccgggagcctccaatcccagcacactcctccccaatcaccgtccgaacaacaaagcacaacattgtgcactttgtctcttcaaagcgggatgggcaaaatgaggagtttgtggatcgcgatgatgcaaaatggaatatgaacaatatctttttgcaaccggccgaagtgaaaatgtgggcggtatgtcagtcataacagcaaattaatttatttttaattggaccatcgccagatttgtctgatttccggcggttcgcgtgacgaaaatacttctcagcaaatgatttggagtgagtgtcttttgttggtgtgaattgtcactgaaaaatgagcggcgcactgattagttggggtttttactgatcgctctctgctgatgatcatttccattccgatcaaccatctccttttttctttcttagtccatcattttaccgtactccccttctacagaaatttcatctgcgtgtatatggaaacatgccgtcgacatggcataaatatacacaatcctgatcaccaaaaaaaaatcggagcaaatgcaaccgatgtaagtgctcaaaaatgggcacgacgctatgattggaaaatttaaatttaaaggtggaaaaatttgtgatcgactgtaaaggggacaattacaaaataattatttttgtcacaagcgacggagtaaaattgcatggtaaaatttaatatatccctttgcaaagaaattccatttttagatataataaaatcttttgaacaaaaatatcaaattatcacacaagacgtaaaaatgtcgactgcttttaacatttcgtgccgaggaaaaaccgaaatagttgaaaatattgtggcaaagtcgaatgaaaaattgggcggcattaattattcagtaggtgtttacgaagggtgctttctatgacg

SEQ ID NO: 26680 - DNA, 1810 bp, Heterodera glycines
  unsure (1)..(1810): unsure at all n locations
acagtggcgcccaaaatgcgcaaaacaaaaatataaaaatgaattaaaaagggggcaccgatcgatgcgtcggccgatcgttctttcgttcgttcgttttgtcctccgtcgccaccgtttggccattcaatcgctccctttttggccttcctttcgtatcatttctccaagggaatgaatgattcgtcgttgtcctccgatttggacgccctcctccgtctccaattccgcgtccgccaactccgtctcgacttggacgccttccgttcgcccattcgcgacaatcaaaatgcctttttcctcactttcatggctttgcttattttccgttcgtcccctccctcaaatttgcccattttgctcccatttccttcagttatgcagtgcggcttcgcctttctcgaggcgggcgcagtgcgtgccaaaaatgtgacgaatattttgacgaaagtgcgcactttgccaaaataaaaattaaaattcggcatttcccacttaatttggcccaaagaatgtgctcgactctctgatcaccatcgtctcctattggtctctcggctgggctttggcctacggtgccaaccccgtgaccattctcagccctttctttggcgcttcgcaattctttggccaacaaatctccgactttggccgtttcttcttccaatacgttttcgctgctcgcgcctccacaattatttctggcgctgttgctgagcgtgccgaattcactacctttttcgtgtattcactgctcgtcccaggtgacactttcttttgctaattaatgactaattntcgttccattttgccccccccccctcccccaggctttgctttccccgtccttgcccattggggttggtcttcggttggatggcttcacaaaggaataaccgttggtgaacacaattcattccatacaacttatctggtgatcccatagtaaaccaaccaaaatggcactttcccttaggacctcgccggtgccggcgttgtgcacctttgcggcggcacaatttcgctgatcgccgcttggatgatgggaccgcgaatcggacgcttttcgagtgagggacaaccatgcaaaatggaaggacattcagtaccggtgagcaaagagtgcaaattgacggaaaatgagtgccatggcattgccaatgccaatccaatggttcagttggcttcactcggcggcttcattctgatgctcggctttttggccttcaacggcggttcggtggcggacatttctctgccgggaaatggcctattggtggccaaggcgatgatcaacacgctgctttgtggtgcatttgccgcaatttgcactttgattatccacaaaattcgcaatgggaaatggacagttttgctgacgatgaacgcgtgtttggcggggatggtgggccgggggggggggaaagcatcgaataaatgccaaagccattggtcgaatgaatggcatccaaatgacccggcacttacggtcagaactgacacgaggaaacattgttcagattgccgcatgtgcaggatgcaatcagatggacgcgtggggcacaattgtgacgggggtcggcgccgggcttatttacatggcactttcaggacttatgctaaggcaagtaaatgcaaaaacatcaaaataatgactttttatatctctttgctccgtctctctctctctctctctctctcttttctccctctctctttccctttctctcattatctctcttttttctcttgcttttctctctctcatttttacactttgtctcttttttcattcattgtccgctcagat

SEQ ID NO: 26681 - DNA, 853 bp, Heterodera glycines
gagctttttgtggaacgcccacactgagctttttgtggaacgcccaactgagctttttttgtggaacgcccacactgagctttttttgtggaacgcccacactgagctttttttgtggaacgcccacactgagctttttttgtggaacgcccacactgagctttttttgtggaacgcccacactgagctttttttgtggaacgcccacactgagctttttttgtggaacgcccacactgagctttttgtggaacgcccacactgagctttttgtggaacgcccacactgagctttttttgtggaacgcccacactgagctttttttgtggaacgcccacactgagctttttttgtggaacgcccacactgagctttttttgtggaacgcccacactgagctttttttgtggaacgcccacactgagctttttttgtggaacgcccacactgagctttttgtggaacgcccacactgagctttttgtggaacgcccacactgagctttttgtggaacgcccacactgagctttttttgtggaacgcccacactgagctttttttgtggaacgcccacactgagctttttttgtggaacgcccacactgagctttttgtggaacgcccacactgagctttttttgtggaacgcccacactgagctttttgtggaacgcccacactgagctttttgtggaacgcccacactgagctttgtttgtggcacacccacactgagctttttttgtgtaacgccgacactgagctttttttggggaacgcccacactgagctttttttgtggaacgcccacactgagctttttttggggaacgcccacactggagtttttt

SEQ ID NO: 26682 - DNA, 1305 bp, Heterodera glycines
ttttccaaaattttttttggaaaaatgcgaggcaaaaaaattgtcaaaaacctgatttttcaattgcgattacattgaaatataggatttactacccaaaattgttaaaatcaacattggagatgaaaaatataaaatttgatcttattgattgataaaattgttacacaagcgatttaaagcaacttttgcaaaatgttctgattttcgacactaaaaactgattttttggcccggtgttctgatattctttgcatttttatgttttaaaaaatgaggatttcttgcggtattttagtggcaaatgataatattttatggctgaatttcaattataattttatatgctaatcacgaagataaagagtcaaatttctcaatttgcttctaatatttgcattattgaccaatttgacaaaaagtccaaaatagtgattgttttgtgacgaatagttacgttaaaaagaaaattctcaggcattgactatgcattccatttaaggattccaatccagataaattttaaattaacccactccctatcgtagcttttgtgctgattatggtcgtgtcgaaaatgcttatgaatcgcatcgtggacgccaatttgtgggagaattaataccaaaaaatggcaaattaaatcaaatgccatcatcatttaatccgccgtttttatctttcaattagtgagtagcaaattaggttttcattatttattgatttaaaaaagattcaatgaggtgctttcgaatgtccaaaatttgtgaatccgggttacgacaacaaaaaagctccaccacattccggaatttcaaatttattttttagttaagtctgagttttacggagttcgccaaaaaattgcacctcctacaattcacagccaaaaaaagtttctttgctgctcactaattttaattttaatatgcttaaattttaaatacgaattttctttgcgcaatatatttatatctttttcattttttcaataattttaccaattttttgaattttcaatgttattctaatgccttaattattaacttgataatctaaactataatatccattatttgcttgtattctatttttcaacttttttcaattaatatttggcatcattattatttccaaaatattataattgtaattttctcgtttttcatataaaagaagcattatttatgttaaaaagagcatttgaattattatttaaattttgctgtgataccaaatactgccaaaaacaaaaacaaaaaactaaaattttcctattccatcggttatacggcccgcctccct

SEQ ID NO: 26683 - DNA, 1919 bp, Heterodera glycines
  unsure (1)..(1919): unsure at all n locations
ttctcacaataaaatgctcaaattatgtttctattgntatataatagtaaaaataaagcaaaaatttagcctcaaaaattgaaagaaattttagtccaacttttaaacattccaatcatcatcatcatcatatgcacagcacacttttctttctttccgtcattcattcattcattcgagtatttcaaagttttcatcgctgtcacaattgaagtcatagtctgaaaaagttaaaatctaaacagaattttatttgtttgtttaaatgtagcgaaaaaacaaatgagtaaaaccaagggtgtagccagacttgaaaaaactttctagtttttttttgaaaattagaaaatttcaaaaataaaaaaaaacgaaggggcatttttggatttctggctgatttttcacgaaaaaaggcgatttctggtgtcaaattttgaaaattttgggaattttattaaaatttcataggaaaacccggtataaaaatatttatatttttcactaaaaatttcatttttggaggctatagccccctcattggcagcccttcccttggctatgctcttgagcaaaaactaccttttatgtcgagtgaattgtcgagaaaaaatgcgctctcaaacggtgtgaatttaggccaacccttaggacgggagtcgagaatctcgaacagtggcggggatgagcttggcagaacgaccgtcttaaaaggaaaggatgatgtaaatttgcaaatcgcattttttgagaaatggcaccacaaattgatccctcaaagaaatttaaattacctaattaattgaaaaaaaaatttttttttttcaatttttggtttgaattcgggccaaggttgggaatcggtcggtgtcagattcgtgatcaaggcgaccccgaaaatgcccattccatttctttaaatgggggctacagaatttccgacaaagcacggtaccagcacaaagaattagtcatattcgcatattcgaaaccatnacatgtgcaaggggtgtctcgacaccccccccccccctcttcgttcgtcgtaagggggcggctgtaaaagagggagggggccgtcgtgggaacggggaagtcgtcgacgacgggggaaaaatttaaaatttgatcaattttcataaaaaaaattcaaaaaatttcccggcggcgcctatcggcaccgccggccccacccccctttcaaagttttttggaaaaaacgcgccgcaaaaaaaaagtagttaagcaacgaaaaaaggtaatcgccggagaaaaaatggaccaccttcgtatgaaaaatcggtcccgagacacccccccccagtcccaatcgtccgtcgtatggcccttgggctgagacaccccttgcacatgtatgttcgaaaccaattccctctttcttaacaattgggacggcggcggcattaccttaagccgatgcactaggtcctcgtactccgccaagtcgcgtgtcaaaaacccaagtgccaacgacggatctaaataattgtaagaaaaaagggtacacataacaaatttgaaaaaaaaaaattgtgtggcattcttctgaaacgaaccgagcgatttgaaatccatcgtcaaaatgtacgggcagtgaaatgagctgtcgtcaaatgcatcgctgctgctgttgttattatttttacattttgttgttgttgcttctttttcttctccttcttctgtctttgtttttgttggtgcatttgcaaaggttgaggctgaaaatgggacaaataaaattaaaaaaaattttttttttccttttgaccgatttttttgttttgttttttgcatagtcaccgctcccacccagaagagcccctcctccatactcgaaatttttaaggaaaaatagtgtttgtgatgaaaatttatttagttttacaaaaaaaaaaaaa

SEQ ID NO: 26684 - DNA, 1243 bp, Heterodera glycines
aatttaattgctttttaaattattttttattgatttcatttttgaattcgatttcaagcattattttggaagagaagactaacaataagcaaaacaaaaagaaaatcccaaaaagcaaagagtctaactcactaattcctcaagtaatgttaaattcactttaatggtttgtttttttaaatacattaaaatgtgatttcggtaaaatgttgggccctaatttcctcgtccactaatgtaatatacgcatggaataatgtcttttattccgaaggcggatatccataaggtataatatgctaacgtaatgaggtaaaggggaaagagagcccgatccgtacaggacagaaggggaggggatctgctggggtatctgtgatcagggttaaaagaatgaaaagaggtgatcgctaggggatgggccacattacgaaaaggggcggagctaaagttgatcagagtgatcagaggcactaacataaacagacagtcagaaaataagaaatgaaataattcagtcttttttgcaaacgaagagggtccaaggaaacagatttcgcagacaaagaattgtagaagaaacttaattttcaaaaatccagtcaggtcctctgaaaaagaacgaatttgacaaaatgctccaaaaagagctcacattaaaagtaaggaattttataaactagcggggtcagcgccttcggcgcatcccccgctaggtagtacgattgtattataggattatgaatgataaaatcgactggctcggccgcttcgcggcctcgcatccttttcttggctttttcttcaatcgccgggactcaacccaccagtatttcaatcactgggactcaacccaacagcatttcaatcgctgggactcaacccaacagcattctaatcactgggactcaacccaccagcattccaatcactggcactcaacccaccagcatttcaatcactgggactcaacccaccagcatttcaatcactgggactcaacccactagcatttcaatcactgggactcaacccaccaacatttcaatcaatgggactcaacccaacagcattctaatcactgggactcaacccaccacatttcaatcactgggactcaacccaccaacatttcaatcactgggactcaacccaacagcattcaaatcactgggactcaacccaccacatttcaatcactgggaatcaattctccagcatttcaatcaccgggactcaactc

SEQ ID NO: 26685 - DNA, 1753 bp, Heterodera glycines
tttttttttgtaaagtgtcagaaccagagaaaaagagatcaaactattcccggagtaggacaaaacgtcgtcgaacgaatttttcgaccataacttttttctttctcaaccaaattaaacattcttggtattattcgaaagcattcgaaaaatgctattatcctgcaaattttcaaaaatttttatttatgcacaaaaaaatcagagcaaaaaaagttcgaattactgggtttttgagttccttctggccataacttttttgaaacttaacgaaaatttttgagattttgcaaattaataataaacacatagagctatcgaacaacaccaacaattcttaatttgattgacagtgaacaaagttatggttcaaaaagtcttccgacgacgtttcggccgacgacgttttggggtgcactgaactattcccccccccttttctctttttccatttgctcatccgaaaatttgggatttttttttgctgaaaatttacggatttttttgctttcttttcgcataccgttgatgggaagattgtatgtttgggttcgttgagaaaggggcgggggaggtgggcaagggattgaatcgcttcaatttatttgctcacccgcggaagtgccaattttcgcttttcctggatggattcaaatttaatgggttcggctgtttttttcctttctctcactcggtccctctctatatcactctctcaccctctcactctctatctgactctcttatgtctgtgccctctctctatttccccttttcttttcctcctcttcaaaactaacacactctctctctcccttttccgtcctaaagtctgaacaaatgctgaaaatggcttcaaatttgacaaatcagcagacgagcagcaagttcaccactttggccagcaccaacacgcgatgagaaaccttttgttcgagtcggaccaacttacggtattccgccgacttggcccccttaaagcggaaattcatttttgaaggcacaatgctacgcgaggagcaatgacccgtcgcccattgtttccgccgttcattcggtctgtccgagtccgttggatcagctgatcaaagtgagaagggacccaaaggggcgactgaatggccattttgttgatcgttcattggctcggatcgtctccattatttcaagtgtttgctttcacccattgaatctctttagctccaagaacgcctccaacaagccgacttctcatctcccgcttcgtcctcccccaaaatgccattgtccattgctccgttggccaaaactcctccagcgatttcttctctttgtcccacctcatttacagacactaaggttgttctgatgctaacaatcccattttttggcttcattcgcttttccaattccaattcagcggagtgtttcttctgccattggttcccaatcgtggctcgactcttcgtctctcgtcatttcaacgtacgcaaattccactcaattggcggcaccgatagccgctgccgcggtaacgccgtgggcaccgtccgcttggcaatggagcgcagccgccactgagacggccgcgctgcttaacggaacatatggaggaggaggaggagcagcagcagggacgacgacggcgacaagtttgacacagtcaaacggaggatggaatggtgcgtcgtattttggcaacacttttggaggtgggacaattcggaggagggaaaggcaaattaatgaataattgaaagaagtcgcttcatgg

SEQ ID NO: 26686 - DNA, 1384 bp, Heterodera glycines
aacctcaagaaaagggggggggggacagtaaaacaaaagtcattacagtggtcaatcactgacaaaaggcctcttctgacgtcattcgctcaacttcaatttgtccatcggaaatctgctgaagttcgttttcaattgcgcgctcatcgaatcggaatttgtcctcgggggaaacgatgaaaacgaccaaagcatccgcgtcaccaaatctgagcctgtaattaattatcttttatttttccattgaattttctttatttattcccttaccatccattgaaaagtccccgtgccattgtatttactgcccgattcggcggcacattcgacgcgtccatccccaacttttgcagcatttgccggtgcacttcggctgcccgtgggctcattgccacgcttcccaccatgccaatcgtcattccagtctgatgagcgacggattcacgaattgtttaattaattaacatattatttttattccaatattattgtccaagttggcatagttttgttaattcaataattgaattaattttctcaaataattttatttaataaataacagacatttgataggactcattaagacactgttgtcaattcgttaattaactaacattaatcacctgcttcagaccaaactgtcgctgctgtccattgggttgttccgttatgctattattatccatcacataatccttttgtggaaattgccggtccattttaaacattccgccaaattttaaaaacaactgaccgctcgtgtcaacagcagcgtgtacggctgctgatggccttctcgccggacttggtccataagtcccaccatccgttcgtacgttttattcgttttggccaattgttctgtcgcttttgccagaaattcatagtcacaagaaacgcgaaagaacagcttttgcattccctaaaacacaaataataattattattttatgtttaatttgaattttgaagtcgcactttgtgcacggcgatcgcccggtggaaaagcgaacgagggaatggggacgggaacagactgaacggctgaatggatgccaaatcggtggtccttctgaagtaaatcgggcatttgtttggacaaccaaataccccgtgtttgtgccgcttacctttggcgcgactcgtcgtccgacaatcgtttgatcagtccgaactcgtgggccaagtcgaccgccgcctccaccaactcggccaattcctcttcgcttttcaccgcttcggccgcgtaatttctgatgagttctgcaaaattgtaagagcaattcaattcaaatgctgttgttgttcatttcattttcatgtgcaatcatctaatattaattatggtgccttattagatttggtgctttcgtgctttgct

SEQ ID NO: 26687 - DNA, 1524 bp, Heterodera glycines
aatttcgaatcaatttgttgagttatcccacaaattgctttctatattagtcactctgatccatcggaaagacaaacgcaatttggggcggttcttaaaaataaaagattgaaaaatcactcaagaattatagtaaatttttaaatggtttcaaatatttttttacttaacgcattgtttttattttttatttaattaatcgtacttctctgagaacaaataggaaaatgtcctaaaattctgataaacatttagattattatttttgataattttagcacgtgtttttaaattgtatgtttattttatccttcaaattgttatatatattatgcttctagtgactcggaatcagactgaaaaattctggaattattctcaagatattagattgtttgattaaaattttcgattttagtttgagaataactccatagtttagctatctgatcacgattcactagacggaaaatgtataaatttattgcaaggataatataaaagctataatttaaaattatctataccttctttatgaaataaattttataatcttgaactatatttttgtgcaaatttacaatattccccgtgtattacgtcttaatcaccaaaaaacataagtcatgccctgaagaaaattatattaaaccagataaaattttgagattaattccttaaagcttttctatttttttacttttaaaaatcactccaattgccttgagtattcccgatggataaatgtgattaattttgagactaaatcccagattatttttgaacaaacatttctcaacaattatctgaaattgttaagaaaatcgtttaatttatttggaaagcgttttgaaattcgtcttgttttttattcagctatcccgatatattcattttaagaaataaaataaggcctaataaacggcctaacaatggagcactctgtgaaaaatgtgagaaattactaaaacataggcaaaaaaatatctatattatttcaacaaagtttagacaatttcgaatcaatttgttgagttatcccacaaattgctttctatattagtcactctgatccatcggaaagacaaacgcaatttggggcggttcttaaaaataaaagattgaaaaatcactcaagaattatagtaaatttttaaatggtttcaaatatttttttacttaacgcattgtttttattttttgtttaattaatcgtacttctctgagaacaaatagggaaatgtcctaaaattctgataaatatttagatttttatttttgaaaattttacctcgtgtttttaaattgtatgtttattttatccttcaaattgttaaatatattatgcttctagtgactcggaatcagaaataaaaattctggaattattctaaagatattagattgtttgattaaaattatccgattttagtttcagaataactccataatttggctatctgatcacgattcactagacgaaaagtgtataaatttattgcaaggataatataaaagctataa

SEQ ID NO: 26688 - DNA, 1855 bp, Heterodera glycines
  unsure (1)..(1855): unsure at all n locations
gtgactaaattgggagcagtccccccccccgtttcattgtttcgccgcaaaaaaataaaataaaaaggaaatttttcaaggaaaaaaattatgcttgaaatttgttttaatttcaggcgggggaggggggaattgtagtgcacccgagtaaactatatattctaaaccaaaattaagtagggtgagggggctttcgccattcacttacagtagacttgatggaaatggtcctcacttagggacggttggtccaaggcattgtaaaaatggtttttgagcaaatcgtcgaaaagtaattcctaagtaaaagcttatttatcacatatgttttaactcataatatttgctttttcttcttctttcaccttgcacaacgctgtgatggtaatgccacaaattgcaaatggaaatctattaattaaaatttgaatttattttcattacttgagtaacagccgaacaaccaacccaatgatcgggtggttggacaacgaaaggacgcgctgacaattgtccaaatcgaactgggcgaagaataccaattggtcaaggccgagcatacccatgccacggaagtccgtctttctcaacaacacaaataaataaagcatttcggaattatatgtataaatcgtcctcaaaaaggaattttatggattaaaattttcaaattttgaaggcaatgtcccaaaattgaaccaaaaacgagggttttcataaataatggattttgaagaccatttaaagtgagggaattgcgcttttaccgccgggtcgtccccctggaagccgatctgttgccattggtccgttattcggccctccagcgcctcttccggcttcagcaacttccacagtctcagcagctcccactcgtgttccgaacagttggcgcagtaactctccagccgtcgctcctccaccttcacacaaagcttttgatagcctttgatctgcggcaaggaatgggccaatgtcttcgatagtcccaacgtttgtcgtcctcggcgaccgattcctccaaaatggcctccgccgcctcagtttcatcccctgaacaaatgaacacgttcaatagacactaaaaagggagtgcctttgtctgttgtaatattatttgcctttcattccattgctgcnnttaagatttgtggttgcggggcacccgctgtgaaagtcttcnatccaatttttcttggtttgtctcatttggaggatgggatacaactcctcgtacacttgcctgagcaaacccctgtccctttgctaatgcacccaccggtgtcccaactaaacgattggacgagttcgttcggataagtgcgcagaatttgttcaattttctgattgcgagatgccttggaaggcttcttttcagtcaacttaaaattagtatggtcaaaaaatgaaagtttgtccaactcacaatgtcttccaatttttggttggcgaaaattcggttgattaaagtgcagaaaaagcgccaaactgagcgaaaaaatgaataaataagtgacaaacacatggcaaaaaaataaaataaaaatagaattatgcagagaaatgggtaaaaaataaactgaaagaaaacagaaaaacagagaagaaaagagccaacgaaacccatttatgcaaaacattattaaacgaaaataaattaacagaaaaacgaataaacggtcagttaaatttagaatgacttttatattcccatcctttcacattggtttatccgataaagttgacgaccaccaaatggagaattacatgggcgaagatgaaatcggcaaaggccctctcgggagaaatgttggggaattcgaccttgttttccgggttcacttggatgcgcaaa

SEQ ID NO: 26689 - DNA, 1457 bp, Heterodera glycines
ttttagttatttgtgactttgagaaagccgaaatgaacgccctgtccgcagttttcccagccacaaacatcctttgctgcatgttccactacggacaaaacctctaccgcaaaatgaaggggctcaaactggtgcaaatgtatggggaacagtctgtgcgtggtgaagcggtccgacactcattcaggtaacaattctaaaaattgacccaacatcccaaatttttcagaaatgtcctatctttgccattgttgccaccaacttacgtcagacgagcattcagcgtcattgccggcacagcccctatggagatggcgcagtttcttctttactttgcgaggaactacatcggaatgacgcagcgccagctgcttgacggcgccaacgcgttcggagttcgtcctggtggcatttctccacgtttttcgtgttttttttacatttactctttttattttcttttatttgcatttaagcattcgcggggacatcattttcttctgttgaatccgaccacacatactcacggcagcccttgaaatttggctttgactcgcccgccccctcaacactatcatgccttcaacagtggagcaaaactcgccgttggtgcagtactcattgagtccatcgtcaacgactacatttcagccaggcacaccaaaacacaaaattattcatgtcaaaacattttaagcccgtccttgggaagaacccgtagtccgtcgcgcactatttccaattccattttggaacgtgcactctcatgcggcttccgccctcgcaaggaccaacaacggactcgaagcaacacaccttcatttctctgtatttattacttataaaacccccaatttaaataattttagaagggtctttgtcatcacccagccctttccgatttcatttctgaagtcagcggaagcatcgacagacaagttgacgcagcgaggtcagctcggaacttcatacacaaacgctacgtgctgcaggacgcagtcatcatgagaattttggcggatgcaacatacaacgacgatgccgaaattcacgatgttatgacggctcttggtctgcaggtcgaaggatatgcaggaaaattgaaggactacgaaaacacggaagattcaatcatgaatttcgcttagatttgttcgatcccaatttttacccttttttatttattcattttttgaaatattcctttttcctgcaaaatttattatttttgttatttgtttatgctattctgataaatcgttaatgaattatgtgttctgaagccttaaaaatgtaattttccgactttttcactaattttttagcttggcgacattttgactcattttagcttgggcgacatttcgacgcggcgacatttcgacgcggcgacaattcgacgcggcgacattttacgcagcgacattatgacgcggcgacattttgacagcgcgccc

SEQ ID NO: 26690 - DNA, 1694 bp, Heterodera glycines
taactattttggcagtttttagcagtaaagtgattaaaatttaataattttaattctgctaatagaataaatttgaaattattatcttttaaattatcaaattaattataattaattgattttattccttcgaattttataatttttatttttcgttattatttattttttgcttaatttacttcaaattagcataaataataaatatctgcggatttatttcgttttcaccaaagagttccatcaatagcagatcaataagcaagcattctttcgcccattatacaacaaaatgtgattggatttgatgtataaattattggttagccgacttttgcgtaccattattatttttggattaaactgccaaaagaaaataagctaaaatttttcaaatattatgtaaaccaaatatattttttctatgtgttttttctgagttaagcattcgtctgaccataacttttttgaaattttacgaaatttttcgaaattatgcaggttaatagaggacacttaaggctatcgaatgaactcaataatcagatgaataagcaagcattcatactttcgcccattatacagtcatggtcataagtgttgtcccatcatgctttgaaaaaaataattgcgtataaaattgtcattttccaatttcaacagataagtagcataccattggatagcattttttatgggctttccaatgataccatatttgcatttgtgacataaacatttatttgatttattttaccatattcacaatttgatcaaaatataggtggtcaaaagtgttgtcccattttattttttggcacaaataaataattaaatattggtaagcaattgatttcatcaaaatttcacagaatttaatttttgcgcctcggaataaatttttaattttttttttgttcgcttcattatttttggttttttaataaaaaaaaattttatgctggtaaaattcgaaaaataaaatatggttgcctttcttttttaaatttaccaaataattgtttatttatttttaatcctactgaagatcaatttcattattggtcgcattttttgacaacgatttcacattttcataagaattcaaataaaattattttctaattaatatattaatttagcttaattttgttactttttggataaaattttacgatttacatccctctaaatttgaaactatttggcacctcttttcccatttttagcacctattttggagttttttagaacctaaaaactaactattttggcagtttttagcagtaaagtgattaaaagggaaggggatttatccctttcaagagatatccatgaaacggataaaggcgggtattgcaaaaaagtgcaaaaattcccttgggagggggggttgctgtaaccccccgaaaactcccggagagccgagattgaggctgttcagctgacctgcgagagaaccatgctcctccctcgcacccccagagtcagttattaggccgatcactggtaactgtttgctacttgcccatcgggctttcgacaggaggctactccgcctagggggctcgaacttaccctcgggccatgccaccgaggagggttcaccacttcgccaccaaccaagtgaaatgactatcacatttctgaccctagtgagatcactttactcttctctcaatttcacttgatat

SEQ ID NO: 26691 - DNA, 1813 bp, Heterodera glycines
  unsure (1)..(1813): unsure at all n locations
agtgtgtaacaactcacctgccgaatcaactagccctgaaaatggatggcgctggagcgggccacctatactccacgtccattggcttgtacacgtgcttgtcgcgtagtctgcccatgacgtgtaggagggtcgtggtggttgcgttgaaggctttgggcgtgggcncggccggagcttccaccagtgcagatcttggtggtagtagcaaatattcaagtgagatccttgaagactgaagtggagaagggttccacgtgaacagcagttgaatgtgggtcagccgatcctaaggcaccggctaacgccgtaacacactacggatgacgacttttctgtgcttgcgcagttggtccatccggttgccgaaagggaagtgggttaacattcccacgccaggctagggaaatgacggttcgcaagagctgttttgcgcggtaacgcaaatgaactcgcagacgtcgtgtggagtccgagccagagttctcttttctggtttagggtgtgcgtgcctggaagtggctcagcctgagatagggatgttgcgcccgtaaagcaccgcggttcctgtggtgtctcgtgcgctccacacggcccttgaaaatgcgagggaagctatttgaatctcctgcctgatcgtaccgatatccgcagcaggtctccaaggtgaacagcctctagtcgatagaataatgtaggtaagggaagtcggcaaaccccccccccccccccccgcccttcagagcacgacaaatatttcaacaaaaatttttaaaaattgactagagcaattgaacgctaacggacgacctaatggaaaaaaatccccgaaggagagaatttaattaaatccattccttcgggggaccgtgccgggtgccgcggggtaagcagtgctggttcgtttcatcacggcaccgaaccttttggctagtcagcaatcgttgcttaacttgccagatcggacgggtgcgcatgattccactgttccaagcaccccaccaaaagcaaaacgatataaccaaaatataaggaaaaattttttaaaacattttttctccatcttcctttttgatactaaagcatcagagtgctaaaattaagttgtaaataaaatttggtgcgctttagagcactttctgaaaaaaatatttatgaaacaaaaaaatcgattttttcaagtgtccgtttggggtactcaaacaattatggggagcaaaaatccaacgcagaattaaagtacaggctatagggaagctattcccgaaggattcggtctccccataaatctgggcgcatcggttcggggggactgccccgaaaacaaaaaaatcgattttttcaagtgtccgtttggggtactcaaacaattatggggagcaaaaatccaacgcagaattaaagtacaggctatagggaagctattccggaaggattcggtctccccataaatctgggcgcatcggttcggggggactgccccgaaaacaaaaaaatcgattttttcaagtgtccgtttggggtactcaaacaattatggggagcaaaaatccaacgcagaattaaagtacaggctatagggaagctattcccgaaggattcggtctccccataaatctgggcgcatcggttcggggggactgccccgaaaacaaaaaaatcgattttttcaagtgtccgtttggggtnctcnnccatttatggggagcntnnntccnncgcngccttaaaagaggnnctnttgnnnnnctnttcccgnnggnttcgcctatgaacgtaaatctgggcgcatcggttcggggggactgccccg

SEQ ID NO: 26692 - DNA, 1060 bp, Heterodera glycines
tttttttgttttcggggcattccccccgaccgaatgcgcccagatttatggggaggccgaatctttcggggaatagtttccctatagacttgtactttaatttttgcgttggattttttgctccccattaattgtttgagtaccccaaaacggacacttgaaaaaatcgatttttttgttttcggggcagtccccccgagccgatgcgcccagatttatggggagaccgaatccttccggaatagcttccctatagcctgtactttaattctgcgttggatttttgctccccataattgtttgagtaccccaaacggacacttgaaaaaatcgatttttttgttttcggggcagtccccccgagccgatgcgcccagatttatggggagaccgaatccttccggaatagcttccctatagcctgtactttaattctgcgttggatttttgctccccataattgtttgagtaccccaaacggacacttgaaaaaatcgatttttttgttttcggggcagtccccccgaaccgatgcgcccagatttatggggagaccgaatccttccggaatagcttccctatagcctgtactttaattctgcgttggatttttgctccccataattgtttgagtaccccaaacggacacttgaaaaaatcgatttttttgttttcggggcagtccccccgaaccgatgcgcccagatttatggggagaccgaatccttcgggaatagcttccctatagcctgtactttaattctgcgttggatttttgctccccataaatgtttgagtaccccaaacggacacttgaaaaaatcgatttttttgtttcataaatatttttttcagaaagtgctctaaagcgcaccaaattttatttacaacttaattttagcactctgatgctttagtatcaaaaaggaagatggagaaaaaaatttttaaaaaatttttccttatattttggttatatcatgttgcttttggtggggtgcttggaacagtggaatcattagaagccgtccgatctggcaagttaagcaacgattgctga

SEQ ID NO: 26693 - DNA, 1549 bp, Heterodera glycines
  unsure (1)..(1549): unsure at all n locations
agtccagtacattcgaaagcattcgaaacctgaccccattgcatgcttgagtatatggcaagagctatgtgttttgagggaccgtgaggcggacgaaatgcacctttatcgtgggcatgagcaaaaaattgttaagaaatttttggccaacgcaaacagaccaatgtttgactatatgaccgagcgtttatacatatctgataagtacgaacgtcagatcagtgaaattgaactaagctatctcgagcggttgtggacaaataagaatccgacaaattttacgttgctaaagctgaattttgtatgcatgttaccacaggataaaactgatttcataataatagataacaaggtgtatctgattcgatcggaccgtcgtatttacaaatatggaattaatgacggtcaaatcaacccaaaatttgtgtccaacatcagtgacactaaatttaactttttattatttaaagaatatcgcgacgatgtaattaatatacttcaagccagctcgccaacgcctcaaatcaaattattgttatggtctgcttatacatttgacgtactgctggtcgtcatttgcgcatatgtaataagacaaattcgtcgtaccagcagaagcagtaaaacttcatccgaagatgttggcatgtttgaccaaatggaactggaaatgttttcggataatccgaaagatttagtgtacaggccaacaacggtcagagagaggagtatttaaggcgactattctatccatttgacttcattcttacacaaaccgtatatgcagcgagcaataaaatattttattgactattatgcgctaaatgatataactcagctgtacgctctcctaaaatccgaaatagactctgaaccgtccaactattatccaaatcctttgcaatcagttccttgtgtacaccttgtgaacgaagagtacgaaaatcagcctgttgttgtagaaggaacacttgatctgataggcgatctgttcttttcaacatgttatcccaagaagagacaggggatcgattggtaaaaattttaattattatttaaatgttgatttaattctttttatttattcaggagcgaacctctgtatgcggaattgaaggatctgatggtttgtccgggcgatttgcggaaatgtctgtcacacttcggacatcggaaggatcagcgcaacttggtcgtcgacgagctggattggcacgacgacgacgacgacgacataacagaaggagcttggtgaaagagctatgcttgtttaataaatgtagaccggaatatctcgcgatgatgcttcgaagaaggaagaaggaaaatatcaaatttataggcgatcggaaaatcgaaactgtacatcttcgacagaatttacaaatttatccggaatcatttactctttttggtgctaatcgtatgtacgcctatcgtggtatgcttggtgtcacggtagagcaacatttatacgctaaccatcgtgtccgtctaaaatttcccacctcncatgtgtntgtacagatggcggcacggccatcaaagt

SEQ ID NO: 26694 - DNA, 928 bp, Heterodera glycines
  unsure (1)..(928): unsure at all n locations
aagtcgaaattttgaaattttttctcaataactttnttccaattccaaaaacattttttttttgctttttgtaaggctaatgaagcatgtgaagagatttcaaatgataccaactatgttagatttggatatagtccaaaaacctgctggggcccaaacgtgccggcccaactgctgagcgagtccgttggggtgggagcgttaaataataagggacgccaaaacaaattactttgaaaattttacgagaaatccattgtttgaatttcttttcgcgtttttctgcttgagaagaaataaatttcatggaaaggactcgaactttcacacatttgcataaaaacactgagccattaatataattaaaccgatatttaagcaaaaaagttttttaaacttttttttattaaaaaatgacataaactggtggaaaaaagtctttactcaagccgatcaaagttgaaaaaattaaaatttcgactagaaaatttaattgattatttttttgtttatgtgtttttatttactcctatttatgtgctttttatgcaccacataattattttgatccactcattcattctgagcatgagtcgtttgatcactctttactcaaaaaaatggcggaaaaaagtctttactccgaacatgaaaaaccaccttaaaattcatttaaaaacctgaaataattcatgctagctgacttttaatatacaaaatcccatcctgcgcgaggtgcagccattagtgtaaagaaaatgtggggagagatggcaaaccgaacgcaaatacaataaatggcatggctttggttcaataattgtgaagttggcagagacgcagagggtcagttcgacagagacgcagagaatttgagctccgcggggcgcataaaaattggcaaaattaacaatctcggcgggtggga

SEQ ID NO: 26695 - DNA, 827 bp, Heterodera glycines
taggcgagatgtccagtaggcaaaatgtcagtaggcgaaatgtccgattttggcttagtaggcgaaacgtccgattttggcttagtaggcaaaatgtccagtaggcgaaatgtcatacagccgatgcaattatttaaagtaatcattttagcaaagcaaaaattcgcctatttgcttttgatttgtgatcaaactcatagcttttcattcggttggactgcattttgcataaaattgcttattgttttgtttttcatttttattttatcttttattttattcgaatttatttgggcattttttaattgtgagttgtaaaatcacaggagtcgggatccagacaaggcccgaaaaaaattcgggaaagggaaatgatctgatgacagttcaagaaccgctttgcttttttacatacagaaagtttttaaatctcttatttttccaaacttatgcctatccaatgaaaaaaaacccattaaaattttaatttttgttgaaaatgagaatttcgaaactgacatttaggtgctgggtattttcttatatcggccaagggcttctctttggattttccttttttattttatgtttttaacttttttattaagcatgtgtctgaaaaaaaatccaactaaatttaagacgagttaaaattaagtgattttttctctttcaatcactttttcaacagtttacgaaaattgtgacaatttgttaatgaaataatataacaaagaagcataaaaaatctattctttttgtataaatgaattttatataataatattttgtattctacataataaattcaactgacaaagctttgt

SEQ ID NO: 26696 - DNA, 1200 bp, Heterodera glycines
  unsure (1)..(1200): unsure at all n locations
tttgaagaagtgtcaaagaacatgcagcaataagcctgcaaaatctataagtggaaatacatgagtatagaatttatttcagaaagtgtcacagacttttggaaaaatatattgcaattatcaacaatttgagaagtgagttagaaatgataaacttcacgattcaaaccagttttcggtgctctaattaaccgcgataaaaacatccgaatcaattaaatagcttctgagataataaggtttatcataaaatttcatttaaaaataaaccctcaattattggtatgaacgatactttccaaacatgcacgcgttttgcgctcgagctatttatcatcgggcttgtcaatccaaagcgaaacaacaaagatgctgttttgaacgaataaagggcataggttattttgaagaagtgtcaaagaacatgcagcaataagcctgcaaaatctaataagtggaaaatacatgagtatagaatttattttcagaaagtgtcaacagacttttggaaaaatatatttgcaatttatcaacaattttgagaagtgagttagaaatgataaacttcacgattcaaaccagttttcggtgctctaattaaccgcgataaaaacatccgaatcaattaaatagcttctgagataataaggtttatcataaaatttcatttaaaaataaaccctcaattattggtatgaacgatactttccaaacatgcacgcgttttgctttagctatttatcatcgggcttgtcaatccaaagcgaaacaacaaagatgctgttttgaacgaataaagggcataggttattttgaagaagtgtcaaagaacatgcagcaataagcctgcaaaatctaataagtggaaaatacatgagtatagaatttattttcagaaagtgtcaacagacttttggaaaaatatatttgcaatttatcaacaattttgagaagtgagttagaaatgataaacttcacgattcaaaccagttttcggtgctctaattaaccgcgataaaaacatccgaatcaattaaatagcttctgagataataaggtttatcataaaatttcatttaaaaataaaccctcaattattggtatgaacgatactttccaaacatgcacgcgttttgctttagctatntatcatcgggcttgtcaatccaaagcgaacaacaaagatgctgttttgaacga

SEQ ID NO: 26697 - DNA, 1233 bp, Heterodera glycines
  unsure (1)..(1233): unsure at all n locations
ctttcacaagttttgccttaaaaagtgaaaatttgccacgaaaatagtcataaagggcaaaaaaagttaaaaaattccaaaaagtcaaattagagtcgagatctccagactgacattctcgaacagcacacccgtcctcctttccccccccccccagctttttcaacatacgtcacgtcaattccgtcgactccattaatgccacattcgtccaatgtttcattgtcccgaagttcaaccgctgtgccatccgttgtctgtctgcgcagttttatttcgccgataaaatggtccaaatgtttagcaatcctcggcttaatctttcccttcaaattttgcacagtatctgtgcctttcattgaaatcttgtatgaattgccattacatttgacgaaaatttcaaattccctccacaaataaacgtgcgaattttcaaaaattttgtaatcttttaattccttttcgtccatcagcagccagtggccatttggattgtcctcgccatggattgtttgttgttcgggcgggattttagtgatttctgagattttctgcttcaatgtggccacagtgtcggtgtcctccacttccacgggcaaagacacataaattttaaagccatccgtagatgatggcatcagcattagcataataagcattgccatgagaatcccagcagaaatgccaaaatgattaattatgcgggaaatctgttggcaatttgatgggatgggagggggtgaggaatttgtatggaaattgtaggatttggaggggtaattaggaatgaatgaatgtgaaaactgttcgatgacctattttatgggcagaattcaactcaaaaattaattatattaataattaagtgatcacttttattcaccatttttctagtcataaaatgtaatgtgtagtggatgtaaaattctttctctgcaatatatgaaaatgctttttttaaatcaattgacacaaaagaaaaagatgttgagcggggaccgggccgggaattcccggtcatccgaggtcccggttcccggtcccggattttgaaaagctcaggtccaggtcccggtagggcgaccgggaaccgggaattcacttgaaataaattaaaatttgaattttttaaaatttttttgaatttttaaaaatccccggttggtcccggttcccggtcccgnaanaaatcgaggtcccggtcccggcttctcaggtcccggcaagtcccgg

SEQ ID NO: 26698 - DNA, 2039 bp, Heterodera glycines
aaagtagcatttcttatggatagccatttatttgaaagtcaaaagtaataggcggcagtgaagcaagagcatcacatcccaaaataaaaattataatctttcattgtccatgaaagttcatcatcgaaaagacgacaattatgtccacatattcatttcctatttttaaagtcacacgagcagcttctttgacatgcactggatgaccggaagcactcattaaatgtgcctctgatttaaatgttttaatacctaagtaatcggctaacgcttttggtgcaactgaggtgcttgagccagtttccactaaacatttcatttggaaattattaagagagacaaaagtggtccctgtcattgtattattatttaacgacccaagctgtcccatcaaagaatttaattcaaaatgagtgctcatttgtgttggatttggtccatgcctatttcttttgaaaggtctggtgaaagattttttaaatgaatttcctgcccttctaattcttggtggccaattaatctgattaattggttcttcataaatttctccttgttgaattttagtctccctcaattttcttactctgctcccagctttctgaattgttgtaccaaataataaattgcctaagcgcccattccctgcataaatttcacttaaaccaattgtcaatcttatcgccaagtcaattgacagaatggtaataattagagacataattattaaccacatttttctgtaatcaccaatcactgctttgatcatttggctttcaacctcttcccattcttgagaaattgtagctgtgattttggtgtccttttcatgaatctgataagtcatttgactcaattttaccatattactcacaaaagcatgatcttttatgtctgtcagatttagtagaaccaatttgtgaaaagcatgtgcttctatttgaggaagcaaattgtttagcccaaattttatttcatgatgaatcagtttatttgggcttaccgaagtaatttttccttctatttggtcaatttctaaaatttggccttcaatttgaattataatttttctaaattcctcacaggaaccttttcttgatgatggagagattatcattgactttgggtcaatgaaagcaaaatgttccctaccctgcgtcttcaaattaattggtatgaattcgaaacattgattttgaagtttggttggtctaaattcataatctttttggtccaaaggaacgcatggccaaatttttaaaagtgtttgggctgctcttttagcataaatgaatggattagagaaagtaaatctagccaaatccgttggatttgaaaagaatgaggcttcaacccatcttctattctcctcaatgaactcacaaaatgtcctaagtgattgagaaaatgcaaaactcattgtttgagttaattctgcatccaaataagtcaattgagaagctaactgagaagaagtcacaatcccatccactacccgatttttggtttctttcttactccttttccttctgcgagttttatcttccaaaatgattgagccaataccctgatcagacactgttatgttttgcccacaatcaattaaattcgtttgattcccgaaggatagacccagctcaccatcatcagataaccaaattttgtccatcattttcccatttttatttccaattggaataaaattacactttctttcaaagtctatttgccaaatcaagactgatttgtcggacaaaatacagtaccctttactgtatggacaatcatgagtttcactcaatggagtcacaattgaactagctccaaagtgtgaatcaattcgagtttcaaaaagaaagcaattttcacttgagacattcttccatccaaatgaacctaatagccaaaatctgggagttaaatctattttattttcagtttgccaaaaatttgtgatcccttttaaattgccaaagctacagcttttgtgcttgatcatttgcctgcattcatccaaagacacatcaaaattctctggttct

SEQ ID NO: 26699 - DNA, 1024 bp, Heterodera glycines
ggcagtgaagcgtctgaagaggaagctggcggagggcgtaattttgagtgggtgggcgagggacagactcgcgcacttgtctgtaccgacgtgcgtgcccttgttgagggtcgacttcaagcgttggcaaaaagtggtgagaggaaaataaataattttttaaatttataacaaaggccgtctgcaactccatcaggaatttgtctcccaaattgtgatggtgctgaagggtgacaaggggcgacggcgtggcagcaacaacaaaattggtactagtgatcggcaacgttgatcacccaaattccccaaaaaatctgtccattttgggcatgatgaccgaaaaaatttggagaacaaatttggcttgatttttgcgcaattgaaccagctggaaaccgttgcattcgaaattgctcattccagttcaaatgtaaagaaataaaaatcaggaatgttaatgtttattttcaggcttctctgtgccgacctcaaattcacttcggcgctgatggggcaccagggatctgcggcgaccttcccttgtccgctttgtacagctcggcgggaccaattgtcggacaaaattgtggatgcccgcccgtcgcctcccccaccccaaaattcgtacaccggctctccactcgtcaacattgctttggtgaatgttgtaccgccgagtttccatctcttgcatggtgaagaaaacgaattaaaaaaacgattcagaatttacaggcaaatgcccagcgaataattgacgccatttgttcggaagcggacgctcgtggaaagggggactttgttcggaaacgactatttgatgtcggcgtgcgacggcaccctcggacaaaacaattcacgggtagaatgatgggatggggtggtggttattgaggccaactttgacaggtggcgacatctacaaaatcctcgaccacgaaaacttcgcttcattcacggcaccaattcctgctggaccgttgaaatttttgctggtcgacgccatgaatgacctccgccacat

SEQ ID NO: 26700 - DNA, 1173 bp, Heterodera glycines
aaataattttcgtatatttttctcaattatttcaaaaagccaaaaaaaatgattcaattttgaaacgaaatagtgcacaaaagggagggatggttagacgaaaagaggaatttttagaaaagagcgcccccatctgatatttccattttccgttccacaactggccaaaggcgactgtgctcattgacacgtagttgtccaataaggtacttggactttccacagtaaaatgtggtacaaaattttggaactgtcccgcctcacggcggggcttaaaagcattgtacagcataattaaaagctaaaataattttcgtatatttttcacaatttatttcaaaaagccaaaaagtccggaaccaattttaaaaactaaaatagtgcacaaaaggggagccgccgcacggcggggcttaaaagcattgtacagcataattaaaaccgaaaataattttcgtatatttttcacaatttatttcaaaagacaaaaaaaatgattcaattttgaaacgaaatagtgcacaaaagggagggatggttagacgaaaagaggaatttttagaaaagagcgcaccccatctgatatttccatttttccgttccacaactggccaaaggcgactgtgctcattgacacgtagttgtccaataaggtacttggactttccacagtaaaatgtggtacaaaattttggaactgtcccgcctcacggcggggcttaaaagcattgtacagcgtaattaaaagctaaaataattttcgtatatttttcacaatttatttcaaaaagccaaaaagtccggaaccaattttaaaaactaaaatagtgcacaaaaggggagccgccgcacggcggggcttaaaagcattgtacagcataattaaaaccgaaaataattttcgtatatttttcacaatttatttcaaaagacaaaaaaaaatgattcaattttgaaacgaaatagtgcacaaaagggagggatggttagacgaaaagaggaatttttagaaaagagcgcaccccatctgatattcccatttttccgttccacaactggccaaaggcgactgtgctcattgacacgtcgttgtccaataaggtacttggactttccacagtaaaatgtggtacaaaattttggaactgtcccgcctcacggcggggcttaaaa

SEQ ID NO: 26701 - DNA, 1383 bp, Heterodera glycines
aaaaaattactaaattcgatcataggaaaatcaaaaatataacatttgaacattttatacgtgtttagaatacattttgtaaaaatgaggctttttgacccaaaatgaggtttttttgcatgccaaatgaggcttttgaaaattttaatctggtagccctggttaatagagaaaacccgaatttacttcggcacatataactttttttctactcatacaatttacaccaaattttgcatatcgatagagaaaaaaattcttcatttttctatgctgatttattattgtctatgctcaagttcattacaagtttagaacacccatatattttttctaactcaccaaactgttcaacatttgcttagaaaaagcttctcctcatcaagagcttttgaatgataccaagatctttcaatttagttggcaaaaagcttccaaaataatttccgaaaatctattttttaaattttttttgacaaaaataaataaaaatattaatgttgcacaacggactcgaacctccacccccctcatcgctttgttcttttactatcttacaaaaaccactttgccacacatgcaaatctttttggcactggattgaaacggtgtgtattttgggctaattttataagaaaaaaattaggttttttaggggggggggcggtgccgatatgcgccgccgggtgaaacttttaagaatctttaatgaattttgttaagaaatagccaaaaattttcagaaatttccctcttttctcgttcgtcggcgacctcccccccccctcttttacaccggcccccctcgatgcgaaggggtccccaattttggggcactttgcggccgaagggggggggggggtcgaccctttccccccgcttttcatgtatgaacttcagcattgaacacaacatcaacccaaagttcgacaacggcggaagggacaaaagaagcaagtggaaaagacgagggaatttctgaaaaggcaaaaacgaatcggtaacagtttttgaatgaccggcgtgtcacattttaaactcactaattgtcctttcagtgccgaaaatgccacggaaattgtgccaattgtcttttcgactttcgcggttcctccgcggcattccgtcgccgatgatttgcctgcgtgcgctgaccatccgccgggactgatcggtcccattccggtatggatggacgggccgggattcgagacgctcaacaaattgtacccgcgggtgaggcagggagggcacaattggccggacaaatgcacggcgcggcatcgagtggccataatcattccgtacagcaggtggcgaaattgggggtcgaaaaagagggcgcatttacagtaaaaatcggcctagatttaccctatgttt

SEQ ID NO: 26702 - DNA, 1123 bp, Heterodera glycines
tttttgtcccgttttcccataaatgacgatccgccccataaatttaatttttattcgttcgttaggttaaatttcatagacagcatttttaaaagcattagaatagagaacctaacatattgaaaatgctgtttaaattttaacttgaaaagacagtttctattaggtttaaaattgattctttgaaaaaactcgatctcgagtgagtccttgaaatagctcaatttaaatgtccttgaaaacatttcttaaccgaaaatctatcagtgctaattaaaatattaatattaattaatttaaagaagtttatgcgttcttcaattacgccatcaacatttttgcaaagtgtgttccggcttaacaaatggaaaagccacaactacagggacaaagaattatgggttatcaatcgcgatgaaagaaatccaaagttgaataaaatgttgacaaattggttgtggaatgatcatttgccgaatgagaacgcattttttatccgtgcaaatcttaaatatggtgcatcgaggtattttgttgggaaattataattaatcgttttttatgggtttcaaaataattttataaaaatatttaattaatattttttgaatttaataaaataacgaaaatttatttttgcattattgaaactaaacccaaattatcaaacagaatttaaaaatccaaatttacttgtgagataaaagtttcgcttaatttttttttatttgtataatggtatagataattggtatcttttccgttttggggtttagatttgaaaaattagcgcagaatggccataccttggctctttactcctcattcttccttcccagtagtgctgttcgttagtttatttttgggtctcgactcgagaaaagtctcgggtttttgtctcggtctcgattttcacgatgagaaaattagacatctatgcaaatttttaattcaacactccaaaattgtgcatcgtccatgagtaatactagagcccggaaatttcaaatttgcggatcccgctgcgggattggtactgaaaattctttgcgggacgggatcccgcgggattaatcccgcaaatcccgcaatcccgcaaatcccgcatttaaaatttgcggga

SEQ ID NO: 26703 - DNA, 949 bp, Heterodera glycines
atcaagccacagcaacaaataataaaaaatattttttaacatttgaaaatctatagatttttttttatatattcgaaattaccaaaaaagtataatctttttttttgcattttaccaatacatctttaaattggtaataaaaaattgcccctaaacccccccccccccccttgttcccaatttttttgaaattatttgtagcagccgcataacctatttataaggtttttctattcatgtttagattaagtgagctaaggtatgctttattatttatcaaataaaattaaaaataataaaaaatattatttatttctagctatatttgtttgaggaatttttcgttttaatagttttgaaattcttcgaatatttaggtgaatattattttaaatgcatttctttagtcgtagaaatcttgcaaaaaccattttatttgatgaatttaaaactctttctaaaaatttataaaatgtctaaaatggatttttttgtattaattatcaataatttcaaaatttttattttatttagtcacattcggaatagtagttattcaaatataatattcatatttaaatttaaatttgtcaatttttgaaaaatgaaaaagttaatattataattagagaccgacttttgaggcatatgcttattatgcctaatttttgcctttttcgggattttcgtgccttttggcattttgccggtttgttgccttatttggagttttttccgaaatctccaaaattatatatttatttttttgatataaattctagctttaaaattctccttatccgaaaaacattataaatatttctcaatcatttaaatgaccaaaattaagtatttgattaacttttacgtgttttgctccctaaaaatccttaataaaaaattaaaagtcttttttcatgcctttttcgagatttttggtgccttttta

SEQ ID NO: 26704 - DNA, 1405 bp, Heterodera glycines
ttttttcaaaaaagtgataaaaagttaaaataaaatttataaataggagcaaaaattccggatttttatattattttactttccaaaatatcttttcagaaccgatttcagaattttttactgaaaattcgaatttttccagaacttctggaataactttttttagtgtcatgatagaaaatctaaataaaacccataaaattctcctgattttttgctatttttaaagctttgttgtatgaaaattgacttaccctgaggttagttatgaattttcaaaatttaccccaaaatcccgagggtcaaaaaaattgaaaaaaatttcgaatttttaaaaaattctaaaaattatgaaacgaaaaacaaaggtcatattcgtgctcagcacatcaaaataccgcacaaaataatttttcacccactttttcaacccaaaaaaaaatttcgaaaatttctagggggcctagctcgaaaatttttgaaaattttcgaacatgtagtacaccattcgatagagctttaaaagctctacaattttgccctaaggcaatttttggctagaaccaacccccgacgagttatgggcccgggactcaaatgtcccgcttaggccaaaaattttttctatttcctggaaaaaatcgaaaattttctaaaaacatcactaatcgatagagctcaaaaaacgatgttttggaagtggtctccgttttcccgggaaaaatcgttaaaaaatcataaaattcaaaaaccgaaaaaccgaattttaggcctaactcgaaaaattttgaaaatttttgaaattttaaaatttggaaaaatcgagctcattgagctctacaataagtccgctggcgacaccctgctccgagcaaacccttacgagctattcgcctggtactgaagtgtccaaaaaaagtgattcttacgttgcctaacctacaggtcaggcctttgatctgatcaaaaattttttgctggcaaagttgtaggccatagttggggcatttcgcttttggggtccgctaagctctgaaagcaaaagcaaaaaatttcgtaacactgagactggcggcaaagtcagtttttgagccgctgggactcagttggccaccggaccaaaaaatccgtatttttcccggatgcgccgtctcgagttacccctgtgtgcaaaatttcagccccccagctattcccgttcttctcaaattagtttttgagatgagttgccttgtcaatataacgtatatataataaacgggtgcgtgaaccgtcggctatttagctgggaaaaagcgcttcgcgctttgggagcttcgctacctagattagctctggttgtggagattttgaatttttaaaaaattatctgggacttttaggccgcttcgcggcctcgaacggg

SEQ ID NO: 26705 - DNA, 941 bp, Heterodera glycines
cggactgtcccgcctcatctacatccgaaagttgcagaatgagatggtcagtgtgtgtgcatacaatgacaaaaatctttcccccaacgatcccagggatttgtttcaaaaaaagttcggaaaccggttgctttttgaaattttttgtaggctaatagagtacacataaggctatcaatgctattaaataaattctattaggctaaatatggacggagttatacccaaaaaacttttggccatcgcctgatgggttgcaccattaacataagttgtcacccgaaaaaatttaagggagcacggtcctaagaaaattttttatccaattttctactcctagggtaattatttttttaaataaactaaatcccaaaccgactaacccaaaattttcctcactttgtccccttctcaatcgtttgcttcagtttttctgtttttcacagaggcgaacaccgttcagcatggcggatgatgatgggcctgacagcagtgggcattcctcgtccaacgcaagtgccggcttcacaccgaaggtccagcatggcggcagtggtggccccgtcggcactgctgctgccgccgccgctgcacaggcgtcagcctcatccaccggtgtggcaccggtccatcggctgaccatcaccgacctaaaagcttcatggaccattgacaatcggtgggtctatggaggggtagaattgaaaattgggagcagctcgttctcccccccccccccaaaaaaaatgatttcaaattaaaattttcaaaaataaaaaaattgaagcgtttctttcaaaattttatgatttcaaaaaattttaccaaaaaatcactaaaattaaattttatttttattttattattaattttacacgtttaaaaattaaaaaaagttcgtagggaaatataatgcacttggaatatgagtattttttaaa

SEQ ID NO: 26706 - DNA, 1668 bp, Heterodera glycines
  unsure (1)..(1668): unsure at all n locations
aaattctttagaaatttctgtgaaaaaaataaaaaacttttttttanaatgtaccctaaaaaataccaaaaatattttttaaatgtaaagggtggattctaaacctatttaggtcatttttctgccattttgtgccaatttaacactttacgaagatttatttccaaaaaatacccattaaaaaaaaaatttatttacatattttcgtacatattttgggtttttatacatatttgggatttttcatacatatttatgtacatattaggaccactttttgtacatatttttgaaaatacaagaaatgaaaaatgcaccccctaaaataaactgattttagtcccaacacctcgaaaagtatttgatataaatacacttgattttccaattattttggcattttttggttttctagcatatattttttaattatatattgcagaatttttagcacataatatccgttcactgataattattacaattaatttgaatttctctaaaagcggttgcaatgttttccattgcccaatttggcaacttttcataaatttatttgtgggaattctaaactgaacaaatgtgaattactacttaagtacaatttataaatttattctccctttcaaatatgtacaaaaatgtgagaatttcaaatgttgctgcacagcaattgttaaaaaagggcaaaaatttgcaaaaaaaaaaaaaattgaaaagtatttattaaatttttatttaacaaagtgttgaaaaatttttaagctcggcataatttcgaaggtttcttggttttgagattaaacagtggtaagaaacatgggcctagtgtgaagcttctagtcgttcttaattatttacccgaaagattttttgattacaaatccttcctcacattcgtcatcgtctggactgaagttcagcatctttaattataaattaattattttaaaactgaattagcattcccgttatattttattatctttttgttaataatttgcagaagaaatttctctctgtgcagaattatggcaaagatgggacgcttaaaattcattgtgtattgaatgcgattaaaaagaaaattaaattactcatctaatttataaaacaaataaaattggcttttgcacaaatcaacaaattttttgacttttcgtccgctccattccctatcaaatttgttcgataaaaaatgtgaaacacaggccaaattggcgagtgatgtgttgctgctatataattggaggaagagccaaattccctcacataattaattcgctaattaattgctcatttgtcagcccatcccaaaaactgataaaaaaaatggcgttcctctcccgtctctccatccttccaaattcgccaatttcgctgcttgcagtttctttggccgttttggctttcgtcgctttggcatcggccaatccgccgacggcacgcgaaacggcgccaaatgcacagcaaaacaatgccaattcagtggcaactggggaaattgcgaaaaatattgcggaaaagatggagcggatgaatgagttcattaagtgagaatgaaagtgcaatttaatttttaagagcgcctttttaaaattgaccgggactgagttaacgggacaaaacagtcccgcacccgctcttaagtatttttgtaggaacaaa

SEQ ID NO: 26707 - DNA, 2050 bp, Heterodera glycines
  unsure (1)..(2050): unsure at all n locations
atggtacatacaatcaatggtggtgctttatgtgagtatgttaataacaagctaaacaaaatgaagtgacgggcgggggaatggcacggaattctgtgccgtgccgttgtcattgtagtaattttgatgacttaaacagagcaacaacaagcaatgcttgacaacatttctgcatcgaattgagtcgagaattttttttggtcgggattcgagtcaggatgcccaaaaaaaagttcttgacaaaataacagggggaacaaaagaactaaatatgccatcgtcatcatcaatatagaggagcatgcgtaacaaaaaaaaatttatataaaaattttctaacatataaaaaagttattaagaaaaatttaaaatttcggcttttttatttacaatttgcaattttcatttattctttattttttggtaattgccaagcattacctttaaacaacttttaaatatgttcagctttctaaaagtaaccaagatttttggatttggctgacaataaaaaacattatagtccaaaaattcgggttggcgccaaaacgtaagcgcaaaaacgacccaatccatcccacccaaatctttttaaaggggctttcccatagcctttggtccgtatttaatcacagttggatttcactttttccaccctcatttaacacattcaaaatccatcttttgtccctctcccagcagaagagaaaattagacgaataatcttttctttcttatccatcttaagaagaggcataaaaagaagggattttcgatggattttcacaaaggcaaaatttcaaaaatggacattanaaaaagtaaaaataaaatggatatataattttgggaaatattttttaattcagtaaaaaccgtttatttggataattaatgtgcttattaaatagccgagagaagcaaaagcaagcagagacagatgctttgctttgtccatctgtgcacataaaattttgcttacgattttcgctatttttggcgaatatgcaatttttaaattaaattcgtccatcaaaattaaaattaaattaagcgaatttccctctttttagaattacaattcttccaacaaaattttatataattagatttaaaattaaatcatttttctgtttttgtaatttttttagcctagcgccgaatcgatgtttttgttttatgactttattatttaatttaatatttaaaatttttttactattatatttaattgaatattttctgataatttaattttaatttaatattttttttattgcaaaaatatcatattatattaattttacgtaaaattaatttttgtttataataaaaaaaatgaagaaaaaaaaaatctatttttggcataacgaccgaaaagttggccagaggctgaaaaatgggggtggggggggggggggaaactgctgctgttctgtccctgatcatagcattcggctttcccatagatcctagggataaaatggagtgatttgatcaacaaaacaatcagccgtcgaagcggtgggcagcagggtgatcggaaggacgacgaacacacacaaaagcgatcaccagcaacacgtgttctgcgtcgggtgccctccccctcccgtccattaaagcgatgtgatcggtgccgccagctaacaactgttagctgattgatgagactgataacagcagatttttcttggcaaaatgttgggggccaagagcgggccatttttcaaacactcattttgtggcaacatccgccatgccaccagagagtatccaccggaagatacaataagggcacacatatgtgatttacgacgaaaacgtaacgacgacaaatccgccgaatttcccccggccctcgaaattgatgacgaaatcggagggttttgattgagaagaatgaattgctggtcctcttctccggctttgcattccattatcgttcgctgatcattcattcacatatcactcactcactcatcaaatcatcgaaaattttcctcanattgtctctctcctcatttcattcanttttttatgtacaatt

SEQ ID NO: 26708 - DNA, 992 bp, Heterodera glycines
  unsure (1)..(992): unsure at all n locations
cttacctcctttttgctaagtcccgcnttgagaccaaacatttttaaaaatgatggactaaccataccccggctcgagcttttgggattgcttgccgcggtcagggccaaaaattttgttgtcactaattttgactatccttttgaaaaaattttcttttgggccgattcacaaattgtcttatcttgggtggccaacgacaccccccaaccgccatttatcgccaatcgtcttaacgaaattcggagggaaaagggagcaacttttaagtacgttaggtccaatgacaatcccgcggatttaggcacaagaggggcttctcccagggaaattagcggactcaatttatggcattctgggcccaattggcttaagctttctgagcgtgaatggccagccgagtttcgggacattgtttcacccccggatcccccctttggcgctggggaggaaaaccccatttggaccgctgcgcccattgttgagtcaaaggcagagccctccctgctcaatccgcggcactttcatagctggtcaaaattattaataactaccactttcgtgttatattttttgtacaaaaaatgccaaaggagcgagaaattcaaaaaagggtttcccttcctcagtgaattggaaggggcggaaccatcatcttttggggcacggcaagtggcagaacggtggataatccgaagggaacaggcaaatttaccccccgcaaatcctatttttgtggccgccgacgggctggtgcggttgaagtctcggctcgctcactccgatcagcctaccaattttaaaaatcccgtagtgcttccccgggactcttgggtcacacgtttgctaattttatcggcccataaatcggtcgcccacgcgggtgtggactacaccctttccaagttcttaagcgagttttggtgtctcagggcacgtcggttgactatgagcattttacgggactgaccagttttgccaaagggacaaag

SEQ ID NO: 26709 - DNA, 482 bp, Heterodera glycines
atttaagtggtcagcccgcccaccacccccagtgagactgccaaataaagaaaggcaaacagggccgttgaggttcaattgggcaagccatcctcctctcataactatactaataatggccattgcctttgtctgtggcgggagcaccgctccccgtgccctcacgtgcgatgaacagggcatttgggtgtttttaaatccgcgggcggaaaacgcacttgtctgttgcgaggggatctgcagcagcaggggacatgcctcaccatatttactccccctccctctggatttattggccagtggctttgagtgtcatctttcgtactctctagcgggagacaggataacgtcgcaacttcagtgcgaaccagtggagggatgcggtctcattaagtgctacgtctgctgggagagagtccttaatccccactgttcccctaaacgcctcccctttgtcctgggaacagtagccggcgttttag

SEQ ID NO: 26710 - DNA, 2198 bp, Heterodera glycines
atcgattgatttctagcgcaaaattcgcccttaattgtgatcaatccgaaaccgaatttttggaatttttgcgcacccattgaatcgacgcgtttccatagttttgcatcaaattccaagacaaaataatttagccccgtttctcttctcttctcacctcgggctgcctttttttcatttgtttcccctccctctcccttttctccgtttctcttcaaatattcatgccttttatatgaatgaaatgaactggaagtaataattaagcgcacttaaatagatatttgctctcatcattcactcacaaaaaagcgatttcattaaacaaattacgacatttaaattacaaataattaatttttcttttttttattgagcataaacaaaattaaagtaaacaaaatcaagcaaaaataagagtgcatgaaagggacaaccagacgcaagcacagacagccttcgctgcaggacgacagcgggtccaacaacggcggcaaaacgtgagttgttggcacccgtttttttaaatgctttgttaagcctttaaacttttttttttgggcgcctaaatcttagtttttgcccgtttgttgttcttatttagaaaataaaaacttttgcttgctgagttttccagatacgccttttttatcttgaatttttttggcacttgtattatttctttccaaaatttatatcgaacctattcatacttatgcatatacatagacggcacattttgaaaatccggcgtagcgatcaggcaattggatcatcggtattaaaaagcactaaacttggactcttgctttaatcctttgtcttcggtgctatatacctgtgccacgattcaatttatttctggagggatgagttagaaaataccaaaatttggtgatcatcacctatctgctgtctcaatgtttggacatcatcattttcggtgtgttgttgatgttttctgtttgttggtggcctgttttttgcgatttgttgagactgctgctcgctgatgatccgtctctgtgctgcatgcaattgaattgaattgaattttgagttatgtgatgtgaatgcgtgtgtgtgtgtgtgtaaatgtatgtgtggtttatgtatgggaaaatgaacacagtgaggagacgacaaacgacgacggatggcggagatgaatgtgtggcggtgttggaatttttggggcgggaactgaatgagagtaaatcggtcggttgtccgccgctttgcttcttacttttcctccaccctccccccctctaattccctttaattccctctgctgttctgttctgtgtgtccatttcgctgttgtctctctcacttcagcccatgaaacaaaaatttgtttttttgttttttttttgcaacattatcacattgattcccgcatttgtttggtttataatgtcatttcacatgacaatttatcgggcaaaattgagtcaataaaatttttgtagaacaatgttataaacttaatttttcgattaaaaaaaactaactctatgttcacaaattcgtctgtttttttttggttaccttttctccctcccggtgcaggataccatttttccctactcaccggacccgacaaatctggttgagtcgggttttcccaaaaatttgggccatacacggtcataagtcctaccctaagggtttttttgggttttcccatttttttaaattttcctgttccaggacgcctgttcctactgctgctaccgccgctggaccccccgaggaatggcgtctggaagcggccattgtttcgctgttgacgctcactgatggggacaatcgccttatttgcccaccatttcgtgtgcttcctacgccgacggtttaaccattatttgtccaataatttaccgtcagacttattttccaataatttttgtttaggaattcccactttactacgagcatatcacgaacccaattgatctgaaatgcattgcggagcgtgcacgtgcgggccattacacggattgggccgcaatcgaggcggacatccaattgctgtgtcaaaacaccaaggttggcgtgttgcgcatccgatttcgcaaaatttcgccgttttttttaattttccaattttccaggacttcagtgagtcgggccaaatgctgcgcaaagatgccgaccttttgcttgaccacttcaaatcccgtgccagcgaa

SEQ ID NO: 26711 - DNA, 2185 bp, Heterodera glycines
atgtcctccaattttttgtaccttctgccaacggcggtaggaaaacgaagcaaatcgcaaacaaaaataaaatattcattgtctaaactaaagtggttgaaaatagtggtatttaaaaatggatgaaaactaataaattatataattaatgaaatcattgtttatatacatacaaaataaaaataatatggttgtttgatcatttaaatcaagataaaatctggagaaagactacggcttacaaattagcttagctacctggctttaagaaaagaatagattaaattatttattgctccaacaataattttgccctgtcatcccttctttccagtgtatttttaggttcggttgggcccggaacaaaaccgggtcaagtccaggtctggaaagagccgttgctggacccggtcgaaaaaggtaaatgacatgccgagtctcgaacccacggcattttaaaacattaggatgatctaaccgacttaattgggtccggcgtcccgtcattttgtgaaaccgagtaaaacgggcggcgttttttgggaaaaatataaataaatcttattttaatgataattatgagtgaattgcgtggtgtcttttaaactttatataaatacttgtttatatatcagttggcatatttatttgccaacattattattttaaaaaccgaattgcaaatagaaaaatttaaaaaatgcaaacgaaaattgaccatttcttttagagattttaaaaattaattatttaaaaattttgtatcaatggtttattttttacaaatttgcaatggaattctgttaattttcgcaagagtttctcaaatgttgttttcttgaaaattttccaattttgagaagacaaaatagccggacatttcaatgcgcaagaaaatggccgaagaaaaccgtcttatggaaaagcaagtcaaagtaaaagatagttttaaataatgccaaaatatttattcatttaatattttaaaatcaaaattttattcatattaacgggggggggggcggaaggacaggaaaactggagaaagagaagcagcgaaagagactgtgggaaaataagagaatagacagttaaagaacctacgagaggtcggttgcacactctgagcaccccgttaatgggattagtgttcaattaaaacaatttttgggtaattaagaatttaatgaattgcttagatgtggtttcgtaatcagcgtgaccaatggaaaattcaaggagcagaagaaatacttgagtaattaattaattaattaattaaatggcgacacatatagaattgacagaaaaagcaagaaggatgtgaaatgtggaaaaaatttggagagagagagtgagagagtgaaagagagtgagagagtgaaagagagtgaaagagagtgagagagaaagagagtttgttgacctttttaatttaaaaatgatggcacagaacaggatgatactatagatggtgcccccccccctttttttgaagaaaattttttttattctgtaaagtcttggaaacatatatgtgcgggagggtcgctgatcaagaatctgacatccatttcgaccaattccgaaccccggacccgaattcgaataaaaagtcaaaaattttaaaatttaactttttatattttttatacacttgccattggctttttaaaagttgcggacttaagtttccattttattttcataaaatgaccaattggattcaacttcaacagaagaccagctggggtcagatgcactcatcaagaaaattgttaaactaaatccgccaatgggttcgaaggaaatctggaagccttgtcataaatgaaattcagaaaattttaggttatgatttttttttgattaatttttgagtaaattttaggaatgttttgggaattttctttgtcatgtcactttttcatttttatcaattgccattcacattttgctcaataaagcatttttaaaaggcaacaattgttaattgaaaaaacacatattatataagcaattcacatatttttattatttttttcgcttatttttttgttcgttgacttattttttgttagcattattccttttttcggcatttcggcggccatttttatgatttgtcattttattttttgtgcttcaagagacccaaaatttgtgaaaaatttaatagtggcgt

SEQ ID NO: 26712 - DNA, 1262 bp, Heterodera glycines
  unsure (1)..(1262): unsure at all n locations
aatggatggctttaaatctgcaagaaattagatgggcaatatgtgttggtaaaaactttttgggtaatgaattattttttgaagtgagtcaaacaccgtattagtgctttgctgtgccgagaaccggcaggcaatggatagctttaatctgcaagaattagattggcaatagttggttgtaaaaaacttttggtaatgaaatatttttgaagtgagtcaaacaccctattagtgcttngctgtgccgagacccggcaggcaatggatggctttcaatctgcaagaaattagattggcaataagtggttgtaaaaaacttttgggtatggaattattttttgaagtgagtcaaacacactattagtgctttgctgtgccgagaaccggcaggcaatggatagctttaaatctgcaagaaattagattggcaataagtggttgtaaaaaacttttgggtaatgaattattttttgaagtgagtcaaacaccctattagtgctttgctgtgccgagaaccggcaggcaatggatggctttcaatctgcaagaaattagattggcaatatgtggttgtaaaaaacttttgggtatggaattattttttgaagtgagtcaaacaccgtattagtgctttgctgtgccgagaaccggcaggcaatggatagctttaaatctgcaagaaattagattggcaataagtggttgtaaaaaacttttgggtaatgaattattttttgaagtgagtcaaacaccgtattagtgctttgctgtgccgagaaccggcaggcaatggatggctttcaatctgcaagaaattagattggcaatatttggttgtaaaaaacttgtgtaaggaattattttttgaagtgaatcaaacaccctattagtgctttgctgtgccgagaaccggcaggcaatggatggctttcaatctgcaagaaattagataggcaatatgtggttgtaaaaaacttttgggtatggaattattttttgaagtgagtcaaacaccctattagtgctttgctgtgccgagaaccggcaggcaatggatagctttaaatctgcaagaaattagattggcaataagtggttgtaaaaaacttttgggtaatgaattattatttgaagtgagtcaaacacactattagtgctttgctgtgccgagaaccccggcagcatggataggtttaaatctgcaagaaattagattgnncatatgtgnttgtaaaaaacttttgngtatggaattatttttt

SEQ ID NO: 26713 - DNA, 1402 bp, Heterodera glycines
tcaggtgaacaacttccggcctagtctttaaaaatggcaaattttggcacagcgaaatttttggtcgcttttaaccgttcaaatttacttccccccccccccccccccgagaatttttttttttaatttgctaacttagaatttttcgagaaaaaaatcttagaaagttttttcatgagaaaattctaagaaaaaaatttttcgagaaatttttataatgaattactaagatttttcaaaaaaatttccaaaaaatcgctgagaatttctcgaaaaattttttattagaattttctcatgaaaaaactttgtaagatttctttttttaatttctcgggggggggggggaccgagctgggggggggggggggaaatgaagtgcaccccaaaaaaggatttgaccaaatttaaccgtatgttatctattagacagttcttgtagctcttaggggtcggattattcgtacgataccaagcatttttattatccttaacccatttcccaatcaccaataaaagcctcatttttttgtttctatgtcagtgtttgggtggtaatacggtggagggcggggcgctggccggctgccaagacattgctgaactgctcgcggagcgggcagagtaggagcagcagttgcggggagcgtggtccaacaaggtgggccgcccctcccaacgggagggcgccggcgtggcgcagtgtttggaacggacggtggtgcaacggcatccgaacatgcggtaggttgagttccggtgacattttttgagatattagggtttacaattagcattgggaaaatttcccgcgggaaaacccgggatttcgatttccggccaattttgtgaccacatttctttcgacaatttttgtctccaaaaatccttgagctgtttgaacttgctgtaatagttatagcttgtttccaaaaaacccctccagggcgtgaaaaaaaaaccctcgatgcttctaatacgagaaaatcggctaaaattcgtcccaaattatcaaagaatccatctatttgatcctttaaaattagcggttcttttgccaaaaaaagcgatggtccataaaagacaatttaatttgaaaacgcttttcagttctgtggtgatcagcgaggtggaaacacttgtgttccggtaaatttgttttattgacacgcatttttaaaccggttttttgaatggttttttaggaaaaacatttcgccaaaggcgcaacggtacgccgtgcattttctgtcccgcgtcattttggatgctggcgaggccgagttggcactgcagctgatccgcatctatttgaagctgttccacattttggtgaatttacctaaacgaattgtcttttttttatttttccacccaaaatttttgtttgaattctttcgag

SEQ ID NO: 26714 - DNA, 1589 bp, Heterodera glycines
aaaaaatccaaaatttttcttactaaaaattatttcaacgaaattttaagaaaaagttgagagatctttaatagcaacagaaaaatttcaaaaaaatattaaaaatttaaaaaaaaaattttttttttgaaatttaagaaaattctgatatggggggggggggggggaagagctgcttccagaaaacaataggacttttaaagaaatgcaatttttgtgtagcgcccggaagtgcggcggagtcggagctgatcagccaccaccttcggctgattgaggagaaggaggagttgtcccggcgacaggatttcctgaacacacagttggacctgcacgagacggagcagcgcattgtgcagttgcgcatgaaaattgttgccgaagacgacgccggaagtggtggtggacattgcaacggcacaggtgatcaacaattaatcaactaattgattaatcgctgttcgaatcccaaaacaaggtcgtagcctgggcgaattcccccccccccccgaccgaattctttttctcctcgacgatggaaattttgaaaaataacactggtgatcaaaaaaaaaggcattgattccctctccgagtcggatttcgtttttcctgatcacttttggcgtcgtaagccaattttataatgcgctatgggtataagtgctttgatgactgctcactgttgggaatgttcacctcgttaaagtcagttttgtctttttcagtttctgctcttccgccgacttcgcccttttacgccgcgctcagacaccaaaacaattcggcacttttgttggagctcaaacaactaattgaccacaagaatgatctcgtcatgcgcatttctgactatgaagacgaagcttaaactcataccgcacgcccctcccactcattttgccattaaaatgcgcttcttctttttcttgtcgcccctcccaaatttctcgcttttccttgtattatccctgtgctaactgtgaaaactcaacttatataaacgcctatacatacatatacatttgaatttatgcataacaattggtaggcccaaatgaaacacatttttaaaggaaaatgaaattttaatattttctaccatattttttgacattacttaattttcatttgagaaaaagttttgggacctaaaagtaatgttaaaagtgtttttctcgttggtgaccaacgccttaactgaatacgggcctaaggacggcaaacggttaaaagggaaaaaaatcgtcaaaaaaatcattggcgaaacaaaatgccattgtattcaaataaaaaacaaagtgtcttaactgtgatcaaattactaatcaaaaattagagcctccatttcaatacattttttttctcgagtttatttgagttaaaattgatatacaacattatcaaattattagcatgtattcactacaaaacgtggatagaagatcattaaaattatgagcattcgatgcagaacagttacctatacatacttgattttattttaatgcgactcactttaagaaataggcttaagtggtaagcattggatggaaatctaactgggtgcgtcagtcagccaatggaca

SEQ ID NO: 26715 - DNA, 1494 bp, Heterodera glycines
  unsure (1)..(1494): unsure at all n locations
cgttctaagatttttttcttgaaaaatttctaagttagcaaaattttttttaaaactttcacggagggaaacggcggggggggggggggaaatgaagtgcaccccccaaatccaatacgtcctaaacatatctcttaattgttttgtttaaggtatttgccaaacttcgtgccaccctttttgccacttttgccaaatgccaaggccattgttccattgcaatggcttcttcttcggcttctgctgtcggggataacaatggttggtcgccagaagcgaagaaacggcgcacaattattggcactttgctgcgccggggcgacattttggagacgaacgatggcgacgacaaaaccgtggaacgcaatgatcaaaccgcagcagatgatgacgaaactgatcaaacccattcaaatcgacagtaagaccgggggacgtgacaaattttcgccaaaaaaaaataaataaaataaacttacaattcgaaattttttaagaaattttttttaattttaaaagaaaatttttaaaaaattagaaaaatttttcagccattttttcctgaaatttatgatgaattagtaagttttttatgaaattttttccaaaaatcactaaagaaaatttcaaaaatttttcccttggaattttcatataaaaaaatttctaatatttttttcttgaaatttgaaaaaaaaaattttaatcggcgcaattttggggtgcactcactctcagtccgtggattagggcatttattttttaaaaaacaaaccccccccccccttagcaacggtttttcggtcgaaacgcaacaaagtgtggacttgagttgcatgacgtttgccaatgctggactggaaatggacgaagctgagcagacgatgatgaacaacgaagacgaacaaaattgtagcgatcaacccattgttcaacggacaactcaagacgaatacgtcgtctctgaggattggccaaatgccaacaatgttggcacaaaaaaggcacgaaaaagcgaaacaacaacaacaacaagaaggacaagcgtgaaattgactgctggccaaaaggcattggaggtggtggcgagagttaattgagttatgccatgacaaacagaaattgtctcgagagcagctctcccccgccccgcctatcatttccaccctaaaagcggcttaaaaggggaactgaaattttttataaaaaaatttaatgaaaaaacgagttgaaaatttttcagcgattttttggacaaatttttgaaaaaatttagcatttaattattaaatttacaaatttcaacaataagaaaaaacaattttaaaagatttttctcaatttgagtgagcctatgaatgcgatttgattgaaacaatttttgacggaatttggtaattaatgaatgatgtggtgaccattctgcangcattctcattccaacggctttcgtctgctgctgggtcatcatcaacaacaattgaaacttctgct

SEQ ID NO: 26716 - DNA, 2061 bp, Heterodera glycines
tttcctccctttttcaggtgtttttggtttatgctgaccttcgccgtcgcattctctaccgaattatgttttccattgctctgtccgactttcttcagctttacgccatttggcagttcactctgttcgaagcactcggcttttccgactggtcaatttacattgaaaaggtaggcgactgatcaatgaatcggtgttgatcagtgagtgagtgcttttgcctctgatcaatgctttttgtccattttctgccgtccgatcgttcctttttagttcgctagcggtgtttacatcgtcgcttgggaccatctgatcgttcagcactttcttctcgccctcaaccgtctgatcataattttgcgcgcctattattcgcccgtctccctcaaaatgaacggcggtgagtcgcgtgctgagaaaggccttttcaatgtgagtgcgttgccggaaactgatcattcatcccttccccgttcgatcagtctctgctcgtcttctcctgggtcgttctgttactcctcgtccttttgttcatgacttcgatgtgcggcggcgtttgggacggccaagcggtcggtttctattacgaccggactttgaagtgcagcaatgtgttcatcgaggtggagctgtacttcaccatcactttccctgctctgtccgtgctcttttacctcctcatcgtcgtcatgctgaaaaaggttccactccaatttcgaattcgtttctcattttatttgcttctttagactcggaatggttgtgtgacggttgtccatgtgacttcgaacaatcagtcgctgaagcagcggtcgccggtgcgtctgctcagtgtgcaggagaagcgcattttgctgctgtccgtgctgctgttcgcgctgatcaccgcgttaatcttcgcttggtaccacgactaccgaagcccgccctggacgctgctgttctgctgctacttgctcaccaactccttcctcagtctgaccatgaactcggagtaccgaagtcgctttgtgaaaatgctcaaatggctaatgcactttttggtccgcgaaaagcgcggcggccaaaacgtaatgaaaaatgggacaaagcgggcggacggagtggcgggcagcagccaagtgcgaaacattgtgaacggaatgggacggccgaaacatgcggacgaactgttcatcagacgagggcacgctgtggggccacggtgcggaagggtcggcgcaattggagacggagtgcgacggcaccagtgaaaagcagagagagagacgaggggataggaagagacagagagacattgagaggaagagagagacaagggagagaagaagagacagagagacatttaaaggaagagagatacgagggagaggaagagagagagagacatttaaaggaagagagagacaagggagaggaagagacagagagacattgagaggaagagagagacaagggagagaagaagagacagaagagatacactgagaggaagagagagaagtgggagaggaagagagagagagacattttgagcaagagagagacaagtgagaggagaagagacagagagacattgagaggaagagagagacaagggagagaagaagagacagaagagatacactgagaggaagagagagaagtgggagaggaagagagagagagacattttgagcaagagagagacaagtgagaggagaagagacagagagacattgagaggaagagagagagagaaagaggtgaagagaggaagaaaggaagaaaggatggttcatttctgttaatggttttagttcgagattttatcgaaaaatgtaattaattttttgtcagccgtgccggcaattgttacggttaaacgttgattagacattgttgatactttcgttgtttgaaactccctagtaattttattaatttttccccactttttctctcctttcattatcaaattcctttcgtgccattgcacgcaatttgtcctcccttttttcctttaattttaaaaactgttaaggtcctctttcgcccttttcggtggcatcgtttcaaaga

SEQ ID NO: 26717 - DNA, 1004 bp, Heterodera glycines
cggggcagtccccccgaacccgatgcgccccagatttatggggagaccgaatccttccgggagtagcttccctattgcctgtactttaattctgcgttggatttttgctccccataattgtttgagtaccccaaacggacacttgaaaaaatcgatttttttgttttcggggcagtccccccgaaccgatgcgcccagatttatggggagaccgaatccttcgggagtagctttcctatagcctgtactttaattctgcgttggatttttgctccccataattgtttgagtaccccaaacggacacttgaaaaaatcgattttttttgttttcggggcagtccccctgaaccgatgcgcccagatttatggggagaccgaatccttcgggaatagcttccctatagcctgtactttaattctgcgttggatttttgctccccataattgtttgagtaccccaaacggacacttgaaaaaatcgatttttttgttttcggggcagtccccccgaaccgatgcgcccagatttatggggagaccgaatccttccggaatagcttccctatagcctgtactttaattctgcgttggatttttgctccccataattgtttgagtaccccaaacggacacttgaaaaaatcgatttttttgttttcggggcagtccccccgaaccgatgcgcccagatttatggggagaccgaatccttcgggagtagcttccctatagcctgtactttaattctgcgttggatttttgctccccataattgtttgagtaccccaaacggacacttgaaaaaatcgattatttttgttttcggggcagtccccccgaaccgatgcgcccagatttatggggagaccgaatccttcgggagtagcttccctatagcctgtactttaattctgcgttggatttttgctccccataattgtttgagtaccccaaacggacacttgaaaaaatcgattttttttgttttcggggcagtccccc

SEQ ID NO: 26718 - DNA, 1694 bp, Heterodera glycines
  unsure (1)..(1694): unsure at all n locations
tttttaaaatttaattttttttaacccccccaaccaatagcaaaagggcggggggggggagcagaaacaatttgggaggccattttttccttgtgtgttggggtttcccttcctccccaaaggggttccattcggtcgttggacgccaaggtaaaagagaagacccaatgtgatggacccactgagtgtccaggtggggcgtttggggagtgaatctgtaaatggaaattttcatataaattttttgaaaaagacttcttacaaaaaatttagtcgtcgaagagtaagaaaaaatatataagtaagtttttggtttcctttttgaaactcaacgcaatttttaaaaatttctcagcaaataaagaacattcagtactatcaaatgaatagtattcatacaatttggtctactatgacaggcagagcaggacgttttcccccgaaaataatttttatataacttgtaaacaaatgaataattgttcaggggtctttgggaaaaattcatgaaatataagaaaaattctcaggaattttctgatacaaatcgctcataagatgttgtcatcttacctaacatatcgcttcatacgacttcagaggagcattgcgtgcgtaaatgtactacatgttacatgctaagagaggaaattcatgaactccctccgttttcatgtaacatgtaacatattttgaagcgggcgcgaagcaccgaggccacgaagtgttcttacgagccccacaaatttagaaatgggcgcgaagcgcccatcttagggcgtaaagctgcctacaaccccttaataacttttcaaaattcattgctttcattatgttaatacatgttacatgctaagagaggaaattcatgaactccctccgttttcatgtaacatgtaacatattttgaagcgggcgcgaagcactgaggccacgaagtgttcttacgagccccacaaatttagaaatgggcgcgaagcgcccatcttagggcgaaaagctgcctacaaccccttaataacttttcaaaaattcattgatttcattatgttaatacatgttacatgctaagagaggaaattcatgaactccctccgttttcatgtaacatgtaacatattttgaagcgggcgcgaagcactgaggccacgaagtgttcttacgagccccacaaatttagaagtgggcgcgaagcgcccatcttagggcgaaaagctgcctacaaccccttaataacttttcaaaaattcattgcatttcattatgttaatacatgttacatgttacatgctaagagaggaaattcatgaactccctccgttttcatgtaacatgtaacatattttgaagcgggcgcgaagcaccgaggccacgaagtgttcttacgagccccacaaatttagaaatgggcgcgaagcgcccatcttagggcgtaaagctgcctacaacctcttaataacttttcaaaaattcattgctttcattatgttaatacatgttacatgctaagagaggaaattcatgaactccctccgttttcatgtaacatgtaacatattttgaagcgggcgcgaagcaccgaggccacgaagtggtcttacgagccccacaaaattagaanatgggcgcgaagcgcccatcttagggcgtaaagctgccctacaccccttnataactttcaaaaattcattgct

SEQ ID NO: 26719 - DNA, 1442 bp, Heterodera glycines
cttaggcctaaaatgacaaaatatgtagtaaagggacgaaggggaaatgcgcacccaatccattcggacagaagcgacacattttgggtgaacaaactgctggacaagccctggctggcctcgttgttcaccgcaacggcctcctaaaagagcgaatttacaacaacaaaaaacgaaaaacaattgacacggggaaagaaatgagaaaaattaattgtcgggatggaagcaaaaatgagcaaatcttggtaatttaattctcgtggcacctcaaaatcggccactttcactgcgtaaacaatgggcgcaaatgtctctctgagcaccaccggtgcgtcgtgcgcaagcccagcgatcaccgtgggcagcacgtaattgcccttcgactcctccaacactttgccaccgcacagaatccgaccgccctaaatacagatggacatgaaacaaatgtgcggagcagctcatccaccccactcccccccccccttctcacaatcactgtgtccccgatcaattctatttatttaaaaccgcaaatttttttcaaaaaacccaaacaaatagtatcaataaaaaatttttaaatttggtttttttttctaaaattaaaattattatgttgttttcttacagtggcaatggcctcggcaatcgccgttttgtatttgagcaccgactcgcgactgtgcaaagggccgatcaaagtgcgctcatccaactgaaagttgtggaaaaggaagataagaaaatgtaaaatttagctgagggaaggcacccataaaatcaaaaaagtgccaaaaaaataataggaaaataagaggtatctcattcaatgtcaaagggttggccaatccgttccccattaaaaccgggtctccgatgcgcgtgtccatcagctgtttgtacgcgctgaccacccgttccaacaccacgtcgtacactttttcgtgaataatcagtcgccgtgtgctcgtacagcgctgccctaaaaagaggaaaaaatgggtaatttcatttgcaaaagaataaaaaatattaccagcagtgccaacggaagagaaagtgacggcgggcacaaccaaactcaagtcggcgtcgtccatcacaatgatggcattgttaccgccgagttcgagcagtaactgtagaggaagtccaaacaaatatcaaaaaatggggagggaggagaacagaccttgccaaaccgcgcttggacatgctgaccaaccacacggccaacctcagttgaccctgacaaaagaaaaatggcagtgttatttagttaaattcataccggtaaatgagagtaaattgacccgagggtccttaacaaggcacctttaaagagaataggaaagagttaattgagagttattcgtaacaaaactgacattccgacgtcacgacgccacaaatcaatgagcaaatggcgggcgaca

SEQ ID NO: 26720 - DNA, 1561 bp, Heterodera glycines
cactaataaaaaggtgattctaaattgattcgaacgtaaatgtcaaattcaaagaaattaatttttttgctgtttaaaaaatattaagaaacaaaattaaataataatttaaattagatttatttatttttgaaaatttttttaaattttgagattggtccctttcaaattaatcaaattttatatgaacataaaaaaagttaaagattttcaaaattaattttctagcctattgtaatgagaaataaagtttttttcgcttttcatttaatttcaattaatttcaatgttataaattttttgtttttaccattttttaaacaccaaactcacaagtttcttttcacggatgtaagccacatccggttgaatgacagggtcaatggcacacccatcgatgtccaacttgaaaaaatttcaagttttaattggaaatttttaaatttttaccaaatcaaatttggaaccccgtccatcatcgacggcacaggaatggaccaggaattcgtaggccgggtcatcgcattgccacacatggaaaattttgtctcccaccttgccaagcctattttaaataacgtaaaactcagactattttaattataactacggtatacatctcatgctgtatgcttaatggatactgtaatgagcggcgtaagacacaaaaattactgtactattcataactttttttattataagtacggtattaaaatttttctcatactgtatgcttaatggctaccgtaatgagcggcatagcacccgaaaacttactgtactggtggcccttccggcgactgggcatggatggagtacaagcaggacggtgtcttggcagtgtctgcaaaatgccaaagcgcgccattttaaaaatttaaaatttttttttaaaattgcctacctaacaattccgtggtggccgccaggttcacgtcaattgcatttgtcaatgttttgatgttacggaagaagcacatgcagcgataggcacggtccgaacgtgtgacaaaagtgccatgaaatgacaccacaatggtcaatgaaagcatcatgccctccagcgagccggtgacgcgttggcgttgcactaacaaaataaaaaatctcagaacgaaaatttttaagaaaattttaattttaactaaaaattttaataaaaattctttttttggcacttttctgttctattcataaaacgaagtcataatatgacatctaattgacaaaaaattctttttctcacatgtataaattaactatttaaacaatgatgaccccgcaatttaaagagatgttgtctctgaatttgtgccattaaattatttttttcacaatttcgcttctttttctcggcatctgtgccatgttttaatccattcttgagattaacctaatctctagctctcaggctcggatgggaatagaacccacgcctccaccgagtttgtgggcagctctaccattgagctaccgggtggcacgccctccctccattccttttatggatttcgaaaatgtaccgcccatttcaacttctttacaataatttaaatag

SEQ ID NO: 26721 - DNA, 1512 bp, Heterodera glycines
  unsure (1)..(1512): unsure at all n locations
aaaacttcccctctctgcgtgccattccccttcccacctgttaattaaattttgtagccaaccaaaattcaaattttggttctctccgtgccagttcccttctcgttgtcattcaaattggttctttcgctagtcttctcccttctttcaccacataccgcactgaaaatcgatcacgcttcgctaatggttccgccccttcacattttgccggaattggcgtcctttcattcgctcttcttctctcaataatcagcttttcaacaaaccgtctcctattacttcaatttattccctttttattgcttcaatttcttcctttttcaatttttcttatctctatccttttttcgtcgtgactttttctcctattgaatttatttcattttttctgctcaactttcttctcgaaaaatgtctcgcttttgccctctcgttgaaaccaaagaattgggacgtctttccgttatgaagggaaaattttgtgagtttgagatctctttaacttcagcacaagatttacaaatcttttacttgaattttaggcttttttatgccctcgaattatctcgtaattaccaactgatcgataatggaatctctaggaaggctttccgttattttatggaaacagagaaaaaacaacgtgaaatgactttcaaactgatggaaaaggcggggataaatggggaggaaaaaacttttggtctccaacatcttgaaatgatccaaatcttttgggacaaggaattccctgacatgtttcgcattgtggcctttgatatggtaaaaaaactacatactttgaaaaattttttattttccagagaacgggaatcaaaccaattttcaagggagagggaattcgtaaaaacgaagtatgcgtgataaaagaaggagaccactgggatgggatcaaatcagtgacgcagttcttgtgtgttagaaattattgtgccagctgtgaagtgacttgcgaaaggccggagagacatcgattggaatgtaaggaaagatgcaagaagtgctgtagaatggggttcgggtttccatgtgcggatgtgtgtgctgggatttattgcgcggagtgtaatcgcaacttctacaatacggaatgttttgagtctcacaagaagactgcttgtagggagtacaaaaaatgcgaaaagtgtggagagacacacaacacaaggaacaaacacacatgtggggagaaattctgccgaatttgtaaaatttatcatccaaagcggggctgtttcatccagaagttaaaaattcgttcaacgaggaaatacagaattgttgcatatgaccttgagacaacattgtataacggagtccatgcaccgaatctcgtttgcgcggcgttgacatgcagtngagtgcgtggaagagaaaaggaaatgtgagattngtgaggaaccgaggatgctgacttggtcggcagaaaatgtggagaccctatttgcgaattatcgattgaatatgggttcaacaatttgaaacggt

SEQ ID NO: 26722 - DNA, 1582 bp, Heterodera glycines
caagggagtgccaggtgaaaaaattaattattacttattttaaaataaacataccgtatttcctgaaataaagcccccaagggctttatttttcaaccaccttcaaaagagggcttttttctggggtggggcactattcggggagggaggggactgtattatcggaaatacggtaagtaaataataaattaattaatgaaatataattaaaaattataaataaacaaataaaactattttacattttactaataaactatatttttacagaactgttctcagattaacgacgaaaatgttggagaagctggtgcatacaaggaaaagcataacgaaagttcggatattttctcaaaagtttatggaattgctgtaagtttattttaataaaattaatataatttaattgataaaatttttctttttaaggatcaaaaattcaaggaccttttcaaggacaatgcatttcctactctggaaaaattgttcggagatgcaaaagctttgttcgtcaacacaacgcctttattggattatgacattggcagtttgccaaaacgcgtcaaattcattggtggcattgatctgatgcagcccgatcacaaggatgtaataccattcagtagtaaaacagtatacacagattaagaaaatcccatatgaaacatttgaaaaattgaaatccgagtctattccttatttctcttaaattaaaagcaaataatttttaagaaattgaaaacagtctcataataaaaatgatttgaaatttcgaaaattttcggcaaatcacgcgatgccgaaaactcagaaaaacgatattataattgtaatatttaaataatttccctaaaaattaaggctttaccgcaagtttttgggcaacaaaaaccggtgatcgtgttcagcatgagttctttattagaaccatccaaaatgccattggacaaatttgagacggttattcaaggacttggaatgtgtaaagaaaaggaagtgaaaaaatgccacggcatggttgggctaatccaccacggcccaagcaaaattcaaaaatttggaatttaaatttaccatttttattggcaaatttaatgaaaaatttcaaaaaattttccgatgggcttgggccaaccgattctttacgttttttcagtttttagcccccccccccacccccccgtaaaatacagtatggctggcctctgtctacggtatcatattgtaaaagtgtgccaccattttcaggcaatgaaaagacggaattggtgatcagcgaatgcgatattcgtatcgtaatggatgcgttaagcagtggaaaagcattgctttgtctgccgaacagttttatgtgtcggaaaagctgcgacgcatgggcgctgcggttgtgcttgatccgcgcagtgacagtttcaccaaggaggggattttcaaaagtatcggcgaagcattgacaaagcggtaatgtgcacgcaaaatccttataatgatactttataggggagttgctcgagttttcggctccaaagtcgaggaatttctcggctttttagggtcgagagtcgcgactctcggggtcaat

SEQ ID NO: 26723 - DNA, 978 bp, Heterodera glycines
aaatgaataaataaaatgtaattcaaacaataacaaacagacagtaaattggcaaaaatggccttttccctcaagcaaaccaaaatttcgattttgtcaagcaaatattttattccttgtaaattttggaatatataaaatgaaacatttggtcaattgcaatgggattcttttcctccccgccttcgttcactgcatgtcagcacgctgctcgtagaaatctatgaccaatttggggaatttttcagaggcgattcgggacgagaagaactgagccaaggaatcgcccttcaacttgacgagatagaagctgaaaatggaatcaataggaaatcgagatttttgaaaaattcttttgaatattttcggccgtagtgcacttcaggcatccaatgaccatcccatttttacaattaagccaaacttttttcatacttaatcatgcctaaaaagcttggtctatagtttttaatataaatactgcgctaaaaataataaacaaaaaattgttcctggacaaaaaagcagaatttcgtctcattgtatttttcttaatgtcaatatttaatcatttttcgcatttacaaattccgagactttgagctatcgtttgatatcaagatagacattcatcaaggaaaaaggttgaacttaagaaacgaaaatggtcattgactggacgcctcaagtgcaatagagccgtattttctctaaggcttttttttataacgaacatttcgctattcatccgcgctgcccccaaaatctcttcgacttcgtcctgggagggtgcgccctccacatccatcggttcgactttttgattttgcgtgttgaatttggccatcaagtcagcacagttcagattctgctccggttccctgagtaaagtcgtaaattgaaagggctgtatggaaaagaaaggttaaaaatgccataaaatgggagaatgctgcgggaaacaaaaaaaaaaaatca

SEQ ID NO: 26724 - DNA, 987 bp, Heterodera glycines
cgattttgacatcaattctattccacgtgaccagcggcactacaccattgaaagcaattctgttcatttctctttcaattattttttatgtaacaaaaattattaaatcaaaacatgagatgaaattttttaaaatgcaaatattttaatcaaatttatctttgttaaaccttttttatatctttgaacttatgattctaacagagacttaaattttggaaatacggaacgggaaatccgcgaaatcccgcggcgaccccgtctccgtccgggctctatcgaataaatttttttttattctccaaattggcacagattctctatacgctgtgcatcactgcgttatgggggcacgaaaatgagaacgcctgctacacattgttgtttttcattggcattactgatctgtcggtgttgtgggtgatcgggctgttccacggagtattggcgctggagggagccatgttttgttcacatccgaccctcatttatttgcttggcattttaggagtgggtatgtgggagaacaaagttttttcatattatttaaattaattattttaattttgcttgaaacgtaatgcaaatttaatcaattttcagcattttggtttgccgaaagcagtgcaaatatggtaaaaattgttttaattagtaaattattttttgtcgaaagtcagcttttggctattaatcgttgttttgaaacaatttcgcctaatatttgtaaaatgatccaattttggctgttcctggtctgtttgtacagtatctactgggttttcttccagaagccttgtttgttcaacggtatatttttttcttgttactttaatctaaagaatttaagaatgttcacatttttaaacaagtatgctagtttttgctttatttgtttttttgcataagtttgcggataagagcctaaacagtttttcaaattcatcggagaacatacatagaaaaaaaagaagaaaaaaattctgt

SEQ ID NO: 26725 - DNA, 950 bp, Heterodera glycines
  unsure (1)..(950): unsure at all n locations
atttatttgttgtatcgctcgcttacacccacaatgatgcctccttttttgtttcagccgatggcaattgcgtcttttgcactgtccatcgcgtgtccaggaccggccctcaccgcacagcagcggattgtccgtacacattttgtgcatgtgttcaggtgaatgcagaaaactaacaaaaattgggcacttgtaaaaaagagcgaaagtcgtcgttttgaaagcattttattttatttattttttttgttttcctatttaattatcattttttgcagtgttttgtggctgagaagtgtcctttgcttcggggtaatcaatggcgaattttaaagtttttacaaaaccaattttccaatttctcagattaggcaatgcgacactttgtgccgatggattggccaacgaagcaattcgtgccctgcaaaattattgccccttttcattatttatttacaactggcaaacaattttttcttaaattttttttcatttattttgaataaataaaaaggagttttttaatggacatgtgtcagagacgaattactatcaaacgaaggcctaagtgttatgacaaaaataagcaatggggctagtcgatcattcattgttgtcatggtattttggcaatttttcggttcgttttgcagtagttatgagtagggacgcgacttttagtgacgaaaaatcccgaaatagttaactaaaatagtgacgaaaaagtgccaaaaaagtgacaaaatagtgaaaaaagtccgaaatagtgacgaatagtgacataatttttagccaaaaattgagcaaaaaataatttttattcactgattgcagtcccaaatgagctacatttcctttataaaattctcttagcaaatattgacattttttaatcaaaaattttgtcagaaaanattttgggggaggaattntttgaaaaattttcaatt

SEQ ID NO: 26726 - DNA, 894 bp, Heterodera glycines
atatttcacagggacctgccggatccgacggacagcccggaaaccccggggagaacggacagccaggatcgcccggacagctcagccagggcccgcccgtcgttggtccacccggcccatcaggaccccctggccagcccggacagcccggcgagaacggacagcccggccagcctggcaaccccggcccgcaaggacagcccggcgacaacggaggccccggacagcccggcagccccggaggcaacggcgagcccggacagcccggcgggcagggagccggcggacagtgcggtcagtggggcttacaattgcgaaaattcattttgaattaaattttgaattttacgcaaaatttcagatcactgcccaccgccccgtaccgcccccggctactgatcagagtgatcagcagattttctgcggatgtcggatgctttcatcgatattgcttgatggcaatatcgtggcattgaatgaggcatgttcgtcgaccattgaagaatctcggcattagcttatttaaaggaatttttgtatatgatgtgccacattctctctctcttctttctcttttccagggctaatcataagccttcccaaaatggcacataatgttacctttttcggcatttttttgtccaagatttttacgtcttacgatttatgagatgtctctctcgatgatatatactagaatcgtctgcttataaccaagcgattaatccgttgtttaaagtacagagtgataacgtgttatcatcgcatctccatcttttctctataggactttaaaattgcgaaacaggataaaactaggcatccatattcgaccaagatttaaaaaaattaaaattaaaattatttttaaaaatattaattgactctcttttc

SEQ ID NO: 26727 - DNA, 772 bp, Heterodera glycines
caacacagaaaatgtttttcaattacagacattaaggtcaattcacctatcaaagagaaggggccaaacgaagcgatggacacaacgccaacaacagcagcgagcgaaaaaaagcggcgcaaaaattggcgacccatcggaaacaaaaaacggaagagataaaaggcgacaaatgcaggtgaataatacaaataaatgtgcttgaaattgagttaacggcgaagagaaaagcgcccttaaaaaacaaaattaattttaattgaatagaaaaacgaatgaatgccaattagggaaggggggggggtaattagcggacaaaaattgtttggccctcttgaatttattttcaaattgtgcaaaaatccattccaaataagcaaaaataggcggatagtccaacgtccattgggacaaatcggagcgatgccaatcggacattggcaaatggtaagccaaagccatccaattgcggtggaccttcaaacctcagcatttcgaaccttttttcaaatgttaaatgccacctcaaaatcagtggaatggtagcaccgaattaacaaacattttactgcgacaataattaggcaaaaaatgggcacgaaaggatgccgaaacagagagacatctttgttggccattttgcatctcacgatcagcaatactatgcatggacggtaaaaaaagaaaaaagttggaaaaaacgttggcgaaaaaacaaaatgccaattcaaatataaaataaaatatgtaaccataaccaaacgtgttaaag

SEQ ID NO: 26728 - DNA, 981 bp, Heterodera glycines
tggttttggagccccaaatttgggcgatgggaaggtgggccaggcaaaaaacatttagtgggattttaatgagtcatttatttttccaaaaaaatgatcaaaaattattaaggccaaaatcaccacgttatttggaagacgatgtgttcgtgtgcgaatatcagatcgatcggaaccagcgcagctttgagaaaatcccgccgaagaatcgctactacatcaacactgagccatttgtgttcaactttttcgagaagaaattgacgatgaaaagggattttacggtaggtgggtggtggatcggaaagagtacggtagattgacagttatgttgttcaaacattgtaaggattacggtaattaaccgatacggtaaggggttcatgcagcggcgggtgttcacattttcactatgctagcatatgttgtgttcatttagctgacttttccaattgttacagcctttcaaaatcaccgcttcttccaccgaaaacaaaacttcgtcctcatcaactgctagcaggacagactgctgctgcacaacaacatcgccgctgttcaccaacagtctgatcagacaacggattttgcagcagaatttggagtccgtttgctcaaagatcagtgcccaaaaaattgcggttggcattggcaccagcaaaagcattgcttaaccatcatcactgatcagcagcagcagtggccattgatcgactgatcgccctctccggtgtttattctcctcactgtctcctctctcattgcgctctcccaaaaattcttcaactttgcgtgatcctcatcaattctcactctctcacatggcacttttctcgtccatcagtacgtttcgtaattctcccctattgattaatttgatgatcattcctccctttttgatcacttttccccatttttacttcaccaaatctcttttctatcatcgctttttaaacgcattttattcatcccaaagaattg

SEQ ID NO: 26729 - DNA, 912 bp, Heterodera glycines
ttccgagtcccgaaaaaaaatcgaggtcccggtcccggcttctcaggtcccggcaagtcccggtcccggttttgcccaaaattcccggtcccggcttctcaggtcccagcaagtcccggtcccggttttgcccaaaattcccggtcccggcttctcaggtcccggttttgcccaaaattcccggtcccggcttctaaggtcccggcaagtcccggtcccggttttgcccaaaattcccggtcccggcttctcaggtcccggcaagtcccggtctcggttttgcccaaaattcccggtcccggcttctcaggtcccggcaagtcccggtcccggttttgcccaaaattcccggtcccggcttctcaggtcccggttttgcccaaaattcccggtcccggcttctaaggtcccggcaagtcccggtcccggttttgcccaaaattcccggtcccggcttctcaggtcccggcaagtcccggtcccggttttgcccaaaattcccggtcccggcttctcaggtcccggcaagtcccggtcccggttttgcccaaaattcccggtcccggcttctcaggtcccggcaagtccggtcccggttttgcccaaaattcccggtcccgctgcactctacaaaatacaaaaattatgttctttcaaaaatttcttattacaaaattccattttttttttcaaaacatagagaaatgttagcaaaatcactaaatttttggttgaaaataaaaaaagaataatgtgtttcagatttttagatactcgaaatactgattttttgggtgtagataaacttttgaccatgaccgtatccgtacataatgatcgatcatttttggttagcaaaaattcgttcacttttcttccacagggctcgggatttattttacaatcgtctaa

SEQ ID NO: 26730 - DNA, 877 bp, Heterodera glycines
  unsure (1)..(877): unsure at all n locations
aagcctaattacagagtgtgtttttgctcttttatcaaacacaattaccaaaactttgttacgaccgggggcaccccaaaacgtcgccggccggaacgtcgccggaagactttttggaccataactttgttcattgtaaatcaaattaagcattcttggtgttgttcgatagctttatgtgtttactattaataggctaaatttaaaaaattttcgttaagtttcaaaaaagttatggccagaaggaactcaaaaacctagtatttcgaacttttttgctctgattttttttgtacattaataaaaaaaattttgaaaaatttgtagattaatagagtttttcataaactttggaacaataccaagaatatttaatatggttgagtaggaaaaaagttatggtccaaaaattcgcccgacgacgtttcggctggcgacgttttttcctgatccggttacgaccatgaatagaaaaaacagtaatttcccccgttgttctagcctcgcgctgtctacgccaatgacgaattcagagcgacgacggttctatatacatcaccgttttcgtttttggtggcgtcccagaaggaacagaagtgaagacgaacgtccagaaacagacgtttacagtgacccacgcttatggaataaagaagacggagaagcaatacgaattgtccagcgaattttgccatcccaatatgaagtgagttcttttcaggttataaaccacgcttatggaataaagaagacggagaagcaatacgaattgtccagcgaattttgccatcccaatatgaagtgagttcttttcaggttataaacaaaagtggatggngaaacccctactcnaaaaaaaaatttttaaaacaagaca

SEQ ID NO: 26731 - DNA, 979 bp, Heterodera glycines
  unsure (1)..(979): unsure at all n locations
ccggggatctcgggttccggggggagtatggtcgcaaggctgaaacttaaaggaattgacggaagggcaccaccaggagtggagcctgcggcttaatttgactcaacacggggaaacttaccaggtccagacatagtaaggattgacagattgagagctctttcttgattctatgggtggtggtgcatggccgttcttagttggtggagtgatttgtctggttaattccgttaacgaacgagacctccgcgtgctaaatagtctcgcttacaattttttgtaggttttgagacttcttagagggacttttgggtaatcaaaccaaaggaagttggaggcaataacaggtctgtgatgcccttagatgtccggggctgcacgcgcgctacactgatgcgttcaacgagtttacaaccttgatcgataggtctgggtaatcttttgaatgcgcatcgtgctagggatagattgttgcaattttcaatcttgaacgaggaattcctagtaaacgcaagtcatcagcttgcattgattacgtccctgccctttgtacacaccgcccgtcgcacctaccgattgaatgactcggtgaaaaattgggactgtgaactcgtttgcttcattgcgaatgaattcgtgggaactttttttaacctcgccatttagaggaaggtgaagtcgtaacaaggtttccgtaggtgaacctgcggaaggatcattaccacacctaaaaaacttccatgtgaaccgttctacttgttttgtgcgcgactgcgaaagcagaagtgctgaacgaaggttaatgttggcgcaagctagcattggctgatgaacttttanacccctttatacctaattactgataaatactctaggaacgannagtcttagttttaattagacaaacactttcagcagtggatgtctaggctcgcacatcgatgaagaacgctgcgaactgcgatacgtaatgcgaatt

SEQ ID NO: 26732 - DNA, 951 bp, Heterodera glycines
  unsure (1)..(951): unsure at all n locations
tttcagtaaattaaacgaaatttaaatggccaaataaataattacaaaaatgaagaccccacggctttcctagaatttagagatgcattcaaaatttggcgtttgctttatcctcctttttgtcatcgcttgggcaattgctgctccgaaaaagggctcacaagttgaaaacacatggcgtagaggtgtaactgcaaagaaaacatcagcaaaaagtgccagcgaaatgtccgaccgacgacgggcggcgaatgcgccagcagaaacgtctcgtaggccaacagaaaatgatgacaccgcttcaaagcagcggctggcgggcaaaagtgccagtcagcgagcagcggctaacagttttatgagtttatccgaggaaagggatgaagccgaacagagtgggcaccaatcgcagacgccgagcaaaaggcaacgcttggtcaaagcggtgaataagcagcagaaacaaccgaagaagccggagacgccacgccggaagctgatactttacagcagcgatgaggaggacgagcagatgccgcagaggacactttctgctacagggagcacaccaaacaatttgtcatccgccgccaatgcttcggtgccgttgtcttcccgtcgcatggacaactcatcgtcggcacaaaaggaggaccagcagcaaatgggagatgatcatattaggttgttgaatatgttctgtggtagtgactaaaaactttacatataaaatcataactattaaagtaataataatcattattaataataataataataatttaatttgtcagattatttttaaaaatatttctctatcttttcgcanagttaccagtttcttctcatagttgccaataaaattgatgaacaaacattattcgaaccctaattgtttaattgaagaaaataaaaagcaaacttgatgaataatttagcatggaatgaaat

SEQ ID NO: 26733 - DNA, 611 bp, Heterodera glycines
attcagaaggcatccttcctagtttgtgcatttgaaccggtttcttgcatatttcgtaatttttcgaaaattgaattttcgaatttttattcgaatccgggtcaggggttcgaaatgggccgaaatagatgttcgaatcgtattctacgacccagaaagtccattaaacggtactcattgggtttgggtccgcttttttggtcgaaatttttcaaagtgtatacatgaacaggataaacagtggactatgtccctgctgacactccttgatacttaactggcgagctaggacaagaacgggccctaccgcgtcggctcatcacggccacggatgtagcagcaagtacaaacacaccgctagttacggcacgtaagaccgtgaacgaaaccaccatccccaggcatgaggtatgtgcctgctacaacaaccgctcaacgacgcacagatgccagcacaggcggtaggacgccccacgagcgtgtatcccacattggcgcagtgaaccaaccaagcgaggtggtccgccaccgacacattgcctacctggcagccatacacaggctttcacatgtgcagcactgagcggtataccacagctccaacgtatgga

SEQ ID NO: 26734 - DNA, 316 bp, Heterodera glycines
gtttgttcatcccattcaaattgcaattaatttaggccgctgtctctaccatcagatcaaagcgacggaaaagtgttctcgagtctcgccgggcccagtgatcagcggaagaagaagaagtgaccattcgagaaatgaccgatcattatgaattttatgctgattaatgttgactattcttttgttctttgagctgttctctttctttgattttttgcgtccaaatgctttttttgaagaaaaaaaattctgatatcaatttattatggaaatacaaatttttttggaatatgtatgggcacaagggcgtaggcag

SEQ ID NO: 26735 - DNA, 877 bp, Heterodera glycines
acggactgacgatgattttgtattaggaaaatttgagaaattttggtcgaagtttttccgttttcaaaaattgccggcagaaaatccggcatatgccgagaaaataaaacccagattccggacagagctccggaaaaattggcgatcggaatttggcttaaatgcatttttagtgccatttttgcaaaaataaagcgtcgccggctttttagcagcccatttttgaacagaaattggctccaaaaatgaaaatttctataatttttgatcaaatcaaccgcattaaagagaaataaaattcagaaaattatgcatcgcgacgtgaagccgtccaacattctgttggactggctgggaaacgtcaaactgtgcgactttggcatcagtggcaaactgatcgagtcaaaaggtagggaacatttttgttcgtcattccccgccatcacttttctccaaattctttctttagcatctacaaagacaggctgtaccggctatttggcggtgcgtttattttttttaatttaaaaaatcatctaatttaagcccgaacgtgtgaacatctacagcgactcgtccggccaatacgatgtgcgggccgatgtttggtcagttggttgattgaaacaacagaattatgctcctaataaagcatcttcccattttcgccaaatatttcttcaaatattttttgttccaattttttattagctgcagcaaattgagcagtttcggtgatcaaaaacataattaaaatgaataataataaatttattttcatttttaaatggttgtacaatttcaaatcggtttctaccagggcccagggctaaaaatgcagcaaaaaaaaagttaaaaactaaaaatccgggcccta

SEQ ID NO: 26736 - DNA, 1009 bp, Heterodera glycines
  unsure (1)..(1009): unsure at all n locations
cgaaaattgtgaagatcaccgaatggcggtagggaatggcaaacattattgtctgagctaataatgagctatattaacccaatgccccacttaaaattcaaatcatcaatttgtattttttaaatatagatataatttatatatcaaaaatattttattttttcattttttaaaaataattcaacttttatatggcctagtggataattctggcccagtatagaaatttcgtcgttccgggccagggattgacgaaatttcgtttcgttttcgtttcgtactatattttaggcactttttgagtttcgttttcgtgttttcttttcgtccaccaaagagcttttggaagatttttttaaattttctaacgaactatttatccctcggtgctcctgtctttgtcattttctggaccaattctagcagagtcattattttcccagctcttttttgtgcccctttctcgagtcagttttattggtttttcttcgctgatttatagggtatcgctctcgggaatgcgaatgcctattcccggctcaattccccggcaaaaaattattcctcgcacatccctcttctcttcggcggacaatcacaagacaaacccgggggttggtgttaaggcgccgatggcgaaggtgaccacgttagtcaactgcaaaaatgaaaaatgagtaaattttaaatagcatatttcctaaaatagagccgacccccctaaattagagtccccgtgaaatagagccccagggggtttgaaaaattgagtcctacccccaccaagctttatcccccattanaggngattgaacatttgtgccccctgttatccaattaatttctcgctgtttatgctgtcttggatcgaaaaacgtggcatttgaaacaaattttgggcaacacccaaaatgccgggggaaacggtgccaaaaccgtacccatcacnaagtattggaccagaggnataattgtggattttgagcaatagaaatttatttatttttta

SEQ ID NO: 26737 - DNA, 1133 bp, Heterodera glycines
aaagaatcatttaaaaaattgtacacgtttatggaaattttttaaattgtaaataaaatttttaatgccatttttaattgaaggtgtgccctcctcaatggacactttcattggactgatcgacgcagtggcaagcgtaaaacggcacattgagaacgagacgaagcagcaacagcaacaacagcagcacaaacagaagcaatcggtggtcaccaaatccaattcgaacgcatccaaagagagcagcagcttaagcgtggtaaaagcggcgcaaaatttaattaaaaaatatttaaatttttattttaaaaaactttaaaaattatttaatttaaaagatttattttaaagtaattagaaatgcacagtaaaaacattttattttcaactgataataataaaaagatgaattttttttttctcgaattttagactttaaatatttttttttggtttttactttttatcaacaaattttcgactttcgactaattgtatattttttcaagttttaatcgctcaatatctttagactaaacatacatacataagagatacgaaaaaaagacaataaaaactaaagccaaataaattttactcccatttgagaattttttgtaattttgtttaaatttgccaaaaaaatattagtaaaataatcgaatcttttcctcttgcatattatcttatctatcctattgtttagtgtgcttatgttcactttaaaaagaattattgtattttatatacagatacatattttggtgattaaaatttgttaaaaaataaacaaaaatatttaattaatgtaggaaaaatttaaaaaattaaaaatggcaattttcaaaaacagttaaaaatgtttcagtccagcgacacttcaaaaagggatcggacacaatcggcgaacagtgaaaatgggtggacaaagaaattgcgatttgaatcgcacaacaacaacgagaacaacaacaaggaacagaaacaacaacagcgccagtcctccgcctcttcttcatgttcatcgacggaagggtgggaaaaatgaatggaaattattgaaaattaaatttgaaattatatgacaaaaaacaattaaaaggtgggtctgtgaaattaggaaaaaatctgat

SEQ ID NO: 26738 - DNA, 872 bp, Heterodera glycines
cgcaacagtaacgtacagatttggctgttgtcccgcttgtcccacacccgaaagctgctcgggtagccgacaaacagacgcccgccggcaatcttcaagcattgcggttggcccggcattgccatctcgcgcagcggtttgtgacgtcgctctttccgattgatttggaacaccatcacacttttgaggatggcacaggcaaagtagtgttggccaagctgtgctccatgcggcgcggtgctcggcgaatggccgcgtcctgcgcgaattggcataatttaatttaaaaaattaaatttgctaattacgcgaaaaacgcgagactttcaaagtttgtgacaaggtcccgcgaacatagaagaaaataataaatatttttttaaagattttaaaagaattataagatttgaaatcatatgaagagaaaatagtgattttactgttttttaataatttctagggtttttctgagtttttgaaaaattttagattttttgggttagataaaaaatccttaagtccccttttctgaaaaattcattagttttggtgtttttataatgaattctcagaggaaaacgatgtgggggtgggggtgggggaaggaacgtcctgctccgcccatggacgacgataccgggtccccgtggaccgatcatttttgagaggggggagggaaccaagacatggagggatctggataaaccgaaatatttatcaaatcaaagcatcactttccaatgtggcttacaattaaatgattttaaatcaattttcttggcaataaacaacacccaccccaacaaagcaaatggcatcccctggtctcggccactttgatccacttcaggtcacgcccgtccagcgcagcg

SEQ ID NO: 26739 - DNA, 917 bp, Heterodera glycines
  unsure (1)..(917): unsure at all n locations
tcataaaataatcgcatatttttancaatttggattaaaattaaataaatatttaggctaaggaaaatttggtggatgcagtgattgatgggatgaaagttcgtgtggattattcggtgacgcgcggcggtggaccacagtaagttgggggaaatgggtactgtaaataggcacaaaccaaccaaacccattgttgacaaaatttgatgtctttttggtcagtcctaaccaccaaaactccttggctttccaatttgatcccaacccaatttattgtccccaaattccatggggttttctaacaaagccaaaacccaataataattgtatgtgtcgcgatggaaatgaaattccgtcgcattgcgttaaataataataatttgctctcccccctccttctcccctttttgtagccgtcatgtgcgcaaaagcttctcgcgcagtccggtgcgcaacaaccgtagccgcacgcgcagccgttcccggtccgagtcgcggtcggtgtcgcgttagaatggtgaaaagtgctaatggtttggagaaatgaatgaatgatggaggaggatgaattgattgattgacaatgattttgatccgctttttgtggtttatttattattggtctgtcgaatcataaagaacacataacgtatgcacagaataattgtcgtctgataatttttgtttattctcccttcacttttaaatatttaataattttacccgatacttttgggttttctatgaagttttggttattatcttgggcatggcttcattttactagcattttcaagctaaaaatgggtctgttctgcagttcacaagatttttcctcgatttactagtgacaaagtacttttaaaatttgngagaaaccaataatgatcttatgcaaaaatcaatacaattgcacg

SEQ ID NO: 26740 - DNA, 696 bp, Heterodera glycines
aaatttcaaaaatttcgttaagtttcaaaaaagttaccgttcgaggaactcaaaaaaccttgattttcgaacatttttggccataactttttttaaacttaacatttagatctatcgaatgatagcaaggattaaaaatttggtctttttagagcaaagttataagcaaaaattttcattatgatggttttttaagtaacgcccattatgatggtttttaagtaatgacatagcaccctaataaagtactgcgcttctattttggtctcgtcaaaaattagtgttaatttccctgtgttggaaaaatgtggttggtgattctggaaaaatctggccttaattatgggatgatttttgccgtttttaatgaacattttgactcagtttttagtgtttcacattctttttttatttataagaatggaaaaaagcaaattatttttatactttccttcatttagaaatttgacgtttccctcttttgaaaagtagattttctaagttttaagggcttatttggaactcgagcttgaagaaattgtactctttaaaaactatttttggtctttgcatacaacgtgttcgactttcgaaaaagataaaagtgagcatgaaaagtggatccgccgcattcttaccatatctttcttggaactatttttaagaggctttttggctcccctaggtaaatatttt

SEQ ID NO: 26741 - DNA, 1006 bp, Heterodera glycines
tctcctccgagtaaaattgtagggctattgaaacctctattgaacggtgtactacttactatatataggttgtgagaataataatttaaaaaggcagccaaaaaacatgtgtttgctccttgattctaaaaaaccccagattagttttggcgaattggtgctttttttgcgttttttccgaaaaattccattaaaaattcaatgaaatcgggaaaataaacacctaagaaatgctctaaaaaatttttagaaaatataccattaagaattgaaaaattttctcaaaaattgttcgccaaaattcattttttttcttcataaaaacttttaggtttataaacttcctattgaaaatcattataaaatattaatattcatttaaatgatcaaaattccggcggtgccgataggcgccgccgggaaatttttttgtaattttaatgctatttgttagcagattttgtctaaaaaataccaaattttgagattttgggctaatttttttaagaaaagataggttttggtggggggccggcggtgccgataggcgccgccgtgggaaaattttaagaatttttaatgaattttgttaaaaaatggccaactgatttttcataaaagtcggtcgattgtttcggttttttgattatttcggtcgaacggtttcggttaaaaatcgaaaaaaaccgaaaccgaaaaaaaaccgaaaaactaaaaaatttctcggtcggtttttttcggtcaaaaaccgaaaccgaaaatcgaaaaataccgaaaaacccgaaaaaaacccgaccggtccgatctctaccaaaaattcgtccgtgacgtttcggccgacgattttttgtcctgctccgtggtttttagtgatatatcttaaattaaatttgatacccaattgttggcattaaaatattgaatattgacaaaattctttgaaattttacaggctaataaaaaatttgttaaggctaccatatgatatcatgaatttaaaatttta

SEQ ID NO: 26742 - DNA, 286 bp, Heterodera glycines
tataataacgctgcggacatctacatttttgaattgaaaaaaaattggtaattactctttctttttctccatattgaccatcatactcatactccccccacccttttcttcttccgccacccacctcccccgctacgcgccgctcccctccccttcgtgctcctctctgtaccgatgaatggggcgaggaaacgacaatctgatccccatcaagctagcttctgcaggtcctgctcgagcggccgcccggggatcgatccccgatctagtaacatagatgacaccg

SEQ ID NO: 26743 - DNA, 755 bp, Heterodera glycines
aaaaatatccatagttcttaaatcacatatgtgcagcactcatagcatagaaatcttatctcagcaactcataatatctttagagatgggcatatgaataaaagtgcatacatttatatatttataaatatacattgacacataataattttctccttaaatatacacattagaaggaatatgcaaaaaatatccatattcttaaaaatacacatatgtgtaggcagcaaacgtatgcatagaaatcttatcttagtaactcataatattcatagagatgggcatatgaataaaagtgcatacatttatatatttataaatatacaaagtgcaccttcataaatatacacatgcgcaggaatatgtataaaaatatcatattcttaaatatacatatatgtgtaggaatacatatgcatagaaatcttatcttagtaactcataatattcatagagatggaaatatgaataaaagtgcatacatttctatatttataaatatacatttacaaatgaggggtcaatttcgtaaatcgtacggggtccgaggcaatttcgtaaaaatttcggctaaaatcaaaaaagctctggtaaagatgggaaaattttacgaaattgaaaaaaaaaatttaaatttgtgccaaaaacccaaaatttttacgattttgaattgcatttcgttaaaattttttcgaaattctatttcctttttcgtaaattttttacgaatgaatttcgttttcctttttcgtaaa

SEQ ID NO: 26744 - DNA, 715 bp, Heterodera glycines
  unsure (1)..(715): unsure at all n locations
atttccaattgttcaaatgaaagatcggttaagtctttattgtgtatataagctaaaaaaacaattttccatcaaattttttccaatttgttctttttgcttccatcttttgacccgtccactttctattgcggtttcggttttcccttgccgcttttctttttctttccaaataactgaggcagcgagaagcgagaagtactgctttcggcggtcttaaacttcaatttatatttgcaaaattaaaattttttgttgtttacgacggcagatgtcttcgagacagtgcgagcgcggctggtatcgccgggagaagaacgacgtgcggcgggcttaaactccagtttacatacgtaaattaagcattttatttttacgccagcagatttcttcgagacagtgcgagcgcggctggctccgccgggaggagaacgacgctcagcgggcttaaactccagtttacatacgtaaattaagcattttattttcacgctggcggatttctccgagacagtgcgagcgcggctggctccgccgggaggagaacgacgctcagcgggcttaaactccagtttaatatgtaaattaagcattttattttcacgctggcagatgtcttcgagacagtgcgagcgcggctggctccgccgngaggagaacgacgctcagcgngcttaactccagtttacatacgtnaattaagcattttattttt

SEQ ID NO: 26745 - DNA, 1188 bp, Heterodera glycines
agaacgctttaaagcagattttgcccactaaaaggaaatacatgcttttcataatctttttatttaaattaataaaaaaatttcgaaatgttctgattttttgcattaactgtcccaactttagtctttttttgcggggggcgggggcgggggagaattagagttgctccagagcagaaaatctatatttcaaaaacgaaatccgaaaaaatccatgtatttgcattttttttataaaagtaaacatatgtatatgcatgtccacaaagtaagcggatttcaccgttttattttatttattgacgaaaaaaaaattattcattttgtctgtcattttgttataatgtataattaaattccatattttttgaataatattaattaaataatttccaaatttttttgaaacacaattttaaatgcctcattttaatatgtgtcgtttagctgacctttaattaaaagttttaggcttttgcctaaaaatgtaatccctagttgctatggtgtaactcagagctgtgatctcaaaattttgaaaatcctcatttcagccgtaaaaatcctcatttgccactaaaatacctcaaaaaaatcatcatttggcatgaaaaattctcattttttaaaacatcataaaatgcatacaaaatcagttagctgtcatatttttcatttgaaacaatcaaattcatcaatttcttgtcatttataagcattttatggaagtctgagcacgaaaaatcgaagttgcacttcacttgggccaatgctttcactgtgtccatgtgtaatgaattctgtttatctgtccactgagacccacaaaaaaattgtttttttttgtggcacggttttccaaaaaactttttggaaacattgggggagggagtccggacagtgccgataggcactgccggaaaaaatttggaattttgagtgcgatttgttaacaaattttgtcaaaaaaaaatgattttgactgaggatttttcgaaaaaatgtttaaagatttgaagaaaaagttcgaagattttgccaaatatgcctaatttttcaaaaaattatgcgtttttgtcacttttttatcaaaagaccacaaaaatacgcaaatcctcatttttcaaaaaaatcctctttgaccctctaaaagacgaccacaaaatgtgtaaaaatactcagatatca

SEQ ID NO: 26746 - DNA, 420 bp, Heterodera glycines
ccttttgttttgcaaaattttttttgtgatagtcataaaaatttattctttggggtttttggggtccccgatcacgaatccttcaattattttgatcaattccgatttcctaatctaaatttgaacaaaaaatcataattttaaaaattcaaaatttcgatttctattcgagttcgggttagggattagaaattagtcaaaatacatgtcagattcgtgattagcgacctttaaaaccccggataaaaaattatcatggttttttatcttaaaaaaattttgcaaaacaaaagggtccccccttttgtttcaaaaactgtcactttccatatagtgccgaaatcattatcaatgaatgacttttgattgataaacctaatgaatgcaaattcagcgcggacaacaggtggaggcgcattg

SEQ ID NO: 26747 - DNA, 1373 bp, Heterodera glycines
  unsure (1)..(1373): unsure at all n locations
catatgctttaccttgttcgtctgctgttgtgacgactgtgcactggcggtgttcacatgtccgccatggcacaaataaagcgacgaggcgaggctggccgagcagtccaacgggcatttgtcccgcttctccagtgacagcaaatttggacacgcgtccagccgaataagcaactgaaatgatgcttttcaattgtcaacaatctgctgtataataatgctatgtgagaccctttctaaaagcaaatttgttgaaaacatttaatattttttaattttctgtgccgcaccgttctcagccatcctgggaattgcgcggcacgttcgcatgcctccacactgaagcgcacccgtcggttggtatatttgaatttgagcagcatctgcagcggcactttgctgttccgatcggcgcccaccaacaggttgatcaactcgcggacgccacgcgtgccgaggccggccgcgcacgcgagcaagtccttgaccagcgtactgatcgcatgcggcaacggagaggacgcgtaaaaggcggggagcgcgcgcactttgtccgcgatgagaaatggaccgcaaaagcaattggcactcaaataaatggggggcagccacaggtcagctgcaaaatgggtacaacaagcataaattatgaaattattccatttcctcatctaaattcaacccaaaaattacggtaaacactatttttagtgctgcttagccggggagcagttcatttatcccctcccataaaaagtttcctaaaaatttttcaaactttgaaagattaaaagatcatagaaaattctaatataagaaaaatcaagaaattttttaaattttttttttagtttttatgattctcttatgcaaaaattctatggtttttaaaaattttccaagtttgaaacttttaaaaaaaattcggggtgggatgtagtacggcttacaattttccacctttgtcaaccattttcatccctttgaatgcccatttttaattgcgactttggccacttgcctttgagccacatttcgctgagaaatggcttttgccgaggcagaaacaccggcgtccgttgggaagtgaacgtccggaggaggttgcgaccacaattggcactcagtgcggtgggaatgcgaattggcatagtgaaatagcgcaggagggcggcggcggcagcaaatggggcggcgccggacgcacttttggcagtgccgcaacggaacaattggggagaactgaagacggaatggaccggtaaacgtcaaaaaggttttcattttttaattttgaagcaaaaaacggctctaaactttcaaatttctcggcggcgcctanaaatttggatgccacggcatcanatctgact

SEQ ID NO: 26748 - DNA, 950 bp, Heterodera glycines
accaagaagaggagcattcaaaacgattgagcgaagaggttgaacttgtcaaaatgttgatgaatccggttgcagccacaagcagtgaaaatagcaaaactgcggttggcttcaaacggaatcaaaaaaccacacaaatttcaaggcattgtcaaaaggatgcaaaacaacgaaatttaacgctgatgagaataaatgtaatgacaaagatggagagcaaaacaacgattacggtagtgaagcggaaaaaggcggtgatactgtagaggaaaatcaaatcgaaacggaacaacaaattgaaaatgacgatgacaaacagcagcaaatggaagcagtaaatggagaacatattgcaacacaagtgtgtgttgaatgcgttgggaaaatcctaaattatttttgtcttaccatgtaaatttgttcgaaaaatatttaagaaaaaattttgtttgcaagcattatgatgggatgaaaattgaaaaagctttgacattaacgaaaaaaaatcttacagagtcctcctcctcctcctcctcctggtgttgatgaaaatacacccgaacctccacaaatcgacccaagtgattgtgccaaaaattatgatggcatttcactctcagaacaatttggggagcagaatggtggacaaatggaaaaggaaaatggtgagtgagctttaacatttataaccaaacaaaaaatatttatgttttaaattctaattacaattattatatttaatagtccagtcaacgtcgtcacctacaactagcagccatccacaacgtacaaatgaagttgattcattaacaataatcgatgatggacaatttattgcattggtatgttagccgttggggataattattgtagattttttcattatgttttgtcctagaaatgcaaagccaaatgttttattgttcttcgaaaaatcatcaatttaaatt

SEQ ID NO: 26749 - DNA, 847 bp, Heterodera glycines
ttttacagaaaagttttcctaaccttctaggatttttttcgaaaattttcctgatttcaagccatttttggcttttcagatcaccatgaaggagtgatctgaccaagttggtgtaaaagactttttttgatcagtagcaaaagttagcttagcaagaatttctcagaattgtttctctgcataaaatgatttttcatcgattaaaaattattttccatacttttgcacctgactgtataattttaactagtgacaggacaggatcggaatgacgcggattaaattcgggattcgtccttttttaaatttatcgggatccctcccggacatttgccaattggtacttatgtagcttaaagggcacttcccacatggattttaaataccctataagtatactttatgcctaattttcgtttaccattaaaaatatatttattattttttttaattcgatttttagaaagattcaaatacagagaacagtaccgaaatgctcaaatataattaattttatgagctgcttgtgtgaaagacagtatttttttatgacaacaaataatttcaaaaatttcaacttgcaatgaatgaaatttttaccttttaattgtttgttcttttcttatttcggatttcctgataatttaggtatgacaaaaccattacataaaacatccatgagctgatcagcagacatttccttctcacttttcgtccgtcgtcagcgatcattcaaaacgtgacaaaaagacgggggggggcgaggaaatgggcgagagatgaaaatgatcgaacgaaaaacaaacaaaatgaaaaaactaattaactgtccaacactcaaaaagca

SEQ ID NO: 26750 - DNA, 1241 bp, Heterodera glycines
aacgaactgattttatggccactttctataaaggcgatgtgcggtcgctgtatgaccgtaaacccagttttttgtatagaaaagggttgtcctaattgcaaatggatacagtatctgatttatttcacaacgccaacacgccgttgaaaataaaaacacaagttgcatgcgatggcaaaagttgtgaaattcaaacgcattttacggccatgaattgccgggaagtgaggcgatcaaaattcataatgatagagaatgtgtggctttacctgttttgaagctaagtcggggatctgacggctaatatgagaataaagtgcagttctctctttaaacgaactgattttatggccactttctataaaggcgatggcggtcgctgtatgaccgtaaacccagttttttgtatagaaaagggttgtccaaattgcaaaaggatacagtatctgatttatttcacaacgccaacacgccgttgaaaataaaaacacaagttgcatgtgatggcaaaagttgtgaaattcaaacgcattttacggccatgaattgccgggaagtgaggcgatcaaaattcataatgatagagaatgtgtggctttaactgttttgaagctaagtcgggcatctgacggctaatatgagaataaagtgcagttctctctttaaacgaactgattttatggccactttctataaaggcgatggcggtcgctgtatgaccgtaaacccagttttttgtatagaaaagggttgtccaaattgcaaatggatacagtatctgatttaattcacaacgccaacacgccgtttaaaataaaaacacaagttgcatgtgatggcaaaagttgtgaaattcaaacgcattttacggccatgaattgccgggaagtgaggcgatcaaaattcataatgatagagaatgtgtggctttacctgttttgaagctaagtcggggatctgacggctaatatgagaataaagtgcagttctctctttaaacgaactgattttatggccactttctataaaggcgatggcggtcgctgtatgaccgtaaacccagttttttgtatagaaaagggttgtccaaattgcaaatggatacagtatctgatttatttcacaacgccaacacgccgtttaaatagaacacaagttgcatgtgatggcaaaagttgtgaaatcaaacgcatgttacggccatgaattgccgggaagtgaggcgatcaaattcataatga

SEQ ID NO: 26751 - DNA, 1023 bp, Heterodera glycines
  unsure (1)..(1023): unsure at all n locations
caagaaaacccgcataaagtaggccaatttttgtcttttatgaaattcactaacgcaaaaagtcgtcaaaaactaataaaacggagatttaattttgttccagaattttcgttctttgccctatttttaaggttgtattcaaaaaaagttgctcataataaaggccatttcttttgctttatgaaagtttatatttgcaattatacatgcacttttgctccataattttataacgattatataatttagagctctaaatttcaagaaaaccgcataaagtaggcaaatttttttttgacttttatgaaattcactaacgcaaaagtcgtacaaaaactaataaaacggagatttaattttgttccagaattttcgttctttgccctatttttaaggtttgtatttcaaaaaagttgctcataataaaggccatttcttttgctttatgaaagtttatatttgcaatttacatgcacttttgctccataatttataacggttatataatttatagctctaaatttcaagaaaaccgcataaagtaggccaatttttgacttttatgaaattcactaacgcaaaagtcgtacaaaaactaataaaacggagatttaattttgttccagaattttcgttctttgccctatttttaaggtttgtatttcaaaaaagttgctcataataaaggccatttcttttgctttatgaaagtttatatttgcaattatacatgcacttttgctccataattttataacgattatataatttagagctctaaatttcaagaaaaccgcataaagtaggccaatttttgacttttattaaattcactaacgcaaaagtcgtacaaaaactaataaaacggagatttaattttgttccagaattttcgttctttgccctatttttaaggtttgtatttcaaaaaagttgctcataataaaggccatttcttttgctttatgaaagtttatatttgcaattatacatgcacttttgctccataanttaattttataa

SEQ ID NO: 26752 - DNA, 862 bp, Heterodera glycines
caactctatggatgcaaatagtcgaatttattacacaaatatatcactagcatagaagctataaaatttattgttctcttatcgtataaatatgcaaataatacagtctgttttttaattcggagctcaactctatggctgaaaatagtcgaatttattacacaaatatatcactagcataaaagctataaaatttatttgttctcttatcgtataaatatgcaaataatacagtcagttttttaattcggctcaactctatggctgaaaatagtcgcatttattacacaaatatatcactagcatagaagctataaaatttattttttctcttatcgtataaatatgcaaatcatacagtctgttttttaattcggagctcaaatggctgtaaatagtcgcatttattacacaaatatgccactagcatagaagctataaaatttatttgttctcttatcgtataaatatgcaaatcatacagtttttttaataaggagccaactctatggctgaaaatagtcgaatttattacacaaatatatcactagcatagaagctataaaatttatttgttctcttatcgtataaataagcaaatcatacagtctgttttttaattcggagctcaactctatggatgaaaatagtcgaatttattacacaaatatgccactagcatagaagctataaaatttatttgttctcttatcgtataaatatgcaaatcatacagtagttttttaattcggggcccaactctatgtgtgaaaatagtcaaatttattacacaaatatatcactaacatagaagctataaaatttatgtgctctcatatcgtataaatatgcaaatcataca

SEQ ID NO: 26753 - DNA, 891 bp, Heterodera glycines
  unsure (1)..(891): unsure at all n locations
tattttcactggggagtcagttgtcccagtgcctagatggtatcggttcgaatttataccttgttttttagacttatctgatcaagggctttcgaatgataccaaatttatccgaatttgaccgttttaaagggtcaagggccccccttttcacccaatttttcgagttttaaaccggttcaaaaaccggttttttggcatttccgcaactcgagagatatttttccgtgcttagcttctcgagacgaatcgattggtatatcatttgaccctttttttcacggggcgttcactacattttatccaaaattttaaatcctaaataaacttttaaaaattccttgaaaataaggcttgatttgaattatatagctagaaattttattgattggtttagatgtttgcaattactaaaacagcgaaaggcgccgacctgcttattcatcataatggctacaattattataaatcacgttgcgtgggaaatttcaatgggaaaagctcagggacatcacttaaatttggatgggaataatgctgataaatgctgatcacttcttcaattgttaacacaccagttggaactgaaatttgattgaaatggataattaattaattagcaaattaattcattatgaaatggatcattagtagagatatgtcttgatctggggcctttttgaaaactattaacgatatatttgtcgttaggatatgtcgtttatgaagaaattttttaaataaaaatataaagaaatgttgtttagcattaaatgtaacaaacaaatcaggtaaaaaaaagttttagaattagatagtacaaatacaggttagatttttattccattctganatttttattttttagatttaagaataatggtanatata

SEQ ID NO: 26754 - DNA, 1641 bp, Heterodera glycines
acgaaaaatgaaattgaaattttgcagaagttaaaaaaaagtgagtcaatggagaaaaaagcgaaaacgaaatatttttgaattttgcactgactgttaaaaattaaaaagtcaattaaataaataccgttttttaacaaagcaaagaatgggtccaatggatggccaatgtttgcggaaaaagttaagacgcaaagacaaatattcttaatgaatgaactttggcctcggccaatcaaagggccaaaaatgaaatgcctttttatccgattggccaattgaaattcgaacgttaaaaaagtggggggggggaaatcggcggcgacggattggccaattcgagtggcatttgccattgagagaaggcaaaggaacggacaaatgagcagctttcgtccgtttcgctatttgtcccttccgtttgccttccccgaggtgccactcgacggagtgcaaagatcgttcattcatttctttcgctttgcttttgtttgcccaattctttgtgccattgctttgtttttcaaaatgaattggattttgaaattaatcttttcataaattggccgcaaaattttgtttcttttaattttttcgttattttaagaatttatacgcaaatgaatggtcattttcaatttgctattttaattaattacttccgcacaaaaattgacagaaaaagggagggggaaaattaattatttttttttgtttactcaaaaagggaaacttttttatggtcataaattctgtcggtgtcaaaataaatttccatccgtcgctttttttacgttttgtgaaaataattccctttaaaccaatttattgtttaatatactctatttttgtttatattcgttgtaaaagtgaggaagatttttgatgtttttcattagaaagaatttggggcaaatgaaaaaaaattataaattgaaaatgataacatttattatgtatattaattaataattaagtaacatttagtcgaattcaaatgcattaattaattgaaattaatttaataaatcaattaaattctcatttcaccattttccatttctttttttcacctttaatccgcagaaaacagctgaaaaaagtgagcaaaaacgacttcagcaaatgaacagaaaaagtgaaaacttttggcatttcttttggcatttcgttggtttggccttctgaacattttcatttttattatattacaaaaaatttgaccaaagcaaaaaaagagggaaaataaaagaaaatttgtaatggaaaaagaaagaattatccgggaaaatatggccaatttcgccgaaaggaaagggacaattgtaaatgagggcaataaaagggccaatttgggcgaaggattggcaattaaaagaaacggcagacaataaaaggcacaacatttgcacaaaaagtgataatttatcaaacaaacaaaaatatcaccaaaaaataatttaaaaattcgtttattaaaaagaaaaaataaaacgaacaaaagaaaatgaagaaaagaagaaaggaaggaaaaggaagataaaagaaaggactagggaaaagtgatcagtgaaaaggccgaagagcgatcagtgcggcgacggaaggatttacaaaagagactccgacaaagtctgaaag

SEQ ID NO: 26755 - DNA, 1252 bp, Heterodera glycines
actattggctggagaccagccgtgagcgaaagcccgggctcggctaccttcaagaatcccgctggaaggtctgtacagcaaatgacctttaaacacacttcaattctttgcttgttatcaggtaaaggtcagagtgccgaagggtccgcttgccgacctcctcctggagcaactcagcacgccagaacaagtgcaaagaataatggtggagcacgaatttgtggagcccgattctgcagtggacaaccggaggaaaagggcgttggatgccgccagaaagattgtgtgtgttgagaagggcggtgtggcgtggaaaatggtagatgaaggcaaggaagagagtgaggagaaggaagaggaaaagcagcagcaggaaaaggatgagaatggatggccaactgaaaacaggacatgggagcagcagcatgccgtgttgggtaaagtgtcaatctggcgcgactacttccgcaacggcacgaacagcacgtccgccttcgtctatggtgccggacagcaaatcaaccaacaagatgggtcccttcgcagcagaatggccaaatttttgatgcgagacaaccaaagttggggcagtgatggtgcttttgaccgcgaaggacgtgatgcccacggcaggagacgcacacacctgcgccgcaaaaacgttgttagcacacttgagcgtcgatttgacaaaggggtgagcaatctatggcgttgaaaaaattgcatttgataaaaaaacaaaaactgaaaataaactggatgaaaaatccgaaaaattgtcctaagattttcatactatcaaaaaatgtaagtttttaaaaattcagtgaaaacagcgacttttcatctaaattttgatttaagcaaaaaataaatgtaaaataaccgttaaaaaatgcaattaaacactggaaatgagaggactaattgaatgtctaattttagagttggtcaagcaatatggaaaaagggaggcgattagagacactgtggacgagctcaagtaactgttttgcagagtttttggcaaagtcctatgaggaggacccagtacttctacagcgggtattggaagaaaatgaggaggacgaagaggaagcaattgagggaatttgaaatgaaggagggcatggttttagttcttgtgatgatgtgtgatggggaagggtgggggcggggtgtgaagctggtggggtaccgtttcggccagggccgacagtaccccaccgtggatcattccaaacccgtt

SEQ ID NO: 26756 - DNA, 1182 bp, Heterodera glycines
ttatttttttttaatcgaattatagaaaataatttgaaaattattttaccaataaattttcaggtgagtctcgcgacgatgaagacgaattgttggttgacaatgaagaaacggaggatgagcctgagaagtgcttttgttgtgatctgtcgaacaatttaccttaaaaagaatattatttttttttatttaatattttatacaaaaatttgtttaattatttttaggtgaaataataaaacaattttaaagtcggcacttacgtgccacaattatgccatggtcttgctcatttggtagaagtatgtcatgttcatcaagccgacatgaacaatttttacaaatttttctaaaaaacaattttaaggcataatttgtaaaaaattgtttttccaaccgccaaaagtgcaggtccaacccgggacaatcacaccgattgcacagcgacccgttgccaaattcatgcgatagaatatgctaaaatttttgattattaatattttttaaaattttaattcatttggattaatcaaaaataaacaaatgctgaaactataattataatataattttatttaattagttttaaaaattaacaatgcctttaatggtcgttccaattttggcacattttcgtccaccaccttcttctgttgttgaaaatcagatgaaaatgattcaatagacatatttacgaaaatgcttaaaaagaacaaacattaaaaacggaattaaaattaattaataattaaataaagagcaaaaataaaaaaatttaaaagaattttttatgatatgaaaagggaaagttcattcattcaaagttaaaaattcaaatttctattaaaatttaaaaattaaaagtaaataattttgaaattaaaaaaaaaattattttaaattaaattaaatgttaaaaaattgtttttaaattattttccaaatggatttgtgtgctggtgtgaataacagaagttcaatcaaactcataaaattggcgacgatttgaatggacgacaaaacgataagaatcgacgactcttcaagaatggagagagaacaaataaacatacacattaataatttgtacgcacaaaatcttgtacatattgtaacaataataatcaaaattaattaataattgaattatttagtttatttattaatattatttatatttaa

SEQ ID NO: 26757 - DNA, 1340 bp, Heterodera glycines
  unsure (1)..(1340): unsure at all n locations
caatttggtcacaatattttcttagattgtgacgtccaatgatgctaattgactgcaaagtgtttaaattgttttatttcaattaatntaatttatcatactaaatattcaagattaagtgccgtagaaaatgaacaggtaagcaacattgagcgagtaatcacccaagagtggtcatagtttatcgtgttcatcaatgcgatggtaaacttaaaaatgaaataatttaaaatatttttaacaatttaaaaaggtacggttcatttcaatagggcttttgactcaaagcttctaaagcattggtccattctaatgtgaattgtattttcaaatttttttcttttgaattttgcgccgcatttagtgactaccgtaactcaatttgtgtttgcgagcaaaaatcgggacttttatggggtttttctacatatttacatatttcgagatttttttacatatttgtacatattttggacttttttcttgtatattttcatttttttttacatattttgaggattttttactatttttggaaatcctcaaaaaaaattcaaaatttcagcaaattttttgttcatattttcattttttttacatatttgagaagtgaaaaaataatttttttttttgtttgaaaatgtacccctgaaaaatagcaaaaagtaattttttaaatactaaagggtgggtgacctatttaagtcactttttaaggcattttgttccctatttcactttacgaggaatttttttttccaaaaaataaccatttttaaaaattttatttacatatttggggttttttgtacatatttatgtacatattttgaccacattttgtacatatttttggcagccctatttatatgaatttgacaccgttttatattagttaagtttagtcaaacaataacggaacctaccgtaatgccaaaccaagataaattgaaaaacacagagaaatttccatgtgaatttttgcgtactgtcgcaataaatcgttcgatgatcagcgcatgtccaagcaatcgacgaaatattgcagaaaaaagaacagtagactatgagtgaaaaaattcatattgccttgggcaaatatgtccttggaaaagaatttctggacaagcatcactgatcggactactaaataaagcacaaagagcatactttgagtgatcagaatgcttttcaggttggcatgcagcagtttggtgggcacaattatggccaaattcagaaaagtaatgaacaaagcagttaaatcggagatcagttcgaacgaagagaagatatgtgagcaaaaangggggacaantgtctgacgngggagacctgca

SEQ ID NO: 26758 - DNA, 366 bp, Heterodera glycines
  unsure (1)..(366): unsure at all n locations
actgatggccacgttttcgtacctgctgctggtcgtggccgagttgtgacaatggcacgccatgcgggagggcgttgcgtcgcgcgggaggccgaagtcctccgccaattgcgccgtgccaaatgccatcggacggtccgtcgccgcccattcgctgtgttccgtttccaattccgcgctttttgggttcataaaaacggccattgtgcagctggtgaacgacgaatgagttaaaagcggagaagaaagggagtaaaagcaaagtgaggcggcggggaatggccaatgacgacagagggcggctggaaaatggggaagggggggggggngagaggggggggaagttttccataaattggcataaag

SEQ ID NO: 26759 - DNA, 1087 bp, Heterodera glycines
  unsure (1)..(1087): unsure at all n locations
tgaaaaactatctttttaacaagcctgtgcattgattttggctgcccagcaaaatgaaaaaatgggcaaaaataataataattaattcagacataattaattattgtttaaaattaattttcacggggaaatttacaataatattgtttttatagaaaagaaaatgaatttaaaaaagaattagaaattaaaatgatgcaattaggtaggcaattacaaaaaaaatgacaaaaacaaaaaaatcaattcataaaattgtttccgggaagaacacaaaaaaataataataaaagcaaataattatttttcgagatttttgaatgcatttttccaaaatcagttttaaattttggccatgaaaaacaaattaaaaaaaaaattgaaaaaaactttttaaaaaaattagaatgaaataagtttcgggaaaatttttttggacaaatcaccaaaaaatgtgttcgcatcaaaaaaaaaaaatcatttttgttaaagaatttccaaacttttctaaccgaccttgaaatacaaaagtttatttgaaaaaatcaaaaaatatataaataaaagcagtgcgattggattaaattgatgaaatacataaaaacaatcaaaaaaataagacatttttaaggatgagagaaccttatacaaggacaattcataaaaaaaggacaacagttggcagtcctaaaaagagagtctcctcaatttgaaggtgtgaaagatgggtgagacaaatgaaaaaaaaaagtaaaatgaaaatcgaaacaaaaaaaattgctgaaaaacaatgtcccattaacatccgcaaagggatttaagctgtttaacttcggcttttagaggcattaaaaatgtaaccatttttaggctcgttgaagacaaaaaatgttattgtaggttgtttgaatagaaaaaaaaaattttttttttataggtaggttgggtagacatgaaaaggcctgaaaatttttagaatttttcctctttttaatggaataaattgggcctcagattttaaatccgccgcctcgttacgactctgttttttttgttacagaantataaatgggctgacaatgagcaa

SEQ ID NO: 26760 - DNA, 844 bp, Heterodera glycines
gagccattggaccaatggaacttctgaaagggacaaaggcatttttaaacaaaatttaagtgattttaaattaaaaaaaattattttattttatgaaaattttttataaataaatttatgaaatttttttataagaaatttcaagaaaaaaattagtaatttatcataaaaagatttttttcttgaagaatctctaatttgaaaattaaaaaaaaatttcggcggtttttgtcccggaaagatttgtcccatctccttgtcctcacctctcccccgacggtcattgagcagtgctcggccgatttgccttcgggcacgcgtacgccgaagtgaacgcgcagccgcgcgttggtcagcccgcggtgctccgcaattgtggcgccagcgggaagcagagaaatgaaaacattgccgaacagacagtcagtgagcagagaagcagaggaacagtcagacacagcacgaggcgaagaaactgaagggcaaatttggaaaattgggtaatttatttaatcacagcaaggacgatgtgatttttgaaaacaaatttgggttgggaaagtattgttgcagttttgaaaaaatcagtccaatttcctctccctatcacccataaattaaaattgagtaattttcaatgggtttctaaatttgtctccactttttttttttggttgttgttaggaatgtcataaggaattgccaaaaagaggctgttgttcgcccagcccacgtcacttcacactgaaaatgattcttgaagaaaagcctccagaatttgagcgaaaaaatgcactttgagcaaattgcaaaaaaaaaaaattcttcggttcccccctcccgt

SEQ ID NO: 26761 - DNA, 969 bp, Heterodera glycines
  unsure (1)..(969): unsure at all n locations
tttagtcctttttcttttttaaattggttttatccttcactcgccgtcttttgacccaattaattcattctaaaaacaatgcgaaaattcggtttgatcaaattgagaaacaaattagcccaaagtatgtaaaattttaaaaaattgattatgcttcaaaaaaagttatccatgaagtttttcaaatgaattccaaaaaccaacccttgccccccccccctccggcggttaggggtgctttctctctctgttttctctctctctctctctctgtgttgtctctctgtctatcgctctctcccatccgctcgctctttattgtgatcgcttctcgcctcaaccagctctacttcacccaattggacatactgcgggctctcccaccgattttttaattttcaaaatacagtattatctacaacgagtatcgtatctttttatatgaaattattatttttgatgaaatcacatttcctattcattcgttgttaattttgtcctcggaaatgtctttttgtccactaacaattgagcatttctgtgattttattaattttgcagaaaggttgacactttgacagtttaataaacaaattttaatttatggtcaaaataatcgccatacttttgaatttattttttatacataatattttgcaaaactaaaataatttctcaaataaaatgaaaatatttaaatttcgggaaaagtaaaacaaagtattttcaaaggaattaaaaagggagagagagagagatgtagagaaaagagagtgaactaaaagagagagagggagggagagaaaatcggatgagagagtggactanaagagagagagggagggagagaaaatcggatgagagagtggactannagagagagagggagggagagaaaatcggatgagagagtggactaaaagagagagagggagggagagagagtggactagtgagaatgtttgactt

SEQ ID NO: 26762 - DNA, 1000 bp, Heterodera glycines
  unsure (1)..(1000): unsure at all n locations
atatttttaaattgtcacgaaaaaatgatcttcacttaaatgctaaatgataattggacaataatgcttaaagaaatacagtatttgcaaatcaatttacgagttatttatttacttttcacgagttcagtaattacggattacggattgtccttaatcgaaatccatttaggccccgcttttgacgggagccgtaaatttcacggcggggggagcaggaggcaaagcaaaggtttggcacttcatttatttttcaatgccatttttgcttttgaaaataaatatgcaataatttcagtaccttcccccacccgtccatttttctcttttctttcattgtttgtgtattgtgtgctgtttattgttcaaatttctaacaacaaaaattctccccccccccccccctaagagattgggcccccttcgcctcccccgcgggggggggggggggggaaggatttcttcgacgttttgacggcggaaacaatgggcgcgatgggagaacaaaaatggggaacaaaaaagcaaaaaagcgcggcgatggcgacggcggcactatgtgaaaatgaatggggggggggatggacacgacgggggggacgaaattgtgacaaaaggtgcgattttgggggatttccaccgcctcccccctccgacgcctccattaaaattcttttattttcattcgccattctttttttgtttggctattgtcctacgaagaaaataaatggaaaagaaaattttgaatgggatttttcattctttttttttgaattgtcaaaacattaaaaacatccaaaataaaataatttgtgtgaagatggaggagancgatgatgatgatgatgaaatgaatgaatgggagcagcaaaagncaaaactttttgaaatgtaagggcaaatgggaagaaaatgatttgttaaattgggcgagaatttgggaatttttaagcaattaatncagagaaaatcactgataacctcagccatgcaagct

SEQ ID NO: 26763 - DNA, 836 bp, Heterodera glycines
  unsure (1)..(836): unsure at all n locations
atctaatttntgatcaccncaatttgaaaaaaagtcagttcaattcagaaatagtggtcagcaaatgtcagctaaattttcttcaaaaatttattttatttttctaaataaatgtttataaaataacaattttgttgatgaaagtatcaaatttcctctttttgtggttaagaaaagtcaataaattcagtaaaaaattcaatcgtgaaaaatggactaatgtgaactgagttcaaattgaacaactgctgttcatgattaagctaatgtgactgatttatggtcctaattttcaaagaacagatgagttcaattaaatatttgggttaaaatagacaatttaaatttatcattttatgaaaattctttaattaggaaaagattactttaaaaaatatataataataaaaatattaaattgtgaatttcaaagaaagtgtaaaacaattaatttgtaatgcttaaaatggccatgttttaatttaaatcccgcaaattatttaagaaataaatgaaaaaattgtaaatataagaatatgtgatttacgcatacattaaaaaaaatattgaatgtttttcgaaaaataacttttgcactaatacttttcagttccggccaacaaataaaaacatatttatttccgattgggaaatataatgatttttttttattgatggactctttttatgcctatgattgtctataaatacacgtatatcttttaaaagaaatgtgtattttataaattttagaaaatataataatattttccaatgattctttttccatattttttgtctatattttttataatcaacgaatttcattattatta

SEQ ID NO: 26764 - DNA, 1156 bp, Heterodera glycines
aatttttaacttaattgacattttttgccatttttctgtcccatttcccccgcccccttttttccgttttaatttcgttttccctttcccttaggatcgtcccccgttcgttcccccgcagcaattcgtcggaagtgtcggccccgaacagatggccaaactccgttccgagttggacattgtgcaggtcaatttgacggtgctgcgtgaattggtggcgcaaatgaaaccgacgaacgacggcggcgtcactgaagcgccggaggactttcattttgtcagagtaaggagaaaaccgcggacatttcccaccgatggccaaccgacaaatttatttatccatttatagggatgagtagcaaagaaacaaaagggtaattaatcaaaatacacaaaggcccctataaatttagtattatccattttagtaaacttttgccatccaactaaacccaacttcattaataataaatgcttagatttgataatctaaataaaaacaacgacaatttgagcatgaaattctaacggtggtggcatttcaggaattgcactcgacttgcaaagagatgcaaaagcgcattttggagctgattccgtccgtctccaacgaggaagtgacttgtgagtgggcggcaattgacaccatttttaagtgcctttcttccccacatttgaggcacttacactttaatgtgctttgtccggatatattccatttgaatttcctaacatgcaaaaagaggtacaccccaaaacgtcgccgcaaaaaacattaaaaattttcaacagtttttaaaaaaagatttttaatttttaagaaaactttggtgttactgaaaaagaaatttgctgagtttccaggggaaaaaaacaaataaattcgagaataattttttggttcctgaattttcttaatatttttttcgagttgggcttgaatttttgcgtattaggctagataacaaaaattttaggtatttttttatttttttctaaaattaaaaaaaattgcgccgtacgccgaccttatgtcccggcggcgcttcggcgagacgttttgtcctgctcccgcaaaaagtgatcttttgtttattacactttttcactgtaaaacaagaacaatttgtttgacttatttaattcctgaccgcta

SEQ ID NO: 26765 - DNA, 791 bp, Heterodera glycines
atatttcaatgtccatatatgtatactaattacaaaattctgaattttgagcgcattggcaatgttggcaggggtgagtgaccaaaaaaaaagatggattggtgggattgaaaaggaaatttaaaaaatgaaatttttaaattttcggggggggggctgtccaggcaaattggttgcattgtgtcggtcactcggcacaacagttcggcagccaatgcgagcacttgtgccattgtgttggcttcgttgcggcggcacagttggatcagcatggcaccgtaaaacaattcttaattgtaggacacattttaatgagccatcactgccatttggtgccggtaatttcatgagtgagggtgtaaatgcatttatttttcaaaatgatttaatttgactcggtggatttgcaaaatgcaaaaagaaaaggatagacgctttgtctcgacccctttatttgtcatgccgtccactatcacctcaccttggctccaatcgcgcagctcaaccgccgtaatacacccctaagaatcgacctaaaaaattttcaaaaatacacccctaagaatcgacctaaaaaattttcaaaaatacacccctaagaatcgacctaaaaattttcaaaaatacacccctaagaatcgacctaaaaattttcaaaaatacacccctaagaatcgacctaaaaattttcaaaaatacacacacccctaagaattggaaaattttctcaaaaattcttcccccaatttttttttcttgcccagtatttgctaagaaaatatttgtaactg

SEQ ID NO: 26766 - DNA, 1191 bp, Heterodera glycines
  unsure (1)..(1191): unsure at all n locations
aaatantggaaaattattaggcacaaatcgccaaaaatatacaaattaaaaaagaaatgaatttaaataaaagcaaaaaaatgaaaaagagtttttatgttaacaaaaagaaagttttcattgaacgatttaatgaatttaaagtttacctgcccaatgcaaacagaaagaatttgtgaaggaattgggtatttctatagaaacatttttaaaatggaaaaaacaattggtgcaaaaattatcataaaagtgagagaatttttggattttatttacattttatatttaaacacaaaataaatattccaatgatgaaaaattagcaaagctgaaacaatatttcaaaattaaagaaggaaatccaaaaattaacaataaaataattgctaagaaattgtgaatcgaaactgcaacactgaaaaggtggagaacggaattttcataagtttagggccctgtaaattttactcctgacaattacaaaatcattttaatatttccatcataatttttttaatgtttatttatgattttggtgatcaaagactttgatttgtttgatacttttttattagttttttcagcatttatttacgttattttttaacaaaatgctaactccatttaaatgtatgaattaatcaagaaaatcgcattatgtaaaatattcaaatcatttattgacatttatccaagatgaaaaaaaacatttttaaacaataaaaccatattcgcattgatttgcaaattacattattgaattattaattaattatctgacaccaattttttacaaaaaaagaaaaaaaaattattttcttggcatggtttaattcaaattatttgtcccacaacaccgtgacaatgccttgggctggtattgtcagcggaattgtccgcttcccgtcatggattttcactttggttgtctgagtgacggacgagaacaacaccatgacaagctgcttgttgtccgggctacggaatgccacaaattcaatgggtttattgttggcattgtacgacaatgacgacaaatggccaccaaattcggaaccaatgcgcacagcatttggcgtaatgaagcgactgaaatatttgagaattttctttattttccaaaggatatgagtcacatccctaggaatattanaaagtttacacagcgatttaaaataatcattaagtcac

SEQ ID NO: 26767 - DNA, 1085 bp, Heterodera glycines
ttcaatcggtctcgacattctccaattcttggtctcgaacagacattagttattggaccaacttgaactcctaacgcgaatccctcgagaacagaatggaaagacattgcgatggcgaaggtcagtgatcggagaatggtgctttccatttggtcatggtggtggtccgccttgctcatgtatttcaatgattcgtcgatcacaattctgccaaaggcaaagggatacaattaaaaatgttttattctttttcatctcagatttcaaaaaaaaaaaattcgttaacatggaaaataattaataaagaatgacttctttgaaaaaataaaattaaatttcatatttcggagttttttggtcggaaaagggtgtgcgaaatttcgttttcgtggttccgtcgttttcggctccttttgagtttcatttcgtgttaggtgtccgttcgttgagagaggacggggttggtggcggtagtcaagtcgagagtattggtctcgaactactctcgaatcgagcaatatacaaattttcgtttttgattttataatttaaatttcgcttccggtatcgtgggaaaacccaccatgatcattaccccgactccctgggccgtcttaatccttggcctatctatcccttggtctgtcagcggtatgacaggaccacgacacggttcgcaaccgtaacaaattggacccggagtacgctttctatccctgatccataccccgacttattggactctttaatcttggttcgtgcatatccttgtcatcccccccccccctctgtttgccccgttccctccgtcccacccactcatgtgtcagcacactcatcgaccgttgcttgaagggtgacacggagtgtgccgatgagtcggagtcgtcgccattgacacccaacggcgctgccgccgatgcgttaccgcccctaattagttttgattgataaatattttggcgctacttgcaaagagcactattttgaaaattttttcaactttttttttggtcaaaatttttttttgtttaaaaagtcctgaaaccaaatacccgggggttttaaaggtcgctgattacgaa

SEQ ID NO: 26768 - DNA, 1156 bp, Heterodera glycines
atttcttaatcaattttcccatattttaggcatttttcaatgcttcatctcccgtcaatttcattgtcacctttgctttccattgccttttgctgattcagttgtgccatttgttctgatcaacgaatttactcgcgaacaattggcattgaaaatacagaagagtcaataccagtagtcacctttggacatttatgaaaaaaaagaagtgaatatttcatggggtgcgccttttaaaaaattactctcgtcgtttaccatcccccttgactttttgctcgaattcgggttcggaattagacataggtatatttgacgttcttttaccaatttctgcctatggtttaaaaatagttttaacgattttgaggacccataacatgcgtcggttttgcatattttgaattttgtcgagaattaatttccttttttttgtaagagtccgggtttagaatttggtcaaatggatgtcatattttcagcgacctcgaaaatccccaaaaatatgttttcattgtaatttatgaatttcgaatttttgttcgaattcaggttcgggattcggaattttgaaaaataaatgtcatattcgtgatcagcgccccaaattaccatagaaatgactttttatttgaaaatttcagaggggggtcacaaaaccgaaaagtaccaaaaaaatttttttttattgcatttttgttcaagaatttgtgaattttatatgaaaaatttttaaaaatcgcgaaataagggcgaaaagccaaaataagggcaaaaacttattttaagggcgaacacccaaaataaggatttctaaggtcgaataagtgcgttaaaacgcaaaattttcgaacaaataatgtgtttttcgtgcatttctcgtcgcgttaaagccgcagaaaaaaataaggaaaaacttataaatccgggccctagtgaggagttactgtattctacatttttaatgtgttatttcatgaatagatttatccccaccctccaaaaaaaaaattagttcatttgtgattgtttaatttaattaggtggaaaacagagaaaaggaaaaggaaagcgaagaaaataatttttgaaaaaaatcattaaaaaattaaaatatttaatttttatttttgagaatttttacagcgtgccattt

SEQ ID NO: 26769 - DNA, 773 bp, Heterodera glycines
tcagagtgcctaaactaacatgtaaataaaatttgggtgcgtttcagaacccttttctgaaaaaatatttaagaattaattttgcaaaaaataaataaaaacgaaagactcagattttcgaaaatttttttgagccagctagctcggcgctcatttcagtgtaagttagtcctttaccggggagtatccctgcaaagtttggtacgcttctgctcaattagcaaaaaatatgagtgatcgaattttcactaaaaaagttaagcctacattttttggcatatttaaaaagcaattaaaaaatttttaaaatttaataattttcctgcaccgaaggtactcactcggcctcttcgcggcctcgtggtgggccttcgcccccccaggaaaattatgaaaaaagtgtcctgtttgttcagcaacagttgcaccgacgacaaatcgcgaacataatcagcggaacgaacgtggggttctttgtcaccgatccaactctccaccacatcgcatttccacatgaactgaaaaattggaccattgggttacggcatttcgaaatccggtttggtgacataagaaatgcgaataattgaaggcggacaataattattcgaatcccgcttcatttaaggggagtttcaacatgaagaaggctcgaataaatacaagttgtcattcaaacaattagatgccatgtatctgaatcgaataatgccggattatattaatgactgttcagtctccttgcaaaatttacaataatcacaaaaatttcc

SEQ ID NO: 26770 - DNA, 636 bp, Heterodera glycines
  unsure (1)..(636): unsure at all n locations
tagttaaaaactttttactgaataccntgacaaaaaaaaatagtttttctcttagttattaggacaactattaccatgagaccagggatggcacggaattccgatttccgaaaatttttggggcctcagaatgccatccccgccatggacacaaaatgtcatgggacgcgtaaaatgccatgggacgcgtaaagtgttgttgggacgcgtaaaatgtgatgggacgcgtaaaatgtcatgggacgcgtaaaatgtcatgggacgcgtaaaatgccatgggacgcgtaaaatgtcatgggacgcgtaaaatgccatgggacgcgtaaaaccgactagaaccaacttttttcttatattagttgaatttctgttgacatcattaagtgtgcttagagttgcttttgcacatttcgatgatcaaagtatacaaacaagaacaattagactattcggaaggtataaagtttccgattgacggttcgaaaaacattttttgacgcgtaaaatatgatgggacgcgtaaagtgttgttgggacgcgtaaaatgtgatgtgacgcgtaaagtgttgctgggacgcgtaaaatgtgatgggacgcgtaaaatgtcatgggacgcgtaaagtgtcatgggacgcg

SEQ ID NO: 26771 - DNA, 852 bp, Heterodera glycines
  unsure (1)..(852): unsure at all n locations
ttgtgataatctgggaacggatttatantgtgctaaaaaatgccaaatatgtacatattatgtagcaaaatcccccaaaatatgtaccaaaaaaaattcaaaaaaagagcaaaatacatgccaatatatgccaaaaattgaaacaaaactgcttaaaaatatttgagtttcccaaaaattcaattattttatcagtttcggtagcataattgaaaatcaaaatcataaatgcctttaggcgttaattttaatttcaacgtgtcacaggtgatgataggaggcgacagaaaaattttgaacatttattagcattttgcatgaatttgaaagccaaaaaggaactttcaaaaaaattttttttaatcgccaagtagtgacaaaaactgccaaaacccaaaatatttttatgagctaaaaaatcgctctgattgaaaagcaaaacaggtaaaaatgctatttgtgagcttttcatgtgataatctattcgcaacaaataatttaaaacataaaatttcgttcctgacgataataaaatataaaattatttaaaacatatacataataaatcaaaattttcagttttatcaacaaaccgagaacagagaaaaaacattttgcaatttttgacattggaccatgtcaaaattttgttcaagaagcttgacattaaattttataacaaagattttttagaaaaaaataataaacaaattgaaaatcatacgaaaaatgatgacgaaaattttgaagaaaaagctaaaggtatattttttaattttcttaaaaataaaattcgagagctcgacattttgaaaaaagcatcgatttatacctggttttttcatttgacat

SEQ ID NO: 26772 - DNA, 900 bp, Heterodera glycines
aaaaaattaagatttttccgataaattttcgttttttaactaattaaattatcatgatttactcaaggaaaatttgaactccgattttttaaaaattttttcttgcggcatatttttccaaaaaaacttgatgaatgtgcgaggggagaggtccggcggtgacgataggcgccgccgagaaaattttttaaatttcaatgcaatttgttaacaaattttgtacaaaaaatgagcaaaatttgcgatcttgggctaatttttaagaaaaaaataggaattttgggggcctgcggtgccgataggcgccgccggggaaaaattttaaatgttgaagcactaaccagtaacccacaaatttatttaaaaacgaaaataaaatttagttgtttcataaaatttgtcaaaatggttaatgaaggtcacgggggcgggggttgcgggggtctgagtcgcgggggcacgggcgggggtgaggccaaaaaatctgtcccgcccacggcggggggcgggggtgacgggggcggggctcgaaccctaatttaaaggtacttttttactttacgccacataaaaaataaaattattttgtatttttctagacttttcaggggcgctgatcagtgatcacgaatattacattcatttcggctagacttgggtttaaggcaggggtgtgatctgttcttatttataagaaatgttctgatttggagggttcaaatcttacaaaataaaaatgttcttaattgtaagaaatgttctgatttcgggctattgttcttattttgttcttatttcttaaatatattcaaaattttgaaattttatggcagaatgtcactattttatcaagaaaatataaggtttgcgcaaaatttggttattttttgacaaaaaact

SEQ ID NO: 26773 - DNA, 1454 bp, Heterodera glycines
  unsure (1)..(1454): unsure at all n locations
aaatgatttattgggcttttataaaagttagtgtttttgttccctatgatattaaaattcctccattaccatcgaaattaaatcttgataaattagaaataaaacaaatatataaaacaggatatttattagaaacatatacaagaattgaattaattaactcattaaaatacggtgttattattttaaaaatttttagtttatgtttatttaataaatcagaagttttagataagtataccacttataatttaatacaaaaagatttttataaaataaaagaagatttatcaatgactaatatatttaaattattgaataattcattatatggtaaatttggtagaaaaaattatgattcatatgtaaatattttaaattctgaagactttataaatacaaaaattaaacatgttattcaaaatgtgggtgatttttatttttgtagaattgataaggatattaaaatattaaatgatggaactacaattaatatttcattagcgtcaatgattactagatatggtcgtacaatattatacgaaagtataatgtatgctttaaataataatgatgttgaaatcttatattgtgacactgattcattattttttggaagtaatgataattctattaaaatattagataatttcataggtgtttccattaaatgagatgaaaaattatatactgatgaatctttatcgctccaaaaatatatggacttaaatgtttagatgatagtgaaattataaaaattaaaggtttgaaaagtgggagaagaataaatattgaagatttaaataaatttattttaaaagattatattaatgaaaaaattgaacaaaaaattataaaacgtagaaatctaatattagaaattactttatctcataaaacatttcgtccttgtttaagacctaaacatgaaataatttttattgatcaaattattgataataaaatagttaaagtttgaaattttgaaactattccatttattaacaaacaaattaaaaatattattcagacgactttatttcaatggatataattataagaagatcttgtgatgaatataatttacaaattgtgatatacaatcaaacaaatattattagtaaacttaatgaaaaagataatattaatataattaaaaaattagatgacccgttaattaagatctaataattttatttctttgcttgaagaattaaaaataattttattatattcatattaatatattaaaatatnggagttgtttttataaattttcatctccttaaaaatgaaaaattaattaatagttcaattagaacattttattanaagattattaattttttaattttaataaccatttttataccttttgttttattatttaaaggaantagtattaataactattctttaatatactattaaatcctttaatataccattaaatc

SEQ ID NO: 26774 - DNA, 1171 bp, Heterodera glycines
cctatctacatattaaagaaaagagagagaaagataatgtgaatggcaaatagccgcaaaagatataaacctatgcattcctcatttatgaatgaatagaaaagacatatcgcaaaaaaaaaacttcaaaatatgaaaaagtttaaaatttcaccaaaaaacaaatcgtaaaaattctctcaaaaattttctcttaatgcaatacatcaaaaaagacgtcaaatgacattgacatgccacttttctgggaccgagtcaaaagggcagcagcaggagaagagccatcataagataaatgggtcattcatcggacagaaacggacaacacaacgaaggatgaggatggcattggcatggacggcaggcacaacacacacacacacacaaatagcccaactctgaggggacggacgtcgtttgtccatcggcggagagataagcgtaggaaaaaaggatggaaattgggatgccggaagaatcccaagtgaaaaaaaagtcaaaaagtcacaaaaacagtgagtgttgggcacaacggaagactttaagatattttgggcgaggaccgagggcaagtgagcatttcgtacaattgacgcttaaatggacgataagtggggacaagggacgaaaagaaaaggaagcggcgataggaaacagcagaggagagaagaaaatttgactgattgatgatgaagcagaaatggatgaggaaaagccatattgacggatgatgataatgatgatgaaaagcatattggtcggaaagaggaaaagcctggactttttgccaaggacgaaaagcataagtggctcccgcattatgccgaatccatctccctctcctcgaaatggtttattatgacaaggataggccgatgggggagggtgaaaagattgtgaggaagctgtggggacaatttgtttgttgttttgaagaagtgaatgtatggttggatgagtgtggagaagccgcttcttctcttctcctccattcatatttgggggaaaagccaaatttgacagctaaccaaactctgtctgttttggttagctagctgtttgtgggtgacgggaaggagtgtatgatgagggaaggaggggggggggagcaaaggaagaatttttgtgacagagaaacggcacaggcacattttttattcttatttgtata

SEQ ID NO: 26775 - DNA, 1595 bp, Heterodera glycines
tggttttttctaatcaattataatgtcatcatttaattgattttttagcattggcatgaataaaatcaaaaaatttatataatatatttatttttttgttttactaatatttttgttttcatatttgaagcatttgcaataaatgggtccaaaacagtttcttgtgctgtccattttcattattatggcaactttttctacaattttggccaacaaaaatacaaatcggcgacaaaaacgaatggacaattcccaggaaaacaatgtgccaatttaaataattaataataataataattttaaattaaaaccatttaaacacagagtacggtagtccgaaaaaggaagacgaccgtgactacaaatagcggtggtgaaaatgccggtgaaaatgttgctgtgaattaccaccaccagcagcagcaacaattaggcaagtaaattgaggagaggcggaaaaatgagacactaattagtctattaatcattttctcacacttttttggtaataagcattgatttcctcgttaaaatcagttttcaaatcgctttttctatttttttcatatgtaatctaattcgctgaaataatttaaaaaattgtgccagagttcttcgagccagcaaaagcctttggtaaatcagcggctacggcactttcggccaaaaccgtgccaaagcgcaaaacacagccacaacaaatgggcacgtcactgaattcgaaacgaaacgtggaagaagccggtcaaaaccaacagcagtcaccgaagtatgctgttactttggatggcatcaaagaaatgctaatgagcattaattgggctgctacttcacgcccattaacggatgatcatgatcagttgggggcccaacatatgggagaacaacaaatggacaacaatgttcagcaaaatttgaatgatgcagatgaccaatttggtctttcaaatattggaatgcaaccgattgatgtcatcggcatgctcatggaagatgaacccgacaaagaaaatgttgaaatatttgtcaaacttttaaatcagtgccatttaattttggccatagcaacggaacacattcagcacaaaagcaccaatgtgccgaacctaccaatggtattgtgggacgaaaattgggaggcgatgtccaattttattcaacaaaatggtggacatgtggtcggatgtgcgttgttaaacaatgcaaacgatttgacacgtgaagttgcggatgttatcgaaaatggtaaaacataaaattgaaaaatatattttgaattgtgacattaaattatgaattattaaaaagtttgttttatagctaaaagcagtgtagccagattaaaattttcaaaagcctcatttggcatgcaaaaaaacctcattttgggtcaaaaagcctcatttttacaaaatttattctaaacacgtttaaaatgttcaaatgttatatttttgattgtccatgatcaatttgagcatttttttttgttagaaataagcattttttgggattctgaacatgaaaaacgaagttgatttttttgcggcgctttttccaaaaaaacttttgggaaacaagggggggccggcggt

SEQ ID NO: 26776 - DNA, 801 bp, Heterodera glycines
  unsure (1)..(801): unsure at all n locations
ccccttttcggccgatccctgtggaaattacgaagccctaacccaccaattcttcgaccacatttacgaacataaccatgacaaaatgcgtgcgttgatcgcctcgctaagcaccgacaaattggtcaatttgctgaacattgaatacgcgccggaaggcacggagaaacagctgacgccgctgatgctcgccacggtgttgggagacgcgcaaatggcccatatttttgtgagttaattcaacggcattctccgccaatttatccattgctacaaagctcattgtcggcagaaattaatttttaaatgtttaaaatttaaataaaatccatttttatttcagctggagaaaggggccgacccccacagaatgtgcctaaggaaaatcaacaccgatgacaatttgatcagtgagttgagagaggaaaagccaaaaatgaaaaaagtgacatttgaaaaataatttagaaaatacacgaaatacacagacattttgaataatattaatgtgatttgaataagttcaaaaaattatgagttcgttcttaaatgtgctttaagtccaaaactcagggcccaattaactctttctgatcacttattttttgatttgattttttactctcgtaaaatattcctanacctttttggcccttcgnttaatgtgcttttccccaccacttagacggctctcccctttgggtcgccgcttcgtttggccatttggaggtgtgccgtgtgctgcttgcgcancgtgcccatgtcgaattgngcctggaaattggcatcacccccttgatg

SEQ ID NO: 26777 - DNA, 1478 bp, Heterodera glycines
  unsure (1)..(1478): unsure at all n locations
cacaaacctntacgtcagggattttggctgccccattggccactgcctcggcattttttccggccacgagcagcgaaatttggtggcccaattttttggcggccgtcaccgcattcagcgtgatctggctcaacttttgttcattgtgctccgccaacaccaaagtgctcgccaaacaatgggcctgaaatttaaaaaatgggaaattttagagggacggaaaaaaaaatattttttcgctattttaaaaaggaataaaaaaaattcgagaaaattggcttttagtgtttttcgccaaaaaatgaatatttggggttttttgacttaaaattacaagtgggaaattttgcaaattttaataaaatttattataaaaaacatttttccctaaaaatcgttttttttctcactcacattcaatcgacgaaaaattggtgcatttattaaaattcggttgccagcagccgaacctgtcgaacaaaatgccgcgagcattgtgatgggaggcaagaaaatttacaatcagcttaaatgttattcaaaattttaaaatatttttagagatcggaccgggccgggcccagaaaccggagatttttggaaaaatccggtttgaccagtttttgagagaccggacccggaaacaggtcgttttttaaaatgcaacccggcccggaaaccggccttttggaccggttttataatcaagccaaaaatgtttctttttgttcatttttctttgaaaatgtctttttggcataatgtttttgatttttttttgtcatttttccagttgaattttttaattcactagcggggtcagcgggattgtgcccgtgaagttgccagagagaaaacgggtgatttcggggataaggcattcaaaatcggcactgactcacgtgccgaccatctaaagcatggaagtaaaatttagaaggaaccgaaataaaatactccgaaagtggggagaaatatgaatcaaaatctcaaattggaacagaaactatccagagataggagaaagagccacacctataacttccgcactttgttgagcgcgcttattcccatgcaacaccgtccttggagtttgttgggcgtcccatgaaatttccacccataaggaccaagcatgatgaagtgaaggagcccttgctatttgaccaattcctaagaggaatttttggataagtaaacatgaaatttgtgccaacttcgcacgcctcggacaccctcattatgcccgattggagtcctccagaggcttcggaccaacacagtttgagatggatggcctccagacacagcgtctgaaccactgatggacgaaaggatggcgacaaactgacgaccaggagacaatagttagaatgatgattttggagaactagcagtttttcaaaccaatcgctgtcttagtgtccaaattgttcccctgatcccctactgactccctctgcattgcgacatccgtg

SEQ ID NO: 26778 - DNA, 898 bp, Heterodera glycines
cacagtagtgtgcatctcttacaatacattttaaaaacttggacaaaatttcacacttatgtaggtttttcaaaacttttagtgtacatcgcaaaacaattcactaacaaagaattcttttgacaaaagttcacactctgtgggtttctaaaacttggtaggcacattagtgtggatcttaaaacaattctaataattacatataacaggtaatgtgattgactaacataagccacacaccacactaatggattttctaaccaataataacaaataatttatttaataaattcaacatttttctgacaaatcaacaattttaaagcgcaattacaaaatgaaaattatatccgtatttgataatgtgtgaggatcacaaatataattaaataacaataacaaacaaaatatcaaaaatcaaacataaaatacgtaatcgaaaaggtatgagtcacaaatcaaatccaagcaacggacaacaaacgaaatactacccatttttttgcgacttcttaattggctccaaagtttccgaactacgacgtttaattggtgtcgtcaaaatcgcctcaagattaacgcgcccagcaccaattttgacggatgaaatctcgcaatggagctgaaggcattcatctatgataataaaaaaacttgaaaactcaaattaaaaccaaaggtaatgccaacaattacaattaccttcaactttcacaaaaaaattttgaagttcgatctgtgtgttcttaacgcatgaaccaagacgttctaccaattcttcgccattgacgtacaaatcaggcctcattcctttcttgtccgcgaccactgcagcgaaatgtttcccgactggcgaaaacgatgaagcgagagcacaattcattgctttaaaaaataa

SEQ ID NO: 26779 - DNA, 770 bp, Heterodera glycines
cccccctccccgctggataaccctttcaggatgtgcacaattttcatgagttcattatggaagatttcagtcgttccaaatattaatccaaacaaactgtattttataaagcattaaagtaatataaatcagccaaatgtgaaatggacttgttttttactaaattacttgacccacaagcattttgactttttcattttgttaaattctgtctgctaatatttcaaaatttcttgaccttttatttgaattttggaaaaacggaaatattgtgaatattgtggtcaaactctatctgattaattataatttcaaacacagattactacaatacagatcatattggataaaactttgatggaattgataaagaaagttttgctacatttttctgtcagaaatagataaaatgaacgatgcctttattgataaaaaaaatggcatttttgtaagtttgtacaatattagttgattccgatgagatatgaacgcaattttaaaaagaaaatttctcccgacggaattaattttcgaattaattaattttctgccacccaaaaggcgttgggcaacaataagggtttcggcaaaattcgacaattttgtcttacgaaggcaagccaactggcacacaatgtgtttatttatagtatgcgattaatttaaatattttacttaaatataaattggatcgtccataatttattttgagtgtccgttcaatttatttaaaattaatttaggccggccaatttgatgctgctgttgag

SEQ ID NO: 26780 - DNA, 1045 bp, Heterodera glycines
aatttaccatcactgcacccattattatcattaatcatttgataattaccaaattaaaagctaactgataaaataaaataataatttgccattatcatacaaaaaactctcgggtgaactatagtgaacgccccagtgaaaaaatgggtcaaatgatataccagtcaattcgtctcaaggagctaagcatggaaaaatatgtctcgagttgcggaaatgccaaaaaaccggtccccgccaatcagtcaaccgcctgcggatcacgcgcggacttcttccgtagcccgtagtctcgccccacctactggccgccgtagtcgagtgtgcggcggttttttagcgcaatactcgatattcaaggctaaatgatttacgtgcattatataagaacttttattttttggtactgaagtgtcaattttcactgggactcagttgtcccagtgcctagatggcattggttcgacttcatttcctgatctttacatctacctcaaatggagatataatgtgaaacataatgactaaccaccttaatagtgtcaaaaaagtattttacccgtcaacttcaaaataatttattttagtggcgaagctccaaaataatgattcctagtgatgaatagaggcgttaaaacaaagaatttccgagctacacatgtgatttccgtgcatttctcgtcgtaactaagtcgcagaaaaaatagttttaaaaactaagaatcctcgccctacatataactagggttgtaaaattatatggattaacatatttttttctgcccatatgctatgaacacaggggcttaaaaatataatttctgcgttaaaattttttgatttggtgaaggttttaaaccatataaatccatattttggggttttcggaataaaccatatttcgccatttttgggtttttatcccatattttggcacttttttggaaatttccccaaaaaaaaaaaaaaaacgaaaaaacccccctaaagaacaacttttttggaaatttttaaaaatttcccccccaaaaaaaaaaaaaaattt

SEQ ID NO: 26781 - DNA, 924 bp, Heterodera glycines
cagcagactgctgctgcacagcagcacgcgtctgttcactgtctacccctcccacccgccactgcccgcatcaacagacagtcagacagtgcactatttcccacctttccctccctctacttttttcaaatacatttttaacgcaaaaaacaaacaaaacgccacacaaacacaacgccatggaacatacatacacacagacgttcatctttattatataggattattgcctatagatatttggggttactgtatcttttttagcactttttatatgcattttttcttactcaccgcccttgtgctcctggtgctgttccaacagcgcttcggcgcccgcaacatctttggccaactccgacgattgaatgagtgccttttgaacagaacaaattattttgaaaaatttaaactttttttttgtaagaagcagatcataataattgcattttttaagccaaatatatcgctcaacaaattactttacattatgccatttttatccaaaaaccataaaatcctgcggtaaaaatcaaatttggcacggactgtgcccgatcacctggccattggtccactcgaccaactcgcggtagtcggccatgaagcggtgccggttgtaagatcggtcaagaccccgcttgcgctgctccacgctcagctttagcgcctcccaccggccgcgtgcttcgtccaccttcgctgcaatatcttccgacttttccgggtacaattggcacaatcggttggtctccgtgccaagtttgtccatcttgggtaaaagtgggtaaaattctgttttttaaattactttgccctttcctaaaaccttttggtgccatcttttgtagttactcccacatcctatataatacgggagatggttctaattacctcattgatctgtttctgatcatcgcgctg

SEQ ID NO: 26782 - DNA, 929 bp, Heterodera glycines
tctagagtcgtgaaatatgtacaaatatgcaaaatatgcatatggaaagtcatcctagaagcttcaaaccgagctaaaacatgtttttcgtacgtttcaggcctcccacagtcaaggaaaaaaatatgcatgtgcatataattccgagccctagtaattaggcaatccgtcttaaagttttttaaatgaaatttaaaaaaaaaagaaaaagttataaaaatttgcacctaaagatagtttgttgcacctaaaaatcctgtccctcctaattaattaattaattacccaatgtctccgtaatgcccgtctgttgggccagctgctgcttcatggccagattcgggctttcatctttcatataatgctcattaagcattgccatctgcacaaatgggaaatttgttccccttgaattcatttgccaaatgtttttaccgctttttccttatagcagcgacgtgttgatttgagcttcaaatgccgttctatcggcgggaacgggtgcctcttgcgcactctgtgcttgtccaatgggttaagtgggcttagaaattttatttttaaatttgaatttcaaaattcctccccccccccccatttctgtgactggacaattggactgtggacaatccgacagaggtggacgatcggacagtaaaatataccaaaagataagaaaatgccatccccgaaggagaccgattgtgccataatacacaggacggcattcgtgtgcgaggaatggcaagaaaaaagcgcttatatttaacaaatgtgcaacttcgcttacaaaatgccaaacacaacgaaataatattttcgactgcattcgccctttgctatttgcctattttccttttttcttgttatggcacaatcggcccccttcggcgaagggattttattatccttttgtgtattttagtgtc

SEQ ID NO: 26783 - DNA, 629 bp, Heterodera glycines
agtttatgacaccgtactttcaacgtccgttggaacttggcgctgatgttgtgatgcattcgttgaccaagtacatcaacgggcacaccgatgtgctgatgggtgctatggtgaccaacaatgaccaacttgatcagcatcttaaatcacagcaaattagtaagccttttacattttgcttacaggaatattagagtctactctcatccttggacatttccgaaaattttaagctgctggtgccgtcccgtcaccgtttgacgtctatttggtgatccgtggcatcaaaacgctccatttgcgaatgcgacagcacatggaaaatgcattggcagttgcacgatggcttgaaaaggacccacgagtggaaaaagtaattaaaattcagcaaatcattgaattaattaatataattaattagtaaatatttatttatttgatttttttaattcgatttttgaatttaatttctattattattagtgatttttaggtgctttatcccgagctcgagtcgcacccgcagcacaaaatccataagaaacagagcagcggaatgtccggcatggtctctttttacatgcgcgccgatgccgacggggcacgcaaattcctcgccaatttgaagg

SEQ ID NO: 26784 - DNA, 1407 bp, Heterodera glycines
acagtatcgtctcccgtcgtggtgtccggccatcaactgtttgccgtcgaagtgccagctgaccgcggtcaccggactgttcggttgatcatccaacctgaaccggtcaacctcgcgggtctgaatattccacagcacaagttgaccacggtagaacacaattaacagcttggtcgggtcgatgggagagacctgtccaaattagagaacatcaattaattggaattaatccgatcattttattatatcattaataataatttttatttgtatttaatttaaaatatattagtcatttggataactagattaaataattattattctttacttaaataaaattaaattattagtctataaactaataaaaatattagtctattcgataaataaattaaaaaattattttttaaattaaatttaaaaatatttagtcaatctgacaattaaattctgttaatagcttaaaaaacctttaaaagcatctattcaattttagtaatttagaaataaataataatattattttgttttgtttggcaaaatacctcgagggatttaatggcaccaggatgagtccgacagcttctaaatttaaaaaatttaaattattaatatatttatttaaaataattttgtcatacatatcaactgctttgttccattgaattacataagtggagagttcaaaagtggccaaacaaacaaaataaacgttgccctaaatttaaaaaatataatattatgtttttttaatatttttaaaataaaataattttattattatcattttgtatgcttttttaaataattaaaaatatttgccaaattcaatattcatttatattaaattgaacattaaaattttataataaaaatttaattaaaaatccgaaaatatgatgcaaaaatgccacaaataccttttccgtgccaacatacaaccatcgactttggaatggcaaataaatcgtcgaaattcgttcctttgacatgcgcaacgaatgggcaatttcgggaattcgttgtctttaaaaaaatgtttttttaaaattatttttagatgtaatgatcataaattttggttggtaaaaagggtaataattaaaaaaagtaatgatcagaaattattttggcccattagacacaatagcatgaaaaaattaatttaggacaaagccaaggagagaaatgatcggaccataatggataccagcagataaaaggtttggcaaaatgccaaaagcaaaagactctcggaaaatgtgtttttaaaaaaagcaataatttttttaattttatcaaaataatgaataaatttggcaccatattttgcacctaaaattccataagtgtaaagtgtcgtcctgaagtgcactaacaaggccaccctaaaaataaaaaata

SEQ ID NO: 26785 - DNA, 907 bp, Heterodera glycines
tttggtcggcgtcattcggtgcgatgaatgtgatggatcagtctgagttagccgactgatcactgatcggagcgcgttcccatttgatttcaatttctgcttttgtttttgcttgctgctttggtgtccatttatccgattgttcagcagatgactcattacgagcagtaccaccatttggtggccaattcccatgtgtctgcccatctcaacggccaacatggccctgtccatgccaccgcctctttgccactgccgctctttccgcccgcccaatcgcacggcactgtcccctcttcgttttaccctttcgaacccctccagggccaacttttgcaccctccttatcccctccagcaccatcaacagcacagcaacgacttggcaagcttcgcagcgcttcattcgcaaggccaacagaacggaggaaacaatgtgcagcaaattgtgtcggattttgcattgcttagcgacacaaaggttatacaaattcattccttggcattgttttgattatccaaaagcattcattcgttaagccggaactgtacgccccgggcacttcttccctttggcagccaacatctgacagttttaagagagttggtcaattgggagagggcgaacaaatcattttggtggacagaagggacaaaattgagaagagcgaaggagggaaaaagcggaggaaggcagcaggacgagttgaagaagtacaaacagtggaagaagacgaagaaaatgggaggagagcgaacggagaagcgatgggagagggggaagcagagacaacgacggaaggtggattaagcaaaagcagggaaaagccaggggaaaagccaggggaaaagccaaggaaatagccaaggggcagccagggaaaaagccaaggcaaaaccaagaaaat

SEQ ID NO: 26786 - DNA, 992 bp, Heterodera glycines
tagccctatatatgatatgatcttcttacaatttacttaggactgataaataaattttcaggtaacaaaacgaatgaaaatttaaactttaaaaaagtgacaaaaaatcaaaatcacaatggtaaaagcgtatcgtcggcactttcacgtggttcacaaaaggcacgagaggagaagcaaaaatttgctaactttatcaacaaattaaagaaaaaaggtatgtttaaaaaatcaaaaaaaaaatcccaataattaattattcaaatgttctcaaatagcatttaattaaataagagtgcgcttgaattttttcaaaaaaaggaaaagactaacagagaaaatgttttgattgccaaaaagggcaattaaaaagatgattcgaaatttaattttaagaaaagacaagcttcatggtgagtatccataaaacttttggcctatttcgtagggacctgttttttaaattatgaatgaaattctcaatttaggttcttttttcgccaccaaaaaaagccaataatgttgggttttaggaaaaggtaatatattttgggatgggtaggatgtgccgatgaatctgccctggaaaattttgtttaggtttttttaaaatgggaaagtttataaaaatttaagctgaaattatttttttaaaaagacaaatctttaaaaaaaagaattttcatttttaaagattcgacctctccaaaaaggtttaatgcgcattctaatttgaatatccgttaatttataatccaaatggaagaatttaaatatttcaatataaaatttcaaatgtttagttttttgtgccttgggttactgaaaggaaaaatcatcgaaaggaaaaccgttggaagatgtcagcaaaatcaactgaaaaaataaacagaataatgcataattatgtactaattactgtttttttcatttttgtatttgtggttatcaatggggagtttattttactttttctttttttaatgtttttt

SEQ ID NO: 26787 - DNA, 1471 bp, Heterodera glycines
  unsure (1)..(1471): unsure at all n locations
tgagagtaaaaaatgagacgggtgaaaatntacnaaatgggaaaagcatttttgcncacccaataatttaccaaatcaccggctaaaattgttttgctaatggcacttcattattgataattcaaaaatacatagaagcaagaaaaaaaattcagcatgataagataaatattttttatttcaaattccatcaattaaaaccatttttgtttgtgaaacaatcaattaaagttaaatgacgccatttaaattttgcagtgatcaaaatgtattcatcgcaattttatatgactttcccacgcttgcagcagcatagcaaaatgttcgtccgattttggttgatcaatgatcagtgccttgccgctgatcaaatccctctgagcaatcccaacagcagcagtatttttatttgaagcagcaactattctattatcgaaattagcaacggcagttgcagtttgatcagcaattctgcgattgttggggcacagcagaaacatttttccaaaattattccaaatttggcacatatctctcctcaaaaatgggtggcatcttaattggatggccaattaaaaaaacaaaattgtataaaataaatttttacgtgattatgaacagttcgatcagaaaaccggtgaccgcgttcaaagttgataacaaattgtacatctgatagtaatgcggccactgaaaatagctccacgagataatcacagtagaggtaactattgttagcaaatggagcaataacggagggacaagctgttttccaatgcgtatgttttcagaaagctaaaaatgaatgtcattgtttaaaaaaattaattttgaagaaacattgccacaattttcttcatattttttgattttataaaaacccgaactataattttttattattattatttttatgtgaatatcatccactagtatttagaacaaatttaaaaaactggaggcataagcttccaattgtgcgcaaaaacctcatgtaatttattaacatttataataaagcttagctattttaaaactagaatcaaaatatttttcatgctggtcactactacctagcaaccgtaccaaaaaatttatgtcaatttaaaataatacctgatatcgcaatgacaggctatggtacccctgtttttgcataattttctgatagatttttgagttatattggcacaactggtaaaacatggcaaactccacgattccaaccaccaattgaatgactatcgtgattacatttgttagcggtcgagaactttgaggagacgtggagaaggcaataaaaacggtaattgtcatcttaaaaaataatttaattaaatgcgaatttgattttaagcttgtttattttgcattttttgtaacgtttcgctttgaatttaattttcactaaaaacccatttatatttgcatataaattccagtaattttcaaaaatttttgttccccctaa

SEQ ID NO: 26788 - DNA, 1469 bp, Heterodera glycines
agtctcaaataaattttgaaatgaaagggaaacaaaatttgacaaattggcgatggatttccatttccttttgcctttgtctgtcgctcttttctttctttccgttccctttcatttattcccattcaaattcattgtgtccatgtgatcctccttctgcccattgagtctttcccccccccccatttccataaaaaactgtccatcgtccgtcgattgtctgtccattcgctttcgctggcgttagggacggacgacggctgaactgttttcttccgctgttttatgacctcccacggccgtttcccacttcttctctcatcactccgactttccgccacttaaacaaattcatttccttcttttctcctccctttcccattcctaaaacatttccttaaaatttgctgctttttatgttgccaaatgaaaaataaatagtcaaacaaagcgatggttagtcgaaattgccggactttgctcttcattatttttattaaggattgaattcgccttttttcgtgacattttaccgttgttttcgcctgttcgaattaataggttcccataggaaattgagcgccacagtcgaccaatttatttaaatttatttgccctctggcacttggttcatcccttggggatttgcaatcttcgatcaatcatccggcccgtgggtcagcggaatacgggcgaccaaagagtagtgagtgcatagttttgtccactctctctctctctctccttcctttcgctctctctctctctctgcactctttctactttctctctatccctctcctcttctctccccttctatttcccctactgtctcccctccccctcgcgtcatcttccgttgctttttctttcgtcgtcccgcgagtgtcggcggttgtttgtcctcttcctctgctcttctaagggttaaaatttcctccttcctttttgtccattcgttcatttctctctcttccctttcctttcctttccaatgcattaaattttcatccttttcctttctttccttccttccttttatctgtcaccgtctcttttttatttgttgtcccaattttccatttttgacattctcttagcatttacctcaccgtttaaattaaatgtcattcactgtcaaaaaccctaaattattttgagtgttaacataaaaaaaataattttaatttttgctttacttctaagattattcaactgtgaattgtaatttgttcctcttttagcatatatgtttggcatttttgaggtttaaattatgtataatttgtgccatttgtgcataatctcagattggcacaactgacgccccgctgtgtatttaatactcagtgtcaagcataaatttaacgcacattttgtgcttcccgaaataaataatcctccttaatccccgattgccgccatgaaaaagcgttcgttcatttgcccacccttctcagcaggggcag

SEQ ID NO: 26789 - DNA, 1255 bp, Heterodera glycines
agcggtgtgttagtgcttgctgatacgtccgtggccgtgatgagacgacgtggtagggaccgtgcttggcctagcacgtggcttaagtctcaatgagtgtcagatcgggcaccgccagctttttcttgtttgtcattagttttttttccacttctgcagaagaatgaattctagtcttatcggtggatcactcgggtcgtggatggatgaagaacgcagccacctgcgataattagtgcgatcggcagaaacttgcactcagtccattcgcctccccatagcctcaacggagaaagaatcttgcctctagcagcattaggagcggtacattaccgacgcctcgcccctcgcgcaccccaagacttacgcagcaaaactcgcgcaccccttgaccgattgacttcaaatgttaaactcgcgcaccccttgtccgattgacttcaaattttacgggcagtcaacccaccaccccataaactgaacggcaaaagaattttgcctctagcaccattttgagcggtacattcccgacgccccgcccctcgcgcaccccaagacttacgcagcaaaactcgcgcaccccttgtccgattgacttcaaattttacgggcagtcaacccaccacccccttaagctgaacggcgaaagaattttgcctctagcaccattttgagcggtagattcccgacgccccgccccctcgcgcaccccaagacttgcgcagcaaaactcgcgcaccccttgtccgattgacttcaaattttacgggcagtcaacccaccaccccataaactgaacggcgaaagaatttcgcctctagcaccattttgagcggtacattcccgacgccccgccccttcgcgcaccccaagacttgcgcagcaaaactcgcgcaccccttgaccgatttacttcaaattttacgagccgtcagttcaccacgccctaagctgaatgaggggggtccgcgccgacggacggcggaatgatgggggggggggggtccgtcgaagagaggggtcccgccgccctggtggggtggggtccgcgacgatggcgagagagggtctgcgccgcccgaacggcggaatggtggggaggagtccgtagaagagagcgggtccgcgccgcccggacggcgtaatggtagggaggggtccgcggcagtggaaaagagggggtccgtgaaagagaggggggtccgcgccgacggaaagagggggtccgcggaagaaagggggaccgcgccgcccg

SEQ ID NO: 26790 - DNA, 631 bp, Heterodera glycines
tcgcccccgtctccccagcagggcttaatctgaaaatcccgtgaatcgcccccgtctccccagcaaggcttaatctgaaaatcccgttaatcgcccccgtctccccagcagggcttaatctgaaaatcccgttaatcgcccccgtctccccagcagggcttaatctgaaaatcccgtgaatcgccccccgtctccccagcagggcttaatctgaaaatcccgtgaatcgcccccgtctccccagcaaggcttaatctgaaaatcccgttaatcgcccccgtctccccagcagggcttaatctgaaaatcccgttaatcgcccccgtctccccagcagggcttaatctgaaaatcccgttaatcgcccccgtctccccagcagggccttaatctgaaaatcccgttaatcgcccccgtctccccagcaggacttaatctgaaaatcccgttaatcgcccccgtctccccagcagggcttaatctgaaaatcccgttaatcgccccgtctccccagcagggcttaatctgaaaatcccgttaatcgcccccgtctccccagcagtgcttaatctgaaaatcccgtgaatcgtccccattctccccagcagggcttaatctgaaaatcccgtga

SEQ ID NO: 26791 - DNA, 762 bp, Heterodera glycines
ctccccttctctcttctctccccctcaccccccttatcgttttgctctcgccttcgtctgaccaaagtctcgggatgtcaaaggttggataggaagtttagcgcatcccgcagattcggcggatgttgtccatgtgattagcagtcgttcaactcattatcaaatgtctttcgcgggctcatccgaaatgccacgacatcccaaaagacttgacgaaattttcaggtctaaacggccaatttcaatccactgtgccgatcgattgggcttacattttatttccgcctttatatttaatcggttaatatttgcattgccatcatcacgcacagctttccgctcttccccctcagttaagcactgctcaccctgtacaatttagaaaaatgggcatattcattcttatgagaatgatgaaaattttcgtatattcgtcagatctttaacggctttatcttttgttcggcgcacatgaagtcaagggcttttacgatattttatttgcaagggcaccattataagactatccgatttttgagtattttccaaggtaaatctaaaccagggctccggatctgtccttattagaaagatttgtccttattccggactattgttcatattttgttcttatttctgaaatatattcataattttgaaattttatggcggaatttcaatattttataaagaaaatataagattttttgcccttgatgttcttacttttgaaaaatttccgatccgagccctgaactaaac

SEQ ID NO: 26792 - DNA, 925 bp, Heterodera glycines
aaaaaaaagtttttgaaaaaggagaatctttttttctaagtgaatgctaagccaatttgacatttcagaaaaaaatttgtgggagtttcaaaattttcattacgttataactcaagtcattgactgaagattttaaccaaaatgctaaatttattcttttttttattgattctaaatgttcaaagtgattttgtaaccttataaccaaaattattataattttcgaatttatgttttttcatgtgttagagacatgaaaatagtacgccaaaacgagagaaaaaagaaatacgttattataattatttataacttttgagtttgagcacagacaataataattgagcatagaataatgcagaatttttttctctatcgctatgcaaaatttagcaaagatttaacataacgaaaaaaagctacacatagaaaagtaaaagttgtttttcacatcattaaaccgaggagatagtacgccaaagtgagagaaattacaaagaaaaagagaaacgacgagatagtactaggcttttctctgcacagtggcgcgtacccatagtgagttggcattgtccgtacaccgtcgtagagacatacggtttttgtatttttgtaataaattttgtgctctctgtccgtgtatcattttccgtaaaaaaattttcggtaatagtaccgatggtagtccccctttttcaaaaaataaaatttttgaaatttttttcgagaaaagattgtattaggggttttaagggtaggagaatccgaatccggcatcaatttcgacctatgtagaaccccggacccgaattcgagcaaaaagtagaaaatttaaattttccaatttctcttttttgccaaaaaaaggattatatgatttttattaatgaattatcgagttttagtttgataccctatatgtaag

SEQ ID NO: 26793 - DNA, 856 bp, Heterodera glycines
cttcatttgcgcttaatccaatccattaatccaaggcttttccgccttcactcgcctttcaccgaacgcttccctccgattctcatccatcgctttgctaccggccaaaaaactcagcgcgtcaaaaaaacgccacggcggttttacgttgacttcgcccatttgaatgcgtcggttcatttccttgagcctcttgtagaatatatccttcaaatttcgccattgtgaagccaaatcgtcgactgaaccgaatgaaattgccaaatcagtcgaattattggccaaatgtcaacccgtaaatccgtcctccaaaaagtgctgtcgaatttgttcgaatgcagcccgacgacaggccgaaattttgcttttgtccgttgcgcctaccggcaaccaaatgatttcgaattgcctcaccaattggatcagtcgcgcccgctgattcacattccattcgcaacgcccaagcggaggcataagaaactaaaaaagcaattttaccgaaggaaaaagcgcactttaatttccttaaaatttgatcactttttaagcccaacgaatcacttctgacaattagcggattaaactcgaacagattcttttcatatttagaaggaatttgccatcgcagcgaaaggcaaaataaagggaagtgaagtgaaaggggaggactttgttaggcttttgaaatgggggccttaggctgggctgaagggagtcgtggcctttgctttagcgtcgtttcgtcgctgggctttgcttggggaggcgagcgttttcgccgcattcgccgtgtcgtccgttctttctttcgtcgtcagcgtgtgcgggcagagataaacgaaatcgattttggaca

SEQ ID NO: 26794 - DNA, 1324 bp, Heterodera glycines
gaattccgcaatgtacgggcggacagtttgtcgtcgctctgctcgtactcctgcacgcggaataccctcgtgacgatgtagccctcgtccagcgccgcgttgagctcaatcgaagtgcacgtgctcacccatcctcgttgtctgtcattgtgctcacagtggtagttgggattcacaccaccagtcggattctctttggcacaagtgctgcagagcgggaaacaaagccgctctccaactttcaccggcagaacgggcacgtcgacgcgacggggtggcacaacccacactttgagcagtgccaatgggtaggggttgtctgctgcgttgcgccaatccacttgccggttcaacacatgcacttttggatggccaatggggtagcgagtgacgaaactaaatttcaaaattttattatttaaaaacgacgagcaccacacatacttaatatacgggtacaaggacgtgaagtcgtagtaggagatcttctctcctggtcccgctttgcgcagcagtttcagcggtcccgtccgccctcccatgaacgcgtcccggatcacgaacggcccatcatccacataatcagcaaacgacttgcgcatttctctgctccgctccagcatccgatggatatcgcattcccagtgtacgtccacgcggttcacttgccgccgcagaaattccagacgtttggcgtcgcgctcgcgcacctcccccgctgttttccccattctcaccgtttacggggtagtggcgtttggtcccccgcctaggcggaggaatagtgggcatttcttcttcgacggcagaagcaggaaggggttgttgcagcggctgtggctgttgttcaacaatttttggctctcttttcgggatacggtatggtacaggcctctttgtcggctcgggttttggtataattttgggtggaggcaagtatccggcctgcctggatgtggatggccgagggtcaagcgggaattcaggttcttttttcgaccgaggcagcgcgacttttggtcgtgaatcgggctcaaattttgatggttttagttccaactttgttggcttctgaggctctctcttggcggtaggacgcggtggtggttcaatttttgctttcgcacgaggcgggagcgggagtcggggaggtgaaggaggataataaaccctgtattttttgcggtccgaatcatcatatgcttcgtccttttttaatttttctgtatcactttccggtaagggggcagcagctgcttccgcaggaaggtcccgcacaaccggccgccgtcgttgtatatcgtgtcgccttttctcccactgc

SEQ ID NO: 26795 - DNA, 938 bp, Heterodera glycines
  unsure (1)..(938): unsure at all n locations
tagttcttagggccgcccgcaatgaactcaacgatccgtcggtcggtgtgttcgcgcttcatttggccaagtgcttcgccctctgcgacacagggaccacccatcttgttgacataataaatggagtcggtgtctaaagcatatttgtgtacagaaaacattttgtaacaaacataccgcagtagagcagctccgctccgtcaatcgctaacacctgctcaatgtagtcatacagatggaggcgggcatatgaagtgacgaacgaagcgaccggaagacagttggtcagcggggccttggcaaattccgcccgcttccgcacgacacagcggtccatgtgctcggacacgtggacaaaatccaacttgtccagcgacgggtcttcaagcagctcgtggaattcagccggcgtccgcgtgtagcgaatttcggttcggcccacacgctgcgcgagctttcccctgtaaatttttcgtttaaaaataaattttaatattaataagaccaaagtgagtttgccaaggttttggcgataaggcgcaggccggggttgaattccattttggcagggtccagctggatgccctcggtgcgctcaaagtcttccacaaattgacgctgctcgtccgtgacacatccttcaggccagcccgtcgcctgcactttgagaccgacaaatgtgttgacgtacgagctgaacagcgtgccgtcccactcgtcgtagtcccaaacctaattggtattttgtgcaaaaaaattttaaaaagtgactacctcaaaaaggtcagtgaccacatagccgagctgcagcgccttgttgagttcggcatgcgtgtaggccgtcacccacgaacgcttgtcatcaccgtgacggcacgntcgctgctgtcttcggtcggcacccacccacacagcggaaaggtgaagcgctcatcctt

SEQ ID NO: 26796 - DNA, 1633 bp, Heterodera glycines
aagtccgggaagctcggatgcctggccagcgctgtgtcattaccacttgctctgtctccttcgctgcccatgcgcacgcttgcgctgaacggagttgtttctgctgaaactatccgtctttacaagacggctgtaatagcggcgcttggcaacgctcgctagcagctatctggttgatcctgcctgaactgatgtgttcatttcaaagattaagccatgcatgtgtaagtttaacctgccagacagggaaactgcgtacggctcattacaccagctataatttacttgaccttgacttcttacttggataactgtggtaattctagagctaatacatgcaccaaagctccaatctccccagagcggagcgcatttgttcgccacaaaaccaagcgccctccgggcgtccagtgttgactcagaacaactaagctgatcgcacggtcttgtaccggcgacgtgtctttcaagtgtctgccttatcaactttcgatggtagtgtatctgactaccatggtgatgacgggtaacggaggataagggttcgactccggagaaggggcctgagaaatggcccctacgtctaaggatggcagcaggcgcgcaaattacccactctcaacgcgaggaggtagtgacgagaaataacgagaccgatctcttatgaggccggtcatcggaatgggtacaatttaaaccctttaacgagtatctatgagagggcaagtctggtgccagcagccgcggtaattccagctctcaaaatgcatagaattattgctgcggttaaaaagctccgtagttggatctgtgctagccgtccggtgcacactttgtgtgttactggtttggttggcttttctgccggtctttccccggcgttggcctttaccggtcggcgtcggtgggctggcgagtttactttgaacaaatcagagtgcttcaaacaggcgtttcgcttgaatgttcgtgcatggaataatagaagaggatttcggtccgattttattggttttgctgaccgagataatggttaacagagacaaacggggccattcgtattgctacgtgagaggtgaaattcttggaccgtagcaagacggactacagcgaaagcatttggcaagaatgtcttcattaatcaagaacgaaagtcagaggttcgaaggcgatcagataccgccctagttctgaccgtaaacgatgccaactagcgatccgccggcggatttattcgccctggtggggagcttcccggaaacgaaagtcttccggttccgggggaagtatggttgcaaagctgaaacttaaaggaattgacggaagggcaccaccaggagtggagcctgcggcttaatttgactcaacacggggaaactcacccggcccggacaccgtaaggattgacagattgatagctttttcatgattcggtggatggtggtgcatggccgttcttagttcgtggagcgatttgtctggtttattccgataacgagcgagactctagcctactaaatagttggctcattgcttctgtgggcacaacttcttagagggattttcggtgttcagccgcacgaaattgagcaataacaggtctgtgatgcccttagatgtccggggctgcacg

SEQ ID NO: 26797 - DNA, 1356 bp, Heterodera glycines
ttacccattaaagcttaatttgcgtatcttaatgtttttatttactggaatattcgaattaaataaaaagttaaaatttttacaatcaggaatttaaaatcaatgattataaggggttaaaatattgcatggaattacaaattttacaaatagataatataaaataatccatacttcagaagaagctaacgcaatttaataagtcacgtcaacaagatatgccaaaatttttcttttttggtgcgagagcggttaaataaatttacattataaataacgaagactattttagtattccatgataaaaaagtgaagagaatattagaaatatatcaattattttagtctatggtacaagccaatcttttttatacccaaatattaaatttatacaaaaaatgaaagtcaattacacataaactaaataataacgattctaaagcaatcacgaacaaaggtgtctgtgtacacaattgtatcgaacaacaaaacgttaaatagaaaaaatatgattaagtttaaaagagtatgataaaaattgatcaaaaaatcgtacaaaattttatgttacagtcaaaagtgttgtcgccaaaggaaagcgacaaaaaatcgatccgaagatcaattttgtgatgactaagccccgcccccctctggtcgatataaaaggggctcattttttccattcgttagcattctaccattttttctctgtaatcaatatagtttgttcactctctttccctttttgtaataaagtctctttgaaagagctttgtgcaatttaaaaaggtatattttaaggagaagaattctcataaaatcaaaaggtttatttgtgaagagaagaaattcttctctgtcacaaatagaagcaaaaccaggactcatcctttctaagggtgagccaaggaaaggagaagaagcatctcctcttacctttccatttgctaaaagactccccccttttgccgggtgagtcagcttccccttctgccgggaagtacagattttttgcggcctttcgccgacaccagtaacgaattaatgaagaattcgattttcggtacacgaaataaataaagaaaattttgaaagagcctataaaaatggcaagaaagttgatttttaggggtgcatttttgaattttttgtgtttttcttagatatttttttcaaaaatgccaaaatatgtgccaaaccccgaaatatgtgcgatatgtttttatgtgcgaaaacgccaaaatatgtgtttttatgtttttataagtcgctctaaatcaaaaattgttcggagaaaatgctatttttgggcttctctcgccataactaagccgcaaaaaaaatatgttaaaa

SEQ ID NO: 26798 - DNA, 775 bp, Heterodera glycines
tgaaagaacggaattccttttgattttcgttttgcgctttttgaatgacatgacgtcattcttttacctttctgtgttttgtatttatcaaaccgtgacattacaattaatgaaaatttcggtataataataatattcgtcatggtaactaattagtctcatcatacaaactaattgtcctaaaaatgtgatcaatcgattgatttgttcagctaatctatcgctgaatgcttttgggaaatttgtgctcagttgcgccgaacaacggagccctgaagggcacggcaacggcggatcaaagccatgcgcttgcgacgtccgccacatccgccaccgcatcctccgccgcatccaccaccgcatcctccgccgcatccaccaccgcatccggatggagcaggcgcttgaggcggaggcccttcgcatccgagcgtcagtttgatggcaccgccaccgcttggtggaggagcaccgcaccctccgccgcatccgcaaccgccgccgcatccgccaccgcatccactaccgcatccgcatggagcaggcgcttgaggcggaggcccttcgcatccgagagtcagtttgatcgcaccgccaccgcttggcggaggggcaccacatcctccgccgtatccgccaccgcaaccgccgccgcatcctccgccgcatccgcatggggcaggcgcttgaggcggaggcccttcgcatccgagcgtcagtttgatggcaccgccaccgcttggtggaggagcaccgcaccctccgccgcatccgc

SEQ ID NO: 26799 - DNA, 739 bp, Heterodera glycines
actaaattgtgattataaaaattaatgtttgagattatctttataaatttttttagtgacacggcaaaaagttgacctaaaaaattgagaaaggatgggaaaaacgatgcaaatgaagaaaaattttcagagtgtagcaaaacaaaaagcttttttttaataaatttctactaatttgcatttattgacctctctaaaacgcctcattcccgaaaattccttatcgatgaataattaattatttaattcattaattaatgggacggaatgggctgaggcaaaagtgaaaaatataacgccaaatagcgatgcttatagaagggatgtgatttttagttatttaactttttatgctgctttgtttcgctgagaaatgcacgaaaaacacattttttgcccagaaattctcatgttaatggcattttattcgtaactaggaatcattattttgcacttttcgccactaaataattacactatttgcactttgtcattatttatgccatgtttttttttagaatttcataataaaaatgggtacttttccgttttggggatttaaattaactacgtcaacaaaaagcgcgcgccatgcctatccattcgattatattttggcccaaattgttgcttctatgactcccaaatagttgaaccgctgtttttcattattcgtcgcactttttgttgacattttttaattcaaataaatgtggggcccccaaacggaaaagtacct

SEQ ID NO: 26800 - DNA, 187 bp, Heterodera glycines
aggcggaaggcaacccgcccggtcgggcccggcgccagggactcactgatgcgggccagaggtcgcatgagacgcaggagcaagtccgacatgacgctgacctcgatttgttcaatgctgaacgagtatgttcaatggtgaacaaaaagcaagaggctgcggcgccggggccggtggctcccgtgcg

SEQ ID NO: 26801 - DNA, 1500 bp, Heterodera glycines
acaattcattctgaaagggaaaaacgattaatgatgcccgaaagccttccattgcctctaatttgggcttcaattcgtttttgatcagtttgtgagccgcttcttggaagtccaatgacgattggatggtcaaataaacgttgcgtcgaaatgccacctgaaaatgccttcgattgttaaaccgtgatatgctccaggctgaccatgtcctgttccgtcatgtccaaaatttccatgccggtggtcgctaaacgcaaatttgtgttcccttttcaaaatgtcctccgtttggcactcactttccgctggctgttgctcgtccccctcctcctcttcgtcggccccttcgccctcagattcgtcagcatcgccgatgatttccttccgaatctcttcatagtccgcctcattcttctcaaagtcggggtcgtacttgaacacatctgaattgaaccaaggcaatgagtaaaaaatctatttcccaaggttttgcttcctttaattgaaaatgtcgtacttaaatttatttcggggtcatagggccttccgtcttcgggatttagctgaaccaaatgcgcaatttggtcgtcttcgtcgatcaaatccaactcttccaacattgtcggatagttctaaattgattttatggcttttgttaactaatttcaatttccaacctcaaatttggtcttccgaatatggaacattgtttcgatcatgtactgagtacgttcatggattgagtcgcaatcgttgagcacggcacgaagacgctcaaagacagctgaatagaacggcattatcggaaacaaataaatggccaagacaaatgatagtccaaggttttaaattttggggaggagtgctgatttgaacatgaatttgtccgactattcaattctccataatttatttttttataaagtgcgaactgtgccaaaaaacagatgaaacaattttattaccgattgagcctttcggcgtcaccttcagaagcattgccccacattccttcagcaaagtcacagtcacttcaatcgaatcgtcggtcggccgttgcatcagcaaaacgagcatttccagcacaataatttcgtgcgcctttaattttgtggcaattgtaaggttccgtccgctgtccacccaccactctttggttggccaaatgggcgatgaatcggcacgccgtcacacaagtcattttatcatttcgacgaaaggaccgtttgaattggatgatcagacgacgcagcaccaactcgccaatgtttgggaatttggagttgacaatggcaacgagggcggcgaacacgtgggaaaaggaaggcgaaaaggcctgcgcttggataatcgaacgggcgaacaaacccctggggaatgattggtgaattattaaacatcgggtaaaaaacgaaaagcggcttttagccgagggtggtcattcattggatttactcataagaaccgacattccactgcttgtgaccgtctcgcatatcg

SEQ ID NO: 26802 - DNA, 1706 bp, Heterodera glycines
tgtcccctgtaagggtcgtcgggaccgatggcgaattcatgcgcttgagcctttttgaaataaggaagacagttcctgaaggtatttaaaggctcggaccaatactgggatgactttgttcacttgtgtgcccagcccttcgccccctctctctcccatcggtcgtaatctttcggatgcccacggatgtaaaccattgcattcagcgaacttgaaccaccccaaactcgtcctctcggccagtaaagcactcgtccgttcatgttctcctgaggcatcgtgaaatacatcctggaatgtggaatcaacaaactccaagctcaaaatgcagcgactcccaaccaattgtatttgtcgttgcataaattatacatcagtgccgctggcatatgaatctgagtgtattttgtttatttgtcagtgctaacctctcacaaatcagaattcaccttccaattccaccaattatcttggggaccggcctcgacgagcaaaacgcgattgtccggattctcagtgagacgattggcctaattgttaggtaaactattctttctatttgttggtaccttcccaccaaaacacagcctgctgagcctgcgcccacaacgatgtgcgtcggtttaacgccctcggggagatggcgaacaaactttccatacttgaaaaatccttctctccaacttcggttgtgatacaaattagacgtataatacctcaaagaggaaaccaaaattgaattttgaataaaaggcgaagcaccacaaataagcaaacgcattacttaaatgaatgtttaaaaaaaatcttattcaaacaaagggaaataataactgacagtgtcaaacacttaaagaggaaaacttcagaacaaaagcattttatcgcgcagaaatatacatatgcatatgtgactcctattaaaaaccagaatctcacgatatatctaatctaatcatttcttcacacgatgaccagtcggataggaagtcggagcaccatgaaccgatttcaaatagtcagccaatggttcgaaaatgtgtggcgtttcacctctgagccattttttgaagcgaacatctctgatcttccagaaccgtttattctggagaaattgggttcttattttacaagtccaatcaacaaaaaataaaatattttttcattttcaaaacccaaattagtatcaatcaaaattttaagtctagaccttttagatattttcaagtataatttaaagcataaaggattataacccaaaaaaccgagagtagtccaattgtttggacttatcaaaattacattttaaattatattattaaatcccaccttttttgtgcgcgaaacacattcctgaaggtccctatgctcaaggtcgcaatataaacggcccaattttgcaccaaaagcagtaaaacatctaaccgattgatcttcgaagaatccacaatcatcgccaggaactaagcaagactaactttaaccccaacatttcaagcttcatgaaatcatttactttgtctgttgtctatagattgtcccctcatcaacggaacgaaccaagtttgggcgtaatcattcgttttcttgaaagtgtctcccatgtaatcgtgaccctcataacctcgcgaaactgaacatttaagtcacaacaaaattttgtgtagacttacgttaaatgaggcggattaagtgtcatcttaaaa

SEQ ID NO: 26803 - DNA, 1056 bp, Heterodera glycines
ttgttgacaaacgacacttgggggacccgacaacgctgtgatttatatattttaacttctttagattactcactacagacaaagctgaacttgtccaacagaaattcgggtccagcaggggccaatcacaattacgagccgacaaacaacaaatttggcatttggctttgccatttttgcatcaaagtccatggtttttcaaaatgccgaagtcacagcaacacaacccaaacatttacgaaaatatgccgacctctttgaaaatgttgatccattcatttgttcgtgatgcattatgactccggcaacacaatcgcttcggctgcccgtcttttgtcggagtgtgcaaccatttggacaacatttgggcagaagttgcatttggcccatcatcaccgatcaaatcggggaacaaatgcccggaatcgacggagtaaatgttgagatcagtgagaattgttggcgaagtgaggcgaagcaaaatactcagttgaacaccatcggaaaaggacaaatggcgaatgtttgtcgcaaaaaggggccaaattcgacggacaaaaacattccaaatcggttggacatcgattttgtatgacaacggcaaatacaaatacaaattggtgcctctgtcaaagatttgcttatttgaacggagaaatgcgatgacaaagtgatcaatgtgcctgaagaggaacatgattttttgcataatatctaaatgctttggctctattggctgtttacacgaccataaaaaagacaacaccataaaatatccttataagtttaatgaagggctcccaagtttttttttcaaaataagacaaaatggttgaaaaactaagattcgggtgctcccaaaaataagatttttctaaaactaatctacatagagcgaggaaacgcaataaaaacatgaaaatcgacttaaaacaatattttattagcgtaaaaaaagagctgccaactgaaaattttcaaaatcagcatttggccgacaaaaaccagcattttggaaaatttttattcaaaatgaaaaagtcaataaaagttttt

SEQ ID NO: 26804 - DNA, 1463 bp, Heterodera glycines
  unsure (1)..(1463): unsure at all n locations
cggatggtttttntgggcgaaatgaaattggcctgatgatgggcctggcgcacaactctaaaaaacttctaattaattattttgttaattctttaaataatttcatttataaataattacagatcctcgccagtgaaatttcagtgccaaaaagaaagaattaggacgagaggctgacagctagatgatactatcaacaagttcatatgagaaacgaggaaatttcagaaaggaaattcctcaaaaagtctttttcttcgtaaattatttcgggacttttcgtttatgcgttctaaacaattatttatcttctaatggcttccaagttattctgtgctgatccgcgtttggccaatttggaacatttgattttaagccgcttgcaatattcaaaaatgacaaaaaatttattgactgtggaagagaaatcccattaggacgcatgaacaaattttcgttttctgtccaaatcaccgatttattccattctcgagctcttgtccagtttaggccccataaatttttttttaatttttgcacttaatgcaaaaaacataccagtaataagtttttggagtcgctgatcacgaatctggcattcatttcgaccaagtttaaatgaattttgctgaaaagtgacttttcgatttttttgttcgagttcggctcaggggttcggaagttgtcgagatggatgtgggattagtggttaattacccagaaagcctacataacagggatgtgcctaggtttcgcttttcgcatttcgccttattcgcattttttggcgtttcgcatttcgctttttggcgcgaaacgcgacttttacatccctaagaattggattaaattcccataaaatttttcaaaattttacctataaattggctaattttcagtgaaaaactgtttataaatgatcaaaatttccaatttttttccccggcggcgcctatcggcaccgccgcgcccaaattttaatcaaattttcaaaaattttcccggcggcgcctgccggcgccgcctgcccctcttccaaaaaagtttttttggagcgctttattgatttttaaatttggaataaaatttaaaaaaatgatttttgctttgtgattttaactattaaaaagttgtagaaaaaatttcgctttcgcattttcgcatattttagcttttcgcatttcgcttttttttcatttcgcatttttcagtttcgcaaatttcgcttttcgcatttcgctttttatttttcaatttggcccatccctgctacataaggtgtgtttttttataaatataaaaaaattatggtgcctaaactttgcaagagccccttctctatccccgcacaatgccagactaaaaaatttgtgtactaaccagggctggacgtaactgattttcaattacggaaatccgtaatccgtaattacggcaattttttcagttacggccatccgtaa

SEQ ID NO: 26805 - DNA, 1453 bp, Heterodera glycines
agaaggactgaaaaatgagtaaagtgtgattaaacgatgagataattaattgattcgatcaaacaaattaagcataaataataaattcaaaattatttaatcatttaaaacatattgtaaataaaaacggaaaaacgccgttcaattccaaccgaaggaaacgatccccccaggccgttccggggccaattcgtgtcaatttagaacagaattggacgacgaaatctatgaaaattaatcaatatcaattataatatcattttacaatcataacatttgaacatttaaatagataataaaataattaatttattgtgattaaatataatggcaaaggaaaaggaaggcaattagcattaataaaaggcaattaatatatagtaatgtattgtataaataatatgataagttgaagaagccaactgagttaggaggcagcgaatggcatgcaaaaggaggaaatactgtacaaataaattaatgagtgagcgattaatggcaagggttcgccggagacttgcttttattgccggcctcctctcccctcgggggccaactcagcaactggcgccggacagttcggctgaaagttcaaaccgtgaaatgaaaatgccacagcatgggggtaatttatgcgaggacctttcccaatttggcaatgttcggcttcggcgccaatggcggcgccttctgttgtgttctgctgagggtcgatgaacgtgccgccggccttttgagaagagaagtggcggcagtgtccgtcaaatcggcagtcgttgtcgctgtctttggactgcggtccgaaggcgcaacggacggccgagggatcgacgactgtgagggggtcttcttcagggagaagcgactaaagcacataaatgagtgccacaaatgcttttgaccccctccccctcccctcgcaccttcgttcctcgtcgtccgttttaggacttttggtcgtcccacactccacgaccatccaatgggcagcgaattccgcattcacgtccgcgggcagttcggcagtgactttctgctgctgttccaaaactgcttcttcttcttcttcatccgctgtcaaaaggtcgtccattttttgtccgaatttttgttgatcttttggccttgcaaatgcttttccttccctttttctgttcggatgcggcatcatcaaagcgatgctttcctccaaaaggcgatcatttcccgctgaaattggagacacttaccaagaaactgtggttgtcatttcgttttgtttctccccattttttttacttctgactggcgatttggacggactgttcgaagagattggcgttgtgttcagggcaaaatgcgcatcctccatagcaatgcattggatcggtgcgtgcggtttgggcatgtaatttcggatgacctcatcaagaaaggcattgccaacactgaaaggaggggatacggtcaatta

SEQ ID NO: 26806 - DNA, 893 bp, Heterodera glycines
attaattccaatttccgcagctcttagggtaaggaaaaaattttgaagaggctctccggaacggattagcatcggggttacgagatagaaaattgtcctaaaaagagatagccatttttctgagaattaattcacaatttccgcagctcttagggtaatggaaaaaattttgaagaggctctccggaacggattagcatcggggttacgagatagaaaattgtcctaaaaagagatagccatttttctgagaattaattcacaatttccgcagctcttagggtaaggaaaaaattttgaagaggctctccggaacggattagcatcggggttacgagatagaaaattgtcctaaaaagagatagccatttttctgagaattaattcacaatttccgcagctcttagggtaatggaaaaaattttgaagaggctctccggaacggattagcatcggggttacgagatagaaaattgtcctaaaaagagatagccatttttctgagaattaattcacaatttccgcagctcttagggtaaggaaaaaatttttgaagagggtctccggaacggattaacatcgggggtacaaaaaaaaaaattggcctaaaaaaaaaaacgccttttttctgaaaattaattcaaaatttccccagctctttggggaagggaaaaaattttgaaaaggctccccggaacggattaacatcgggggttacaaaaaaaaaaatggcccaaaaaaaaaaaaccctttttttggaaattaattccaaattccccccctttttagggaaagggaaaaattttgaaaaaggtttcccggaacggaataatatccggggtaccaaaaaaaaaaaatggcccaaaaaaaaaacacccctttttttgaaaaaaa

SEQ ID NO: 26807 - DNA, 2134 bp, Heterodera glycines
tgggctggggatgagcagatttacggcacaagccgcgaacgaacgaaagaatggcacggagaatggggcagagaatggcagggaatgtccggccgcaacagaatcccgcagagagagagagagagaaagcgaagcaaaaagcaagttttggtgaaaagttgagaatggcatgacatttgacattttggcatgatttgtttcaattgccaaaacaatgtgtgatgacttcaccccactctaattgctgtctgtttgtccatttaaaattgcgtttgttttgccctctcaaagttcatgaccctctcccctcaccccgcccttttgtcggtcactttgttgtcgctcgttgaaagtgtctctcccctcgggcgccttcttttgacacctcttggatttcttttcatgaaagtgtgacggcgttgtgtggaagggatcagcaggaaattgccatttcccaggggggatgtgcacttttcgtaccattcactcgccccccccgtccaaatgtgtccctttgtccccgacaaagctcggatgagtttgggtgagagttattgagagcgggtgagtgaatgagtcgggactaattagagggcgcatccgaacaaaaatcgagcgaatgggagaagaaagggggggtgagggaatggcatcacaaaaaagggcaaaatgatagccatggagaggaaaatgggagaaaatgggaaaaaggaacaaaaatcagagaattgaagcagcaaaaaggcaattttagccaacaatggcaaatccctttttggcatttcgaaatttggtgttaatgaaatgtttgcttcttaggtattttaaaatgtgccttttccttcgaaaatgccagtgttttttcagcggtccgcgaagatcggatgcgcgggggccgcaacaaactcggcactttctacaagcagcacagagccaaccgaaggctttcccagcaccacccccatggcacagccaacggcggcgggacgcgacattcgaatggcattgagcaaacgcagcagcagcacattttatatggcaagtgatcaagcaaaggacaaaatttgaaatctgagtaattgacagaaacgagcggaagactgccatcggtttgtgaagggaacggcagccgattttcgaccaatgaaattaatgccaatggggcgacgacgccggtggcgaaacggcggacaacgtcggcaaagtcagtggggagattggctaccaattaattaatttatttaataccacattaattatttcaaaatgccccatcggcaacatcaaaggggaccattccctttttcccctgccgcccattgcttccatttgtccgtcctttccctccctctctctgctgctgataatcctcggccctcaaaaagcgccttcattctatgatccgatgcgcgaatattttgcctattttaacctccttttgtccgagtgcgatttttatgcataattaacattggcatatgaaagaaaaatcggcggattttgttggaaaaatatgggaaatttattagggaaaggccaaactgaaaaatgaaattgaaagcgaaaacgaaaacgacgaaagccatcccttaaatttatgtgaaattaccaaaaattgggaatttttaaaattatgtcaattatttttttaatgaataattttcgaaagtgcacatttatatacaattctttgcgttgagttttctcctgaaaatgacctccgtcggcgccattctgtggcattttatgacaaaaaaagaatggaaatgaaagggcatttttcaatgagtgcgggtgaaaaaatgttgtgaagatgaaggagatgatgatgatgatgatgaactcgagatttgagagggaaggaccacattattatttgtttgtccatccgttcataattattcgttcgcggacaaatggggaaggcggcatttttgcgcgaaacaaagcaaaaatagtttttcaatgaatgagagagagagagagaaagagtgggggagagagagagcgagagagagaggggggagaagagagagaggggagagagagagagagagggggcagcagagagaaaagagagtagaaagagagtagaaagagagtgagagagagagaagagagaggaataggggga

SEQ ID NO: 26808 - DNA, 624 bp, Heterodera glycines
aaacgggcgcgaagcgcccgttatgaggccgcgaagcggccgaatgttctaaaaaaacgggcgcgaagcgcccgtcatgaggccgcgaagcggccgaatgtccccaaaaaaattaaaaaacgggcgcgaagcgcccgtcctgaggcttaacagccggccgcgaagcggccgaatgaccccataaaattatgaaatgggcgcgaagcgctcgtcctggtggttttatcgacaaaaataactccattaaattgcagttttcgtatcttggtactcatttggctgcatatctgtagtaaggaaaaaatattaatattcctttttttaatatcaaaaaaataatttttattgtatttttaataattcccccagaaaaaatttaatcaaatttcgcagaattttattatgatacaacaaaattcagtggtaattttcagtggttttatcgacaaaaataactccattaaagtgcagttttcgtatcttggtactcatttggctgcatatctgtagtacggaaaaaatattaatattactttttttatatcaaaaaaataatttttattgtatttttaataattccccccagacaaattttatcaaatttcgcaaaatttattatgatac

SEQ ID NO: 26809 - DNA, 924 bp, Heterodera glycines
ggccaccggcagtcgtgtaagccctggcccccggcaatggtgtaggcccggccccccggcaattgtctaagcccgggcccccggcaattgtctaagccctggctcccggcaattgtctaagcccgggcccccggcaattgtctaagcccgggcccccgacaattgtctaagcccgggcccccggcaattgtctaagcccgggcccccggcaattgtctaagcccgggcccccggcaattgtctaagcccgggcccccggcaattgtctaagccctggcccccagcaattgtctaagccctggctcccggcaattgtctaagcctggcccccgacaattgtctaagcctgggcccccggcaattgtctaagcccggcccccggcaattgtctaagcccgggcccccggcaattgtctaagcccgggcccccggcaattgtctaagcccggcccccggcaattgtctaagcccgggcccccggcaattgtctaagcccggcccccggcaattgtctaagcccgggcccccggcaattgtctaagcccggcccccggcaattgtctaagcccgggccccggcaattgtctaagcccgggcccccggcaattgtctaagccctggctcccggcaattgtctaagcccgggcccccggcaattgtctaagccctggctcccggcaattgtctaagcccgggcccccggcaattgtctaagcccgggcccccgacaattgtctaagcccgggcccccggcaattgtctaagcccgggcccccggcaattgtctaagcccgggcccccggcatttgtctaagcccgggcccccggcaattgtctaagccctggcccccagaatttgtctaagccctggctcccggaaattgtctaagcctggcccccgaaaattgtctaagcctgggcccc

SEQ ID NO: 26810 - DNA, 1312 bp, Heterodera glycines
cctcccccaaagacggtcagtgcacaataactgctgcaatttctcattgtccattgtcatgggttttgcgccctccaacggccatcccttcaacatccaaacttccaccagtcgatgaagtgtgaaattgaacaaatgtccgtcctttatccttccctcctcccccctcagtccaccagtcgcgccattctggagccacattagtggaaatgagaagtgcgaagagttgagggacagatgaattggacgaatggagagggggaaaagtaggaaagagtcgatgaaaacattttatagttgaacaaataaaagatgacgatcctttcgcgactgattgtgagctgtcaaagatcgtctaaagctgatttttccgggggcggaccacacggctgaaccatccgacagagcatgttgtacttcgttcgagcacgcgtctcattctcacaaatggccatcatactgtaataaaaggaaaggaatgtaaatgaaatcagacgaacggacacctcaaatggtcgggatggccaatgattgaagcgaaagtgtcacgatgctctgagaaacaaattcaattaacactttgaagtgcaaaagcattgacagtagattagaagccaaacatttaaccgctaattaatgccatcgttaatgcttacggttggtgatccaatcccagcgagaactgtcggcatggcccgtgcctgtgtattttgactgaagatgttccaattgggccagcacatggaatctgagaaagaaaaagcgtaaacaacagcataggacctttgaccgggaatccatcgaggcgaccttttttaactttttttcaatttacgaacataacctcggttcatttgcgccacctgttgtcattgtacgccaaatgaggacacaattaaattctgtagaaattgcaaaacataattttcaaaggaaggataaaaaacttaaaaataaatatgctaatattaaacaagcatcagtaaatatcaaacagaccgacagaatacattatttacactcggaaatgaacaatcgtttcgaaataaattatcttcttggactagacaaaaaaagtgaataaggcaaatgtttggggaaacggcaaagaataacgaaaataaaacagcaaatgaaaaaacttgtcaccacccatcattgattcattggttgcgcctgctgttcgaatgttccaatccagcaatctcttccaatctgaaaaattcgaaattcaaataaacaatttaaaattgttgtacgtatgtccgtatttcaagtgcacaaagatgaaaaccacgccaagacaagcaca

SEQ ID NO: 26811 - DNA, 247 bp, Heterodera glycines
agaaatatgagaagaattcgtgaaaatgttgcgcactcgccctttaaaggaaaggcaattctcaaccttacagcccgtccacttggacagaaactcaattttgacgaggaaagtgaaacccatcgtggccagcataattagtgcgaagcacacccaacttggaggagggagaggagaggggtaaacgctgcaggtcctgctcgagcggccgcccggggatcgatccccgattagtaacatagatgac

SEQ ID NO: 26812 - DNA, 962 bp, Heterodera glycines
  unsure (1)..(962): unsure at all n locations
ccccccccccccccgcaggtgaattaaaggaaagtcaacagatggagggcaataataataaggacaaattgagacgataaagcatccaacgagaaaaacaaaagccgtcaaaactaattaaatgacagtcattagtcactcattaattcactgttctttcccagcaccaccaaagcgcacttagtcatcacaaaaggggcaaaaacattgacagatgtttgagaaaggggcagaaattggccaaaaaaatgcggggaggggtggcaccgcaagggattttagtcacccggacgacgcaatgggacggacggacaaaggccgacgaaagaaaggcctttgatcagagagggccaaattcttagtcaataaagcggtaattttacctttgactttccatttttaggctaatgttctgattttgaaaagttgagcaagatacccactccaacgtgaacaaatgccaaagaaagacaaaacgaaagccaaagtaattaatgaagcaattaaagcaaatgacatttattctgtttcctctttatacggtctgaataaacaaatgtataaatgtgttcaaccaaatcacagtgaaaaggcaaaacaaatgccatcgttttgctcaagcggtgcgattcagcgagaaaaaaagcacctgaaattaataacaataagaacacgcttcgaattattgaattcactgaaaatgccggtggcgtctcctcccttctctcctccctcgcgccctcccctccttactctctcctctctattctcccctccccacctaatccctctctcctatcctcccttctctccctctctcttcacctccttactctcctctctcccctcttccctgcctctctcttcccctcccctccctactctctcctctcttttcccctcccctcatactctctcattccatcacctctttgcccgcttcgttngttttctgaactgat

SEQ ID NO: 26813 - DNA, 1506 bp, Heterodera glycines
  unsure (1)..(1506): unsure at all n locations
aaaaatttaatgggttcattaggtttatttacgtactgcaacgcacctaatctccacgattgtcggctcgacgtacaaatttttccatggtattttaagcaccaaactttgaacataaccaaaactcagcttgaccggcaaatccaattcatcaagcgctgtatctttgatctccaaatgattaagttttacatcgcctccccaaatgccaatgttcagctgggacgcatttaaattgtccacataagtgcccaaaaagcgattaagaagatccgcgacaactgattcaaataccatttcaaatttttctaaaaagtttcatcacaaataatgcgtccgtgagaaacaaaatgagtttttcatattaaatcacaaagttgagattttttctaccaattccgaatctttaacctgaaataataagtgataaaattggtcaaaaaccaaaatgtgaacgcttttcagggtcgcaaatgtttaagttgtaaaaattgcgcaccaaaagggtctctcttttgtttttaaaattagttcagattgatttcgtaattgtgattctttgttttgtgggttagtgagtggcgaaaccaacaaaaaaggaaaacaatcggaggaaaacgatgcgtgtggtatttttaaatatgtataataacaaaacataatgccaaaaagaaaagaaaaaaatgggaacgaaggaaaacggcttacaggaacagcaagaattcaagagaaagtaaagcttgcttactaattgctgccgtaagatttgtcagaatttgcaagtcaacaacaagctttcacttttttctgttgtgtttgtccgacaatttcttttttatttgtctattttaaatttggtttttaggtttgtttattttcaatttttttgtcttcgattgtttttccttttgattccgtttctgttttagaataacactgcaattggcttgtttcgttaattaaaatgtggcctcctcctccgccaatgcgccatccctcccaatttatcaatggccttggtcgtccccctccaccggtgtttccgtctcgtgaacttgctccgatggattatccgccgggtccgtccgctgctcttcctccccattttcatcccccgccgttagctgccgtcggcacttcgtttggacccgatgaacgctcaatgccgccatggcacagacgaatgggtggcgagcaaccgttgctcaacgacagttggaagacggcggcggattcgtcgtggcggcaaccgccgcgacattttgggccatattcaagtgagccgagtccttttagcagttgaattttatatttgttgagacgatttcaggccggtcccttgattttgacattcatcgttttacagctaaattttggctagttttcccgaaaccgtgactanatacctaccanaaatcaatcgatgctaggtatggtaatccttttttcatccaacagatcatgaattttaccgccagcagtacgcccaacttcctctgtctcgcc

SEQ ID NO: 26814 - DNA, 721 bp, Heterodera glycines
tagattattttagtttttagcttataaattagaaaattagatattttccgagattttatgccacgagaatttcggatggggttaaaccaatgatccaggcgtccttatcgcagaattccatgattcgactacaaaactatgggttttcaattcaaagttaaggttgaaatatttttaaaattgtcagggatttaataatgcaacacccaaataaaaatttgcatcaaaatttgaatattgacactgattcactaatctcttccaaatcactccgtcccgccgccagcggctggcgcttttcctttcccgcaaaatccccccagtctcgattctcgaggatgagaccaaaaaagttactgcacaccaccatttaatcccttcctatttgccttcccgatccgtccagagacggacggctcgctgtccataattcctcccacatcgttctgtttgatgtgtgtcccctctcccgccgatctgcccccccccatcccccgccctctcccggcgtccgcgcctttttgctgctgccagctgcctgaagatttcttctgagccaattccagccagccggcccagcatgatgctgtggtgcgcattgtttttctccatcatccacctccaccacctccctatcccccaataattattcttcttccagcctcctgctgtccagtccatttcccctccttctctccctcccccccccctccctcccggt

SEQ ID NO: 26815 - DNA, 869 bp, Heterodera glycines
aaacaaaacaaaaaataataacttttcgcattaataacttattgggccagggattagtaacttttgccaatgggccaatttgttgagattcaaataaaccactaatctgtaatcagggcctacggcccaacatttccccctttgttaattggtgaatttttgggcgctggggaattcgtctcctacctatcacttttttgtgcttcgacgactttatcctctgctttacaaaacccaaaaaacacttatttttcattgcttttccattcgtttttcgttaataaacccttttttgtggtgaagtcttgcctcttggcttttccgctttcgttggcttaaccatttccccctcgttccccattgcttttcgccccccccaccgtttgctttacccattttgctccattggcttacagggactcagtcccaatttgaacttggctttaccatttgttggcttgtcgggacccaaatcggaacccccgggcctttttctccttttcctggttggcaaggcatttacccccttgtccatcacacgaagggtcctgctcactgctgctgtagacgctggacgatcgctaaagggaaagatgaaaattgacgcgaaaaggaaagaaacggaagtggaaaatgagccattgtaacaaggaaaacaaagagtcgatctcatcggaaggatgttacactgacaatacacaaaaaactcaatttcatgcagaaatatgcgaagacaccccttgtacgtgtgtgccaccaccaacggcttactttgcttgctctttcgctgtccactgacgattccttgtcctttccaagtgtcaaatttgccatatcctgcagcaccgcacttccatttgaaggctgat

SEQ ID NO: 26816 - DNA, 876 bp, Heterodera glycines
gattttaaaaattcatttgcttctgttttagattgtcgcgattctcaaatcgtttaaaacgaatgcggaggagcagtggcgcatcagacgaagagacggggaagggaaaatgtaaggggacagaccgatccaagggcgtagccttggaggggctgacaaaggataggtacccaagtaaattttttgagaattttaagcaattctcttaaaaaaatcacaccaaaatcattttttggcgaaaaacggctatagattcccctaaaacacaccccctaattaattttggatttccaaaaaaagaaaaaacaaacctaagaatcgaatttttgaattcagcccccccccccccgaatagtgtttcatattttttcccatctttcagctttctcttcacttcccatgagcatttgtccgaggcgttaaaggtacgtctggtggatgaggtcggcctggacgcggtggcgaacacggaactgcgcgacttggcactcggcaaccgcgtctgtgccaacaaaaccgcacacgcagtgccggcgatgagtgtggccgagtgcgccaacgaaattttagcagatttgttgctgttccaccaatcgttcagtgagtgccttcaatttcaataccactcataaaagaaatattcggagcataactttttttttgatctgcgtatactcgggtttttattgactatctaattcaaaaatgaaagcaaaacaaattctaaaaatttggaactccttttttaaaacatttgtccatgcatattttttccgaattgaaaatttttttaattcctctggataagctctggcctcatcactcattttgtattttttcttaattggcccgttagccaatgttggcccctttgga

SEQ ID NO: 26817 - DNA, 1109 bp, Heterodera glycines
ttcaactcgtttttgccacttctataggataatttatgaaattgacaaaaagcgtcaaaaacctagcaatggtacctaatgtcccacaaagcgatttcgccactgtcgctcccagtcaccaaaacatagtcacggaaacggtcccagcggactgaccaaatgcgttgctgcaaacagcgaatttgttgtgcagtgttacccaatctttaggaagaatgagcggaatgtgaatggaacgaaacgatggataccgcgggtccaacaaaacgacatttgacgaggaagtggcaatggaaataagcgaagagttgcaatcgcacggaacgaaccaatgaaagctggaaatgggctgctcgaatgcaaatttttccaccgacttgagctgatcagcatcccagatcttgtaaataaaagcatcagtataatttagagtccgaaatcttgaaatgtccgggaccaaaactcgaaaatctactggggccccgtcgggaccgggacatattcaaaaataatgaaaagtttgaagaatttgaagagaatgggcggaaataaattaaaccattgtcatattattgtttgacgtgaattaacctttagcaatttgtctcttcctgacgttgcaaaaatgcttgaatcgacgggataccattgacatccattgaccataaattcgtgatgacttttcctattggtgttaattacgacgtaatgcctcgggtaaacttcggcatttgacagagagttggaaaatgactcgaaatcgacgaccgacacattcccccgagcattgccacacagcaaactaaaaaatagatttattgttaatcaagttaataaagttttgaaaaaccagtttcaaggatcaaaaattttttttaatcatttttggtctcaaaatgcatcaatttacgaatacagccctttggcttttaatgatttcaaaagctgtttttaactagcgttgaattatttatgttttaaatccaaaattgggggcaccatctaaaccgttatttaaaagtaattgcgtttatcattgatgaatgagtaaaaattacacaccaatcggggcgcatgcataatcaaaagaccatggccgaggtgccggc

SEQ ID NO: 26818 - DNA, 1474 bp, Heterodera glycines
  unsure (1)..(1474): unsure at all n locations
gatcagtcagtgattgacaaatgnatcattggtgctataactgatcagtgatgaatttgaaaacccaatggctatgacagttataatcaacacttaaaatatgatcaaatgcttaaaaatgcaatcagaaaataaaaattaatattcgcatgtttttgtactgacttaataatgggtcgttttaatgtcagttgtttcgctgatcatttgatcaaatttcttttctcattgtcagttatgcaccgtctcaaacagagaatgtttcgatggcattttcaaaagaatggaaacaatcgccaaaaggcgcgacagaatgttcgccgaatgtttccaagtgacaaattttgattaaattattttaatcatttaaaatcagtcttttgaggtgattgggagcgacggaagccgatgtggttgctgtttttgttgttacaagcgggcgacgatcagcagtgggcgatggaggacagcgaacggcgcgtgccaatgctcgatttgtacctggcacaattggcggcacatggccaaggcaaacggatcctttcggtaggcaaaaggggcggggcaaaagcatttaaaatgaaaacaaaaataggcatttctaattagccaataattggcgataatggcaagcaatttgttattttttgttcaggtggaaagtgttgaagaacagtgccatccgttggaatccgtaaaggtcagaaaatccgaaaaaagcataaatatttattaattgtggcacttttttcgactcattgtcagactgaccaattattgttcgccattaattacactttggcctatttggagtgggcagaaaagcggtgggacggcaaaagccatggggagggggaggaaaagccaaagggggacggatcggcattagcacagctggtggaactgtacaaatgtggagcaatgggtgaagggatggaggaggtaaaaggtttttgttaggaaggctagctttggtgctataatttgaattaagaatttgcgaatattacgtagaatattacggaaattaaagtgttagtacattatacgatttatcggtcaatattttcgaatttttatagacaatttgattatccatacatatccatcgaatcatttcccttctatttataaactttggacgatcaattaacaacagctcattttactaacttataatggtcatattttcttttttaattaatttttcttgataatcacaataaataattatttctacctcccaataaaacaccgttttcttcacggttctttcagacccgaccatgggcaacaaagttgaggcagacattgatgcaaggtcaccgacaatggaaacgcccaaaggacagccaatgatgccgaaacgaccacaaaggtgccgcacgcgtcgtacactgaagctgctgtcgtcgccgctacagtgctatttgacgagaacgattaggttcgcaacgcactcctacagccctac

SEQ ID NO: 26819 - DNA, 1239 bp, Heterodera glycines
  unsure (1)..(1239): unsure at all n locations
tcgaacgctaacggacgacctaatggaaaaaaatcnccgaaggagagaatttaataaatccatccttcgggggaccgtgccgggtgccgcggggtaagcagtgctggttcgttncatcacggcaccgaaccttttggctagtcagcaatcgttgcttacttgccagatcggacgggtgcgcatgattccactgttccaagcaccccaccaaaagcaaaacgatataaccaaaatataaggaaaaattttttctccatcttcctttttgatactaaagcatcagagtgctaaaattaagttgtaaataaaatttgggcgcatcggttcggggggactgaccgaaaaaaatatttatgaaacaaaaaaatcgattttttcaagtgtccgtttggggtactcaaacaattatggggagcaaaaatccaaagcagaattaaagtacaggctatagggaagctattcccgagggattcggtctccccataaatctgggcgcatcggttcggggggactgaccgaaaacaaaaaaatcgattttttcaagtgtccgtttggggtactcaaacaattatggggagcaaaaatccaaagcagaattaaagtacaggctatagggaagctattcccgaaggattcggcctccccataaatctgggcgcatcggttcggggggactgccccgaaaacaaaaaaatcgattttttcaagtgtccgtttggggtactcaaacaattatggggagcaaaaatccaacgcagaattaaagtacaggctatagggaagctattcccgaaggattcggtctccccataaatctgggcgcatcggttcggggggactgccccgaaaacaaaaaaatcgattttttcaagtgtccgtttggggtactcaaacaattattaaaaatttttagatttttattcatctccctttttgatagtgaaagcatctgagtgcctaaaataacttgtaaataaaattggtgcgtttcagagcagtttgtgaaaaaatatttatgaattaattttgctaaaaaaataaaatagtgaagcttaaaaattaataaaaaattttaaattcagaattactggagttagcatcatagcagtgcttttccttgtctttttgatgccctcgcaaaatctggttcgcttctgatcagtttataaaaaaaaagttaagcctaaaatttttcgcaaatttaaaaagcaattaaaaatttttagattttttattcat

SEQ ID NO: 26820 - DNA, 1114 bp, Heterodera glycines
catttaagagggcaataaaatgattcaaaaccaaaagcaagcttcaaaatgcttttaaattttccctgttcctttttataaatttcatagattagcgatgtgagtattagtttaaatttttgctcagcattaacaaaaaatggatttttaaaataaaatttggttttatattttgtaaagccaaattttaagtcctcatgacataatgactcaattacagaacacccttccattttgagtgtggcccttttagttttttggttcttatatacccatatgctcccaaacaattgtttggagcctattttcataatttaacatttggctctgcaccctccgggactcgaaatgtaatcttcgggcttccattaatgaattttgcgattgttcctcgagctttgttgcctggtcaaaagttttgcatctctcgaaatcacgccacgtagattcggctttttctgactccaaattgattttgtccaggattgtgaagatttcccaaattgaatcggacattttaagatataattctcgaataccattagcgtaaggagccttttctctagattttattgcacgattaagtgtttcgcgagaagatttggcaaaatcgcttacttcatccgttagcgcagctacatcccgccatgctctttctgtctctttttttgcagcttccaataatatggaattagctttttctgatttttcagaattcatttttttatttttcatttattaaatttttcttttatattttataagcaataaattcatccctcaattcttcctgaggtctttgcctttcaaaccgtatttggttttcgcgcattgtttcttttagtttatttgccaagtctccaatgcctaaatcgggctgcgagtaagcggtccgataaatttgcccaatttcttgccgataatttttggctatttcgattgattgtttggcctcttctgctaattcttgacacatagttaaatcttttctgtctagacatttttccataccttttttaatatttttcatatttttttccttctttttttattttggcaaaaagggcatgaatttttaaaactccattttaaaattttgttatgccaaaaattc

SEQ ID NO: 26821 - DNA, 860 bp, Heterodera glycines
cgccgaaacccgaaaagccgcgccgaaggggcgttcccctctccccgtccccctctctctcccgtcccccgtcccctccccctttctccgtctgtcccctggggcgtcgtttgttttatctttttgcgccttccttcataagcctgtccatgtccaaagttacaaaaatgtggtaaaacaatatgagtacaatagattgacgacagtagagataattaattgggtaataattgtggacatgtcgcaatggctgaccattcattttgtctgattgtgttgtgctgtctatgctttatccccctcacattcaatccgtcgcccttcgtccttttttatgcttttatcccacgtaaatcggctccccattcattttcccctcccccaattctcccttaataatttcccccgcgctcacgggccggttcagtcagtcagtcttccgccgctttaccttttgcctttctttgcattgcaccgaaaatcgcttagagaagcgaaaccggcagaggaagaagcaccgaaagggacggaagaaagaaggggaggaaagggagaagaacaaaaagcggagaacattacattgaccctgaaaggagaaaaagcggcgaatggcgaggaaaagcgcaaaaacagaagcagcagcagaagaacaaagggcacggcgaaggcatcgtccgaattcgctttcactccgcagcgcccgccgcccttccgtgccaatggcactcgctgttgttctcccattgtttctgatccttccctccaccgatgcactgatccgcaacaacagagtgattctccacgacgaatatttgcccccgggggaaattggggaggaaatgggcgagacaaatgcgaaa

SEQ ID NO: 26822 - DNA, 279 bp, Heterodera glycines
tataataacgctgcggacatctacattcttgaattgaaaaaaattggtaattactctttctttttctccatattgaccatcatactcatactccccccacccttttctcctccttcattttttttttcctttccttctccaaccctctcctccctctcttgatagtttaaactgaaggcgggaaacgacaatctgatccccatcaagctagcttctgcaggtcctgctcgagcggccgcccggggatcgatccccgatctagtaacatagatgacaccg

SEQ ID NO: 26823 - DNA, 899 bp, Heterodera glycines
atcaaaaaatcagatttttaagaattttttgcggcgctttttccaaacttttgggaaatgaggcgagggaagagggtccggcggtgccgaaaggcgcggccgtgggaaatttttttgtaatttcgttttgatttgttaacagattttcaccaaaaaaggccgatttttgcaattaaaagctaagcgacgacttttccttgcgtttaaaaaccaaattttgccacaaatcttatattttcttgacaaaaagagtaacattatgccacaaaatttcaaaaatatgagttatctaagaaatcagaacaaattttggtcgctatcccaaaatcagaacatttctgacaaatcagaacatttttattttatcagatttggaccctccaaatcagaacatttctgataaatcagaacagatcgcacccctgtaataattggcattgctaagatggaccataaaaaaatgaaatgtttaattgttcggataggaatgcatgatggaaaatacagactggcgggtcgggtaccggctgaaccggggccggcaaaccggtcggtcgctttttggaacaaaacctgactcgggattggttgttttcgagatttcaacccggcccggtccggctaatttgaaaattggtctttaatgaaaaagcattaatgacatttgcaacaaaataccctgacatcctcatttttgccccttcttgtttagtgcaccttccaaagttgcaacaagcggctgaggaataatgtgatgtttatgcatcacatttgggcccatgtcgccatgcagaaaccgatggaatcggacgaacagttcaccaacttgcacctgctgatgaccgagcatgccaacggctccgacacagccagcgtcgacgaacagcgcagcgatgtca

SEQ ID NO: 26824 - DNA, 723 bp, Heterodera glycines
caacagtctgatggactacgtgttcggcatgttggagcagtacgccagctcattggagcaggaagtggaggagcggaccaaagagttggttgaggaaaagcgcaaaagtgacattttgctctaccgaatgttgccgcgacaggtgggccaaacatttggccaaacatttttttaatttaaataatgtatactcgcggtgcggcaatttgcgggatttcagtccgcaattctgcattttttggaatttgtgggattttgcagagttgatcccgcgggatcaaccctgcaaaaaaaaaaaaaattagttccaatcccacaacggggttcgtaaatttgaaatttccgggcgctaatgtattataccccatagttatttttgcgatggaattttgttgaggaaatgagaatagtttaaaatatatttgcttttttcaaactctgaccggaaaagagtgaaaaaagcgttattatgctctatatatcagaactaatgtgcagaagaaaaggcatatgcctcaaaagtcgagctctaattattatatttttcatcttccattatcggatttaacaattttgtcgaggaaataagcgaatcgaaaatttcagtgcattcgggatcactaaatcagattttaacatttttgcggcacatttttccaaaaaacttgcgaggggagcgagcggatgcatgctatatatttttatttgggtggatatttggga

SEQ ID NO: 26825 - DNA, 907 bp, Heterodera glycines
cccccccccccccccccttcaaaattttgaaaaaaaaataaaataataggagactcagaatttgaaaaattttttataaaacctgatgacaagctaatgtgataaaacaggttaattcttttcctttcagtatcccctgcaaagtttgggcgcttctgatagtttctgaaaaaaagttaagcctaaacttttggcctgttaaaaaaggaattaaaaattttaaaaatttattcatctcccttttgatagaaaaagcatcagagtgcctaaactagcatgtaaataaaatttggtgcgtttcagagcattttctgaaaaaaatatttatgaattaattatgcaaaaataaataaaaatttctaaaaatttgatcgtccataaataatttgtaattgatcaggggctcaccaaattttgcagggatacgtatcgaacactacaaatgcttactaattttcctagattttttaaacccggtgaaaattttttgcagacaccaccacttttgcacttaaaaaaatttcaaaaaactttaaaaattcatagaaaatttaaattcataggtactactgctaaatcaacgcagagacgcctttccttgacctttttaggcccctgcaaaatctggtgcgcttctgatcactactcgaaaaatgagtgattgaattttcactaaaaagttaagcctaaactttttggcctgtttaaaaaggaattaaaaatttttaaaaattttattcatctccctttttgatagaaaaagcatcagagtgcctaaactaacatgtaaataaaatttggtgcgtttcagaaccctttctgaaaaaaatatttatgaaacaaaaaaatcgattttttcaagtgtccatttggggtactcgaacatttatggggagcaaaaatccaa

SEQ ID NO: 26826 - DNA, 898 bp, Heterodera glycines
cttgtccgaaaaatacacaaaaaatttaattttgattacacctataaatatattcaaatccgtacgttgaatgtccgccatgaccaccaccaccatagccattgctcaactgctgttgctggtgttgttgctgttgctgcgcgaccgccaacgcggacaacaattgttgctgctgctgctgttggtgttgtgccgccgcatttgctgctccaccaccaccaccattatgagcaccggcagcaccaagcagtgcatgctgttgctgaagtaactgttggacgagctgctgttgttgttgctgttggagtgccgcaacggcggccagcgaatttgcggcgtcggcaccgccgtttccgagcgcggcgagtgttgccaactgttgctggaagtcgccgccagtgacgccgctcgctgccaacaattggtgcagtacagtcgctgatggtttctgatcgccgccgccaacccccgcggcaagtgcagcgaacagcaactgctgctgttgatgctggtgatgggcagcagcgaccaagctgctactactgtttgacgaagtgccactgtcatggtggtggtaaaggtggtgctgaccaccggcgatggtggtggaggccccattgttttgttggttgagcaacagtgtggcagcagcggcggccaactgtataatacagacttagaaatgcatttaattcagcctcgaatgtccaaaaggtatcacaaaatttgcgaaatcccggaaataccggttcatcaccaagtttttgtgaatttttttttttgctttacacacaactttttttggcgcggtttttaaaaaaacttttgcgcaaaaggagggggggggggggaggattaatagatcctgtcaaaaaatgacaaattttctagcccaatt

SEQ ID NO: 26827 - DNA, 660 bp, Heterodera glycines
cataaattgggctgatgatttattcatttatctttgcttgtcgcttatcgcttgacatcccggatatatcccttagcaaaaaattagggttgcaaatgaatggctgtggaattgacgcaatgattggattgggtggtggtggagtgatgggatggaatgaatggacgaagcgcgtaactaaggcggaggaggggagacggaggaggggagggagcgcagggggagacagaggattgggaggggggggatgaagcggtaggagaagcagcccaagaggacactccggtcaagtttcaatttgtggtcaacgctgtgcaaccgttgcacgatgcttcacccctccccacccatgttttaaataaaaaaaaccgaccctaccaatcccgggcctctctcccacccgtccaaccatctgtttatccccctctcccctccccgcctccccaaattctgctgtttgtgagtgcaaattggatttgttcgattactccctcaaataggagaatgattgattccgtgctccctctcccaaagtcccctctcaaaagggttcgcgcgacctattcataaaagtaagctacccccccccctcccctcttaatttttggttttcaacagctatacgagtgtctcgagtcagttccggactcagaatctctc

SEQ ID NO: 26828 - DNA, 681 bp, Heterodera glycines
tctctttttttgttccataaattatcaaatttcattcgctttccggtaatattgtattatttattttcaattttttttctgtcaggataaaaaattgcctttagtttttcagtgttgatgcaaaaaaaaaaaatcaataactaaataaaatttttgaggttttaaaataatgcaatattccttcaaagagtaggaataagcatcgagggggccggtgtaaaagaggtgggggggggggggtcgccggccgaaggggaaaagagaagaaattttaaaactttaaataatttatttagcgaaattctttaaaattccaaataactttcccggcggcgcctgtcggcaccgccggactaccctgttcctgaaaacaaatagctgagcaaaaaacaaatatggaaatccacacatatccagtctctaataatagtaacaaaaagtctttttttgtgtaatttctgcccgttttgtgccttttttggacatactgtacaaaaatgcaaatgcaatttttttctacatatttttgtatatttgataatttttgtaaaaattcatatcatcatttatttaggaaaatcatttttctcatgaaaaaaataagaattgtcaaaaatttcttagaaaatttttttttggcgtttatgagtgtatttttatcgaattttattatgaaaatgc

SEQ ID NO: 26829 - DNA, 990 bp, Heterodera glycines
tgagtttcaaaaaagttttgaacaaccttacttaaagttttttggaatttaatagccataactttttttatactatctcaaaaaattttggatactaatatttggaagacaacacctagaactattgaatgatagcatgaaatatatgatttggttgaatttgggccatattatgagccccgacatttgcgcctatctccaaacccgaattcaaagtttagccgaacagcattaaaattaagaaaacacagtcttctaatttattaggtgcattattctgctgtttgaataattgatgatttttcaaagaatttattaactataaaattatcagacttaagcaatcacttataaaatgctgtttaggcgatcagggattgaaaaaacttatgtttgaagccgatttggacaaaggcgcgcaaatgttgggcgagtgtccgggagaggaaaacgtttacccccctccccccccccccgttcacttaccatattgctttgcgcacaagcactgatcaccatcccggcataatgcgagatcatcgacgaagaagacgacggaacggccatccctgaagcggcacaattctgctgctgttgctggggccccacagtgccgaaagtgttacgcgggacaattccgtgtttagtctgaagcaaagggcatagccaatatcttggcttcagggggggggcgactgacgactttttttttaaatttaaattcgctatttttggggtggagtgggagggattaaagggagaggaagcgcagagaaattttagaaaatttaggcatattcgctaactgaggaccattttcgtaggtttttgggccgaaatttaaaatttaaggaatttgggggtgtgccgcggcgccgacagacggcccgtcggaggatttttgtaattttttatgagatttgttaatgtaaattttcatcccgttttttaatttaaaaaaatatacaggtttccgaagggggggggggg

SEQ ID NO: 26830 - DNA, 1025 bp, Heterodera glycines
agacacaatttgttctggcaatccatggggtccaaatcaattttcgaagtgtgtcgatcgttgcctcggtcgtcgtgcttttcatcattgcaacttctggccattttgtcttggcatcaccgtgatcagccacattttaccaaaaaatgggccgcagaagtcaatgtgaagtcgctgccatggcttttctggcacttcccatgggtgtagagggttaaaatgattccaattttatttttatacttgcaaatttttttatatcttttaattatgttgttcttttatattttatttttttgtaatgaataaacatttttaaatgcttaatattaatatttcgataaacttttaattcattaaataaatcttttccccaatttcttatagaataaactttttgaaaaatttcatggctaatcctcgttttttttcttcgaagatgttgtatttatttgagaattaaaataattaatcatctttaaaattaatgagtttaggtttattgtatttttttgcaacaagcatctttcttttgattgttccattggtaatcattgggatttttattgatattgttagatcatcattttctatgttccattttattaaagaagcttgttaatttttggcatttttcagagctctcaattttctgaatatcattcttagaatttcatgattagaaataaattctcgtaaattcattgaagcaagttggaaaatttctttactccaataatgtttaaatttgccaataattgatcaattactattggaatatgcggaatgccaatctgaaaactttttttgaatccttgtcgagtaaaattattgaatttaaatctgtagtatcattaaaatttaaaattagtgcttcaattgtcattaatattttttcgattttttacttttcaaattgctttgtaattgaaaaaagtttaagtttcatttaatttttcttcattgattagatttagtacgagtttgattgctctaatttgtttcacattattattatttttttt

SEQ ID NO: 26831 - DNA, 946 bp, Heterodera glycines
cgaaaaagtgaatgaacgtcgaagagtctaatggacgcataaaatgcaaaagatggaatcccaaaactctctgggacattacatgtttaagattgtggttgaccacccatttattttacctgtgaaccaacaaatgttccccgtcgtatttgatctccacgtaaaatggccgtccacagaatttaattatctaaaattggaacaaaactttaaatcttctataaaaaaagcaaaaacccaaatgtattgtaaaattgacaataatgacactttttctattattatttggaataaatgcacaccttcggcaagcagtacttatcgaaattcagccgtttgagcagcatcggcctgaagggttttccaatgatgtttccattggccgtcaaaacattttcgcccgattcctcgcccacataactttcgcatatttgacgaaggctgtcacccgactgaaaccataattcaaatactttaatttaaaaaaccacaaaaccaaaaaagcgtcaaacgcctctttgtgaaagcatttcaaaagtgttggcgagcttattccgcccaatcccttctccatcgcgtccaaaatgatgtaaaaaatccagcggagttcgagccgagtgcagcaccggaacagttcgctcatcgctttttcctctgagttttttaatttctttttgagactcacaattaagtaaggtttacaaaaataataatttttacgttggcgtttttctgagggaaattccatccggtcaagcacagaattgagctgcttaatgctgatacttggcgattgcacagaaagacttgcgcacactttgtcagcgagtcgttccacgagaatatccgttgcctgttcaaagaataaattgtaaaatcaaagccaaaaatcagagtttacagtggtcgtaatttccagatgttctgtcatcattgaatcacaaac

SEQ ID NO: 26832 - DNA, 850 bp, Heterodera glycines
  unsure (1)..(850): unsure at all n locations
atcgaataattttcttcttttttctttaaataaaatttttttatatcaaatttatttaaatatggttatttttattgaacgaataaccttttcttcttttttctttaaataaaattttttatttcaaatttgtttagttttagtgttatgccattaaaatggaattaattatttctaagtaaaataaatgacattttcgttcctttttctttaaataaaaatgattttattaatatgaaattatttaaatttggtgttatgccattaaaatggcattaaaaataaaaatgaaatttttcatgatgattatttaaagcaccaattaaaaaaaaatttgctttgcatattgggtcgcatcttcaaaggaaaagatgtgtgtgaaatgcttcggcatctgtaactggcgggttaaccaaactattcattccttgttgggtttggaccgcacgcacataagtccacgtgtagcctagaaatctcacgggaattaaaaaatatttgtcttttaaaataataaattaaatatatttgtcttttataccgtatgtaattacggtcgcttttttaaagaacatccatgtatgtaagattaccacattcgcatacaaatcaggatcagcaaactcttcgattttttctttcatttgatcaacgagtgttgacaatggctggcttgaattgtaatattgccagcttctacatttagaaagaagaaattattttgattacatagcaacttcctttttgattaaacagcctccaatttaagtataagtattagaataggaccatttattgaaaatgaaaattcgaaatgaggatttaanaaatttaagtcatcttatcttaa

SEQ ID NO: 26833 - DNA, 1367 bp, Heterodera glycines
  unsure (1)..(1367): unsure at all n locations
atcaggcagcaaaaggcaatgaatgggtagaggaataatggatgatcatagataaaaaggaagtaaaaatagggcaagaggtgatcagtgatcactgatcagacaaaaaatgatcagaccgagaagagaggagaggtaaataggattaggcaaaaagcgcaaagatgatcactgaaaagcagagaaagtgggtgagcagagtgagaatcataagagaacacagatgaaaaagggagagtgaaaggtgatcagagaagacgagatgagagaagaaaagattgaacagccgatcagagaagggctgagaagaatacgggcagcaaaagtaaactgatcagaccgtggcattggggcggggacacgccggaacagcgcacgggatgaacaaaaacactttttttgttgtcaaggaatcgcatggcccacgtgtgttcttcagtgtccgcaagggcacaaagaatgggtgcacaagcaatgccgcggcacacaaacgcctcgggggaagcgaaaaatacgggggaaagacggcggggaagcgatttgccgaagagcgaacggaatttatagcggaggaagaagagtcggactgatcggacgagaagggatggccgaatatattgaccactttcacatttttgtttatgtatttagacaaatcatatcaatctattttaatttgttagaataaataatgcttttacgggttttttttaaggatcgaaaaaggaaaaaattatacgcaaattgcaatcaaaatcagaaaatgctgtgaaatcttcgtccttatttttcaattagctataatggctttgctgtacattaaatttcatgtttggatcgatcggatgattaaagaaataactttttgatcattgatattttttcatccattgttcattttcagcattgatccaacttcttagcaattaatcattgtcattgatcatattttggcattgttcgctttttgtccattgttcattttcaaccattaatcctacatctagcaactgatcatgaccattaagcattttttgccatcgatcgcttggcacttgatcattacaattctctttttttaattgtcagtttatgcacacaatttttgggcatgactagtgatgagtgttcgtcccaattggccttttcccccgtcagtcgtcccttttgtccacaaatgacgtccgtaccttcttgactgttcatctccccactacaaatgcgtgtccgtatcgtaccaattgcgtcccattgcgccgttcggtctaccgtaaccggcgccggcagtggagccaccattactgtagcgattgntacccgtagtgctactggctgcagttttagaaaataaggtatattaacttgcg

SEQ ID NO: 26834 - DNA, 704 bp, Heterodera glycines
  unsure (1)..(704): unsure at all n locations
tttttcatttaantttccgaacaacaaatattttntgtccccccaaacatttcatttcatttccgaacaaaaatgtttttactccctaaaattgtttttttcctttttaatgaacaaatatttaaacatttaaattttttttttttttttcaaaaacattttgaccattagggagcaacaatccggggtgacgccaaaggctgactggtgagcttagcaacaaaaaaaataaaatacgagtgccgtactgacgaggcccgctcgtatttttttgaaattcaaaccgtgtctacggctttgaagggccgaaacatttgcatatttggttgacgcggtagtaaacccctataggatgtttgatacgctttttcgaataccctgggggccatccatgaaaaccgtggagtcctgcctggtactgggttttcttcccagttgggtgggcgtgggcgttcgctttccactggtccttttgcgctggtatccagggctgcggcctggacggatggaaccaagttccttcctgagcccgccgggtgtcacagcgatctgaaggaccagccagatagtcggtctggtgtggacggtggcccttcatccctgcgctttggggtgaaggtgagcttgcacctagcagcgggggtggcggttcctagccgtaatgtgccctgccttcgagctgcattcgtaccgcgagggaataa

SEQ ID NO: 26835 - DNA, 925 bp, Heterodera glycines
agaattgagtcccggtgattgcgatgccgaaggaccaggtgaggttaggtcccagtgattggaatgccggagatttgagtcccggtgattggaatgcaggagaacagagtcccagtgactggaatgctggtggattgagtcccagtgattgaaatgctggagggttgagtcccagtgattcaaatgcaagagaatagagtcccagtgattgaaatgccggagatttgaatcccagtgattgaaatgcaggagaattgagtctcggtggttgcgataccgaagaatcaggtgaggttaggtcccagcgattggaatgatggtgagttgagtcccggtgattggaatgccggagaattgagtcccagtgactggaatgtcggagagctgagtcccggtgattggaatgcaggtgtgttgagtcccggtgattgaaatgctggagggttgagtcccagtgattgaaatgcaggagaattgagtctcggtggttgcgataccgaagaatcaggtgaggttaggtcccagcgattggaatgatggtgagttgagtcccggtgattggaatgccggagaattgagttccagtgactggaatgtcggagagctgagtcccggtgattggaatgcaggtgtgttgagtcccggtgattaaaatgctggtgtgttgagtcccagtgattgaaatgcaagagaattgagtcccagtgattgaaatgctggagggttgagtcccagtgattgaaatgcaggagatttgagtaccagtgattgaaatctggtaagttgagtcccagtgattggaatgtcacagaattgagtcccggtgattgcgatgccgaaggaccaggtgaggttatgtcccagtgattggaatgccggagatttgagtcccggtgattggaatgggagaacagagtcccagtga

SEQ ID NO: 26836 - DNA, 1750 bp, Heterodera glycines
  unsure (1)..(1750): unsure at all n locations
aagcataantttttcaaatacataagttcaacaaagatatggctcgcggcgccaaaatgggcggaaaatgaaatttttggtgtttttttgaccgtaacttttatctaaatttttgaaatttggcaggctaataaagagactgtcaagcactttatcaagcttgtttaatggatgcaaatgaaaaatgttatatcatttggagctaaaatagcaggcgcaaaatgggcggttccctgtatgtttacgcagtcttacggtaatttatatggatgctgatgaccgggtgttcaatcggctcccggtcatttggacagggtaagtcattcgggcagaagcggacaattggacagtggacattacgacagtgaatgaatttatttttactttttaatggttttagcggtgtcatggcaattcgtacaaaggcttagactaaatttaggcttaagcctaggcttaggcttacttgagcttaggccaaagcttaggctttattttgtaaactttttattgtatgaattgctattgacccggttttagcaatgaaaaaacaatttgttttttttaatttcttgggacatttggtaattcctccagacaaattactcaaattcataagcgcataaatagcaataaatccttcgcgttttacaattattttctttaagttcctttttttgttaatttaccttgcaaagtagcgccaaaaaaatcagcgtacggttgttgaaacacacctttaaaattggcaattaattaataattattaatatagggttgggcatttttacaaaaggcagcaaaaaaatttaaataaaataggcgaaaaatgacaaaaaataattacgaaaatatttgactaaaaactgaaaaaaccaaacaacaagaaaataaacacatacgtgcaatacatatgcatatggattattcattaatttttaaaaaataaaaatttttctttaaattctaaattttttttcttttaaatgctcaaattttaaaaataccaccaccataccaatgtgcaatgggttccccaaattcatctgattcgttcggtttgtacgttgacttgctgaatttaaaaaaatatattgcccaaaattgtttttaaattaaaataaaaaaattccgaaattttcgaaagtcccaaaattttgtccaaaattccaccaagtcggaggtcgggattccgttctgttaaaattttcaaacaaattcgaagacttgaattgtggctaattttttgattttatagtggaaaaattaattatttcccacattttaaattaaacgatttaaaaagatacctaattttccaaattaaaaaaatctttgaaaatgataaaaaaaatttgtaaaatattcccaccaattccaattgaccatgactgctgtgaatgcgttctgtttgttcgttgacttgctgaagcaaacaaaaaattattgccaaaaaatgtttttgcttttattaatcatttgccattgctctgttggcgaaaaagttcggccaaagttccgcgttttggcaccgacgacgctccttaaattttgatttttgattaaaaaaatgccaaaaatggaaaaataaatgtttaaaatgccattatgttttttttaactttttttctgcgagtcccggaaagtttggcactataataaacaaacaaaataacataaaattttataattataccaaagatcaaaaagaatgattaaaaatcttatgaaaatgtcaaagaaaaaaata

SEQ ID NO: 26837 - DNA, 961 bp, Heterodera glycines
agtccaattacgtaaagtcaaaacaatgacattaatattaaataaataaataaataaaacacaagttcttttcatctgatcattagaattttagtatgtttaattttttttttttccaaaaattaacatggcctatttaagtgccaaacatttatatgcattttaaaaatcacaaaatgttcttatcattaatacctgctgataggcccaattcttttttccatttgttaatcgaagctcggcaaacgcccaattcttttgctattttttcttccatttcataaaccgaattttcacttggaatttccgcacattcaatttttcttgtcataaattttctaagaatttgcagtttttcttctgtcgtgtgagctttattctctaaaattggtttattaatccgattttaaataaatatcgaataaattaattttttattttaattttatgaacttttccatttattttccaacttttttttctcatttttggtcccatttcttcattttctttttctttttcgatttttggctcaatttttactccaatttcttcgtcctctttttttggttcggtttttatttcaattcctttattccaaatcatttcatttggatttaattccgttttttcttctttaatttgtaacagattagatggtttttgctctttggagtgattttcattcgaaaggccctaaaataaatggaaaaaataggaaaatgataaaactttaaaaaactttatttggttgaaatttgtcccatatctcatcaaaaatatcgcctggagctgattgaatcatatttataatagaaaaacaaatacacaaatggtaaaagaaattcatttattccattttaaatttttttttaattactaaaattaaatttttaaaatttattcatatattagcaatactatcaaacaaaaatataatataacaattaatatttataaa

SEQ ID NO: 26838 - DNA, 1134 bp, Heterodera glycines
agagaaatcatattcaatcgaggacatgggaaggaaattaaaaaatggaattggatgagccaccaaacaataccaaaggggactttattttttccaaatacacagtaattttcgaaattttctgtcggaatgccagaaactaaaaacaatttggtcgccaaaattgaaggtttttggcgcaataccgaattttgttccgaattctcaaaatcatcgagcgcctcgcggcacgacacccatttttcagaaaaaagttgtttttttttattgaaaacaagcacaacttcctctgaaggtcgggccaaccactgtttcaccgtttgttgtgaataatgcccacctttttctgcccgcgtcggccaattgttcggtgagtggcatcactccggtgaccaaaaaccagccaatgtttggaccaatcattggcacagtgacgagaaagggtttgttacgacgggccgacttggaggaagcgaacgcacgttggagagagtgggtgaacagagagagacagtggcgggaagtgaaaaaggacagagacggactctgtgggaacaatttaaatttggatgtgaaatttgaatacaattttaatatttactcaaaaattgacaatttttaagttaaaattggctactaaataaactaaaatgtactttttttttctcgagtgtgcgtaatttttgaagggggtcataaaatccataaattcctcgccgattttcaatatttttggcctgcttaccactaatttttccccataattccctccttttttgtcccttttcgtccacctgttgcccaattgtgatgataaagtaattggacgcggaaatcacatggctctgcacgatggaccgcttcaccagctcgttgaccgactgcagtgccaatttgtaattgctaatgccgcggccgagtgagcccaactgacggccgccgggcttgaaaaagtcgcgcagaattcgactgcccgtgttgtaccgctcgcaacagagctgctcctcctcctcaactgtgctgctgttcaccaccgccttaacgcataagccaatcactgcccgtgccgtgccacccacttcctgctgctgctgattgtacgttttgtactccaattggatgctcagcgcccgg

SEQ ID NO: 26839 - DNA, 1549 bp, Heterodera glycines
  unsure (1)..(1549): unsure at all n locations
atcaatttgtttgacgtcacttttttgagacatttnaatgaacgaataaatacaaactttcactaaataaaaatgcgttttcattattaattaaattttttaaaaattgttggagtgatttttgttacgtgacattttgcaatttgagctgacaaatgaacgcggccattgcatttattggaaaagaaagctgccaaacaatggcacttttaatgaatccgtgccagcagagctgggaataattaagcagtgaatgagtagtgaatgatataataatttggaatattttggtggaaaagttatttttgtcaaaaataattattttttaacctttaataaaacaaagacaaaagaatcgaccaaaatggaaattaaaaattaagcacgctttactttttgtacagatttatgttattaatattaataataaaaaacatttacgccaaatgtgcaaattgacactttcgctaattgtctaattgtgagtattcatttcatttatttctcgctgtttcacatttaattggtgcaatttgattctgtgccgtccgagccttcgcctttggcttttatttgcattaacaaaaaccttttttatttggcttttccattgcttattttggtgtttctgttggaaaatttaaaaaaatgcgcaaattgaaaatcaacgaaatgattaaccgaactctgaaagtcgtagtgccaaagattgacgcgccatatgtaagttggcacgcgtcgcacttcccttggtttgttccattgacaggtcaatcatctcaatcacatggtgcatggaccaggtttgatcaaatgcatgagattagctaccttctttcgcgctccgaccaatcaattctatgcccttttctctcattctcggctgatcatccagtctctctcttccttttttctctgatcacctctatttctctgcctttactctctcccctcacttttcaattttccggcatcgcttgggaaatattgcgcgacatggccaagagtctgaatctgagctatgatattgtgtcgatgcagcatgagggatggggcaaaaagggcccattgggcaaatggaacggcgcacttggcatgctggcagaaggggttggaattggcaatatgacccatacaataatttaataattcacattacttcttggctttttactggcgatctgtccgttgtggttgcaataacggggcttaaatccgatccgaagaactgatcaaaaattgatttgggtttgttgaggaagcggaaattctggctggcggcaccattatgaatgatgagcgttacaacatcgccgactttacaatgccaatcggcttccaggagagtgccgtcctcgtccgagttacagaaatggacgtggcacaagttttatttagcgctttccattggcaggttgtggtgggaaatgtgaatgccattctccaacttaaacctggtttagttggcattggttctgctcccttttgtgctcatttcttttggcgctttttctttcattggaaaaatgcggaaagttttgccacggcg

SEQ ID NO: 26840 - DNA, 809 bp, Heterodera glycines
ccaaaaatttcattatcataatcagggatgcaaaaaacatgcaaatgcatatttttttcctggcttctccatgctctaaatagcaggaaaaacactttcttttttgtgtttgcgtataaaaatcgggacttttatttgcatatttttgcatatttcgaggtttttgtgcatatttgcatattttggctttttgtgcatatttatgcatatttcgccattttttggaaaatttgttaacaaaaatgcaataaaaacggaaaatacacccctaagaatcggccctaaaaaattcagaaaaatacacccataagaatcgaccgaaaatttttaaaaacacaccactaagaattggaaatttttttggactttttcttacatattttcatttttttttttacatattttgaggatttttttacggaaaattttgaaaatgctcaaaaaaagccaaaatttgacaaatttttttatacatattttgagttttgaaattttttagaaatttcttgtgaaaaaataaaataactttttttttaaatgtacccctaaaaaataccaaaaatattttttaaatgttaaaagatgattctaaacctatttaggtcatttttctgccattttgtgccaatttaacactttacgaagatttatttccaaaaaataatcattaaagaaaatttatttacatacatattttcgtacatattttggatttttatacatatttcttacatatttcgggatttttttacatatttatgtacatatttttaccaaattttgtacatatttttgacatccctactaat

SEQ ID NO: 26841 - DNA, 990 bp, Heterodera glycines
  unsure (1)..(990): unsure at all n locations
atttgagggacccgacatttgcggatattcccgacatttgaggacccgacttttgaggacccgaccgttgccttagaatctaccctaagtggagtatttttttacgcccttatataccaccataccttctatttctggcctaagcctgtaaccatagtataatgtccattcgtaatcaatcacagacagaaaatcatagtacagtttaagtttttttttttttctcactcagaatgcagttagtgccaaaattggctatcaaatttcacactcagaatgcaaaatggtcagtgggggagaggtgacaaagggcagaggcatatgaaagtttaaaaaagaaaaaagttaccatgttttatattgactcagtctaaacagaccacccaccctaattcacttttgtaatgtttatctataattgtccttcctataaaagcgctttataatatacacataagttcacaatttgattatcataaatctgctttgtaatctcgactttaaattcactttgcactatttaccataaatccactttttgtaatatttgtcctctcatttaatgaaattgaaatttgagatttttttttttataacggctttaatctagagatcaaaatgcctatctccgagcatattatgaatactatcaacgacataatcgcgcgttatgtcgaactacacatggaggcttacctgaagcacgagagggcggctgcagaacatttgaaggttttcgaaggcaaatacaaaaaaagagaaaaggttttttttacaaaattttaaaaattttatacttttttnttaaancccctnnacactatnactnantataaaagaactnctnccaattnnctnnacaaccacncatnnccaccanctnaanccttcaannacaaattctttnaaagagntaatctccaannngggngnnnnntnnnacaacttagtaagaaactttttccgtttttcagttggaagaacgcaaaa

SEQ ID NO: 26842 - DNA, 1169 bp, Heterodera glycines
caaaacggcggggaactcctaagaaattggaaataaatgaatgaaaaaaagggggatggacatgagcagaaaaaatggtacggattttagggataaaaaatatatttccgagacccatctttgtgtgtgaagtgacaatggaaaagtgattttaaagcatttgagcccaaatccctcaaaacggacttcgaaattccgtgccgccaaagagtcgtatttatgaccatcgtaatttgcgtcgaagaactttttgaacctaaagggaaaaggaacgatcgaatgaatgggaacgagactgaccattgcaaaaactcaaagttgtcctgaaacttggcccggataagactctgcacgggcacaggctgaaatgcaatgggatttgacatccgtttgaattcttttattcgttttggcatcccctcaccccaattttccaacttcccaaatgaattggtcctcccctgcaaattaactccaaatgttgcattttgattcaaactttgtcaattccgatggttttccacgattgctgcaacacgcgccaattgtgcacccaatcgacgtccgatcggctgttccatttcacttttttgagcggcacttgggtcgggaagagaaagtccgtcagttggcaataggccgcgcccgtggccatctcttcgattttggtcaggctggactgaaatggcaaacggaggcctctcaattcgaatttgccgtcgcatttcaaatgtcaatgtttctcacttggagacagtcgttgacccatgacaaaagatcgttgcgcgaaatgttgtcgctggtcaccgaagtcgagtacacattcaccaccggcatttggtctttagtctttgccttggtattccggagataatgaaaaaagcaaattttgtcccaatgatcggtcgatgcgaaaactaaaatactaagaaaaaaggtaggttttatttaaagaattagacaaattttaaatttgaaaaaggtgccaaataatatcggatcctaaaaatttaaccacaatttgcacttgcaaaaaacaatttaaatttcaattgaaaagaacagaaataacatcagccgtcctctttcactcggttttcactgccttgaacaatttgatcagttcattgaccccggaaaagagcacagttattaaactgcgatgcttt

SEQ ID NO: 26843 - DNA, 894 bp, Heterodera glycines
attttgacagggttagttctaaattttgaaaatttttctttattcttacggcgccaaatagccattttatatagggcgccaaaacggccgcgccaaaatggccgcgccaaaatggcccgcgccaaaaaagctcgcgccaaaaaaacctcgcgccaaaatacccgcgccaaagtggccgcgccaaagtgaccccgacccttttttaacggccctttgaccctaaagaccaaaattttcaaaaaatatatttttaggtattttctcgattaataaaaaatgttacttaaaaatagaaattttgagaaattttatcatcattttgaaaaatttatgtgaaaatggaattatttttacactttttgcatttttcaagtgtaaatttttccacaaatattctaaatatttattttcaaataaatgtttgttttctcaagtttatgaatagggcccggattttgcagtcacaaatgaggaacatttcctttccaatattttcttagcaaatattgagcaagaaacaaaaaaatttggggaagaatttttgagaaaattttctaattcttagaggtgtatttttgtaaatttttggcgattcttaggggtgtattttttgaattttttaggtcgattcttagggtgtatttttcgtttttattgaatttttttgggaaattttccaaaaaaatgccaaaatagtggcaaaaaactattttagtggccaacttccaaaataattttttttttaatggcaaagctccaaaatagtgattcctaatgatgaatagtggcgttaaaacgaagaatttccgagttaaaaatgtgttttttgtgcatttctcatcgaaataaagccgcagaaaaaatagttaaaaaactaagaatccgggccctatt

SEQ ID NO: 26844 - DNA, 526 bp, Heterodera glycines
gaatagagatcgacattttgaaaaaagcctggacctggacctggattccatgttggacctggacctggatgtcctggacaaaaatccagaaaatacaggtccaggaaaaatccaggctcttcgagacctggatccaggcctggacctggattttttgaaactcattttaaaaatcaaaaaaatgtttgaaaaaattaattaattgcttatgaacatcttaaaatatctaatttacaataataatgtttttttaaatataattgatcatttttgaaaaatcgaaaaaaacatcggtcatttgaaataataaattctaacattttgtccaggaaaatccaggtttttttttgtgttttgcctggaactggatttttttcacatttgacctggaccctggatttcctggacaaaatccaggaaaatccaggtccaggaaaaatccaggttgtcgaaaaatggcctggacctggacatggatccaggaaaaatccaggtctggatccaggtccaggccgagctctaatta

SEQ ID NO: 26845 - DNA, 992 bp, Heterodera glycines
agtcatttgcttgccggcaagtcgcccaaattggcagagacatttttataggacaaagcgtttttggactctcttttcaaattatcatattcggaggatttaaatgaattttcaaaaaatctgatatgaaatggcactaattttgaattaatttcagatgttcgtcagaggtttcttcaaaaagtcgggcgtttggcactttgccgacaaatggcaccgtttcggctgtttgatggtcagcgctgaatgaaaaaaagaaacagaaaattgcgaagcaaatgtttgattgtttttaagttttcttccgcctcgaagttttctcactggcgaatgttcggtggtgcttttgttgcggctttgaagggcaaaggtgattagtaaacagaaaatcaatattaacatactatcacagtatttctttgcctcccttccctttaattgtctaagtcgcctttttctcgcttgtctttctctccccctctttctcatactcgcattctcatctcgttttctcttcctttttattttctctctttccctcgtcctttctctcttcatttaaaaatgttaacatatgtagaacacaccgtactttgcacccattcactttttaaaaggctcatttgtttgtctatccatccgcagtgcacgcattcgtcacaaactacgtgttgttttcctccgtctcttccccctccgctttgggtgcattggcccctccccttccccctttcccatttggtctctctcattcattccttttgtttatttgttgtttacttctcctaagtgcattggtccctcttttccccgctcgcgtatcttttaattcctttaatagattttcaactaaaaaattaactaaaattaacttaattatgatggaagaagacattggtggtcctcagcgcagttcgactccaaacgaaaataaccaccacaacagcgacggtgccatattgaaaaataatgaacagcataatgatgcttta

SEQ ID NO: 26846 - DNA, 943 bp, Heterodera glycines
aaatgtaaaaacaataaatcaatttaattttttataaataattataaattttaattattatttgaatatttgtttaatctcaaataaattaaaataaattttagaaaacaattatttaataattcaaacaaaaaaatatttttattattttcattttgctataattaaaaatgatttctttcatttattattttcaatagactagcggggtcagcgccttcggcgcatcccccgctaggtagtacgcttgtattataggattatgaatgataaaatcgactggctcggccgcttcgtggcctcgcatcctattcttggctttttctccaatcgccgggactcaacccaccagcatttcaatcactgggactcaatccaccaacattccaatcaacgggactcaatccaccagcatttcaatcactgggactcaattcttctgcatttcaatcactgggactcaacccaccagcattcaatcactgggactcaacccaccaacattccaatcaacgggactcaacccaccagcatttcaatcactgggactcaattcttctgcatttcaatcactgggactcaacccaccagcattcaatcactgggactcaacccaccaacattccaatcaacgggactcaacccaccagcatttcaatcactgggactcaatttttctgcatttcaatcactgggactcaatccaccagcatttcaatcactgggactcaacccaccaacattccaatcaacgggactcaacccaccagcatttcaatcactgggactcaattcttctgcatttcaatcactgggactcaacccaccagcattcaatcactgggactcaaccctccaggatttcaatctctgggactcaaatctccggcattccaaacaatggactcaaatctccggcattctaaaatctctccctttcatt

SEQ ID NO: 26847 - DNA, 238 bp, Heterodera glycines
taaggggggggatgggcaaagagagaggagggggacttagaaaagaggggaaacgggggagggagactttggataagggggggggatgggccaaaaaaaaagaaggggacctaaaaaaaaagggaaaccggggaaggaagactttgataagggggggggatgggccaacacaaaagcaggggacctacaaaacaagggaaaccggggaaggagacgttgggtcaagggggggggatgg

SEQ ID NO: 26848 - DNA, 759 bp, Heterodera glycines
gcgccgcaagtgtcagcgccgcaaatctctgcgccgcaagtgtcagcgccgcaaatctctgcgccgcaagtgtcagcgccgcaaatgcctgcgccgcaactgagcacaaggcgacagaggtggacaatcggacactgaggacaatgcgacagtaaaatgcacaaaaagataagaaaatgccatcgccgaagtgaaccgattgtgccatatcaagaaaaaatggaaaataggcaaagaaaaaagtgcgaatgcagtctaaaacactatttcattgcaaattagttttggtttggcattttgtatggctcgagacaccccttgtatatgtatgaaattcagtccggatgcaattttcgaaccctaaccaatatttttccaaaatacaaaaaaaaaatcaacattacatggtagcaattagtaacttaccctgctgtttctgtgtataaatgcacgtgttcttaatgagctgcttgtccgtggtctgctgtgtgtacagcagcgataaggcgtatttcaacgattggagttcgggcgatttttcgaaaaacgatttttttaggccttgccctccggcatggaaacactgaaaaaacccaacaaccaattaaaaataattatttttaattgttcccacctctgtgattgcgtccaatgccgcgtcgagcaccgcgcactgtttgggcgtcagcgaacattcgctgttgtcccgggccagttcctaaatttttatttttttcaaaagaatttgcactgacaaaa

SEQ ID NO: 26849 - DNA, 924 bp, Heterodera glycines
aatggacaaaatgggaaaaggaagcgattggatggaaattgtttgatcagtggaacagaatcgacattcaaattaatgaggacaaaatcggtgatgggtaagcgaatgctttttcaaaaattattatttattttcatttttaggcttttcgacgcaatgcccggcccaattgatcagcagcagaagtgaatgaatgaattgatgggaagtgatcgatcaatttgaattaaggaattggaaatttttcgtccttataaaaaatgttcttttttgtttgtttgaaatgatcaacatggatttgtattaatgtatgtctcaaggaaaatttatatgatttcttgaaactgggattagcttacgaattttttaagcataaatttttgaggtccgggcattgccaattattactctaacaataaggaatttttaagttttggttgtaatcatttcttcatcgagttgattccacaattttgttgctctcagcaaaagaaattcgacgttacgctaataacccaaaattggacgtttcgcctaaataaccaaaattggacgtttcgcctaaataaccaaaattggacgttccgcctaataagttattcatctaaaaatttgataggaaaaagttgagagaatttatgcaaatttttccgcaattttttttgtttggttgtttgtccttccatttgctactgttggacaaatgctgatgaatgatgaagaattttttttgatttttatgtaattatcttttttgtttgttgttggtacagaattccaaattcttttttgatgaattccttcaatgaaatgccaacggggaacagtgaaaggacaaattgcttcatttgctcaacataatttaattgattatttttcataaattagttaaaaataaaataatttgatttgaattattattac

SEQ ID NO: 26850 - DNA, 964 bp, Heterodera glycines
aaagtgcgattttttctgcatttttctcatattcctctttgcttacatttcccctccaaataatcaaccgccccttgggcagtcattcgcttttccgcatcaatgtttagcatattctaaaaaaaaattaattaaaattggtgaaaattttgaattgttcaaaatatatttacgatttattgaaatctttttgataaaaaatgggttttatttatttttgttaaaaatttattaaattaaaatacacaaatactcataaaactattcactcaacaatttctttatttttgctattcaaaagtctgccccatttcaatacataaatataaacaggggaatcacccaaaagtggatataaatttaagattggaatcagtctatgattgatttgaatgagttttggcatggatcagtttcttgtggaaaataaattctttcaaaattttggaattttttaaaaatataattaagtacattttgccattgcttaccactgaaaggaacacaatttctggcatttctgtccaaatggagagaatgtccgcaattactgcccaataatttttccaccaatttttctctcccggatgaacacattcgactggtagcctcatcagatttaataacagaaccagatcagcagataccacatcatgttcttcctcactgcttgtttctgaagacaatccagcggaactttgctgattggcattggcattttgtccatgcttcgcggataactgcgatatataaatgctcaatttttctgcgtttttaactcaatattatgtattaatagcattttatttgcttacttgtttcatctcattttccgagaccgaatttaattttgcgcatcgaaacaattggccaaccaatgcaactttttcaaaagttaactccaatttgacgccatttggtttttggtattagtaaaatttgaaaaatcgtaattcccgctgac

SEQ ID NO: 26851 - DNA, 1003 bp, Heterodera glycines
tggaaaaaaatccccgaaggagagaatttaattaaatcccccccctcgggggaccgtgccgggtgccgcggggtaagcagtgctggttcgtttcatcacggcaccgaaccttttggctagtcagcaatcgttgcttaacttgccagatcggacgggtgcgcatgattccactgttccaagcaccccaccaaaagcaaaacgatataaccaaaatataaggaaaaattttttaaaaatttttttctccatcttcctttttgatactaaagcatcagagtgctaaaatttagttgtaaataaaatttggtgcgctttagagcactttctgaaaaaaatatttatgaaacaaaaaaatcgattttttcaagtgtccgtttggggtactcaaacaattatggggagcaaaaatccaacgcagaattaaagtacaggctatagggaagctattccggaaggattcggtctccccataaatctgggcgcatcggttcggggggactgccccgaaaacaaaaaaatcgattttttcaagtgtccgtttggggtactcaaacaattatggggagcaaaaatccaacgcagaattaaagtacaggctatagggaagctattccggaaggattcggtctccccataaatctgggcgcatcggctcggggggactgccccgaaaacaaaaaaatcgattttttcaagtgtccgtttggggtactcaaacaattatggggagcaaaaatccaacgcagaattaaagtacaggctatagggaagctattccggaaggattcggtctccccataaatctgggcgcatcggctcggggggactgccccgaaaacaaaaaaatcgattttttcaagtgtccgtttggggtactcaaacaattatggggagcaaaaatccacgcagaataaagtacaggctatagggaagctattcccgaagattcggcctcccctaaatctgtgggcatcggttcgggggactgcccgaaaaaaaaaaa

SEQ ID NO: 26852 - DNA, 972 bp, Heterodera glycines
ctgaaaccggattcaaaaatctggggtttggtataaccgttttagaaatagcgtagaaaacagcttcgatatcaagaaaccaagtcaagtccagaaaggaatattttaaaacgatttcgttttgttttggcattatgataccgaataactttcggaaattatggaaacaaaattggagaaattcgaataattttttgactgcaaatttttttccttttttgaattgggttcaaaaaaattttaagagaatttttgattattaatttgaagtcttgaatttatttgacaaatccaagacttaaaactgggagaagcaaggggctgtggctgggggcctaaaatttgggccacattggagaattaattctgatttctgaaaaagtcccagaaataactattttttctttccataccttcttgtagagctcgagctgctctttccaatggtcttatcccggtctcgatccgtgccgaactcacaaagttatggagtgaaatgtgaaatattgttttcaccacaaggcattttttctgaaaaccggattcaaaaatctggggtttggtataaccgttttagaaatagcgtagaaaacagcttcgatatcaagaaaccaagtcaagtccagaaaggaatattttaaaacgatttcgttttgttttggcattatgataccgaataactttcggaaattatggaaacaaaattggagaaattcgaataattttttgactgcaaatttttttccttttttgaattgggttcaaaaaaattttaagagaatttttgattattaatttgaagtcttgaatttatttgacaaatccaagacttaaaactgggagaagcaaggggctgtggctgggggcctaaatttgggccacattggagaataattctgatttctgaaaaaagtccagaaataactattttttctttccataccttctgtagagctcgagctgctctttcca

SEQ ID NO: 26853 - DNA, 1751 bp, Heterodera glycines
ttttctctgatttaggtggtgtgcctaaggaaaaatttgggtgttcgcccctcaaaaaatcctttaaaattctccagctatccccgtcaaattgctcggcgattttcgccccgggttctggcaattatgtcccccgatggttgaattgggattttagagcggcgggatttattggggatactgcacaggtgatggttgggaaggtggcggatcataaaattgtcacacattttttagcggatgtgggcgggaggattcaccgacggcggtgcattcgtcggtgacgcgttttttcttctcgtcaaaaaattcttgcggggaggcgggggacattctcgggacagatgattgttagggttggtcgtgtccgagagcatcatcacatatccatatttttataccgaaaacaatcaattaggtggagtgtttaactgatcgatcaaagtctgccagcctttcccctcccgccggcaaaagccattaaaagcgtcccgcctccgcagtgatcgccggcggcgacggcggcggtggctggcgggcaatttgggttgtaatcgatcaccatcattcatttattttatatttattttttgtttcgcggagagcgccgcgggcgacggacggcggaaatttttgtgtatataaatgtgatgatggtgctctgataaaaatgttgtgtgtgtttattggggggctgctgtgaggagcagtttattcatctcattgacttgcgttggtgatgagttggaggaaatggcgtaataatggggaaaaaatgtttcgaaaattttaaaatggtaattatgattttaaacagtttttaaaaaaattaaaaatttaacataggtgtgccggggagactagaaaggaggaggacaaatgggcaaatccaggacaaaggggcaaatccaagacaaatggacaaatccggacaaatgagccggacaaataagaaaatctaagataaatgtgaattaacacttaaaaacggaaaataaaaaagaaaaaattttaatttatcacaaaaatggaaacaatgaaaaatagagaggaaaattcgttagaaaatttctgaaaaagttttgttgaatttgctaaatgttaaactatatatatatatagtaagactttttcaattcgtattactaatatttttcgttgttggggataattcgccaaatgagaaaattggggaaaaaattaattgaaattaattttctccggtaaatttgttcaaaaaatcggtgagaatatttttgtacacgattttcaagtcggatatggcgagaaaaaggtgcttttcttcacaaccgtgggaataaaacagagaccgcagcaacgcccgggggaaataatgcaaaaaaaaaatgggaaattaaatttaatgaaaatgaaatgatacaaattgaaagtggcactttttaatggcactggaaaacaaagaaatgccaaagtgtcctcactgttcagatgtggcatgtgatttggagatgattaattgggtaacagaagagatgtactgagaatttggaattgaaaattatgacgggtaggcaaatttttggatttttgtaaatttattcatacccaataaaccttaaaaaagggatggcaaacgagtactgaattttcagatttgcccagatcttctgggcaaaaacgggctttgttcacttgcataaaaattcttaataaaaatttttgaaaaaactcggaaaaatcgtaaaaaatcgcaaaatttcccagtgacc

SEQ ID NO: 26854 - DNA, 652 bp, Heterodera glycines
ctgaaaggaaaagaattaacctcgttttatcacattattcttgtcatcagtttttataaaaaattttcaaaattctgagtctcctattattttatttatttttcaaaattttgaagggcgggggggggggcgaaggcccaccacgaggccgcgaagaggccgagtgagtaccttcggtgcaggaaaattattaaattttaaaaattttttaattgctttttaaatatgccaaaaaatgtaggcttaacttttttagtgaaaattcgatcactcatattttttgctaattgagcagaagcgtaccaaactttgcagggatactccccggtaaaggactaacttacactgaaatgagcgccgagctagctggctcaaaaaaattttcgaaaatctgagtctttcgtttttatttattttttgcataattaattcttaaatattttttcagaaaggggtctgaaacgcaccaaattttatttacctggtagtttaagcactctgatgctttttccatcaaaaagggagatgaataaaatttttataaatttttaattcctttttaaacaggccaaaaagtttaggcttatcttttttttcagaaactgatcagaagcgcaccaaactttgcagggatactgaaaggaagagaaat

SEQ ID NO: 26855 - DNA, 1014 bp, Heterodera glycines
aaattaataaaaaattttaaattcagcattactggagttagcatcatagcagtgcttttccttgtctttttgatgccctcgcaaaatctgggttcgcttctgatcagtttataaaaaaaaagttaaagcctaaaatttttcgcaatttaaaaagcaattaaaaatttttagattttttattcatctccctttttgatagtgaaagcatcagagagccttatttaacttttaattaacatttggtgcgtttcagagcacgttctaaaaaatatttatgaattaattttgcaaaataataaataattaatgaaaaagtcagaatttcgaaaaattttaaaaacaacaagcgttggcattttttcaggttaagttagtcctttacaatggagaaggcctgcaaaatttggagagattatatcgattttagtgcgctaggttcgatgaaactttttaaaatataagcctaaactttttggcctgtttaaaaaggaattaaaaatttttaaaatatttattcatctccctttttgatagtgaaagcatcagagagccttatttaacttttaattaacatttggtgcgtttcagagcacgttctaaaaaatatttatgaattaattttgcaaaataataaataattaatgaaaaagtcagaatttcgaaaaattttaaaaacaacaagcgttggcattttttcaggttaagttagtcctttacaatggagaaggcctgcaaaatttggagagattatatcgattttagtgcgctaggttcgatgaaactttttaaaatataagcctaaactttttggcctgtttaaaaaggaattaaaaatttttaaaatatttattcatctcccttttgatagaaaaagcatcagagagccttatttaacttttaattaacatttggtgcgtttcagagcactttctgaaaaaatacttatgaattaattttgcaaaaaataaataagtaatgaaaaagtcagaatttgaaaaattttaaaaacaacaa

SEQ ID NO: 26856 - DNA, 886 bp, Heterodera glycines
taaatcattttttgttttttttaattttctctaatcttttctaagttgccaacccacattgtatgatttgtcataataccataaaatattatgtattttaccaggcctaaatatttcaaacgaatacatttttctcagtccaagcgctttttaaataatttttttagattttttgaaatttctcaatttattttatgaggtacatttccttgggtattttgtcatgatgtcaaagatttggtattctataagccctaaaaattaaaaaaaaaccatttttaaaatttttcagtggatgcgtaaaaggccggtaaaaaacattgggaactgctcttcctcctccgcctcctctgcccatggcaccaccactgagacgtcctcgatttcttcatcctcctccattttcacttcgtccagccacaaccaatgccctccggctatcaaagtgttccattgcgaggccatccatttcattgtggcattcacaattgcggttggcgaagtgccgggcccactgtttgactttgaatgtgccaacaactcagtgacggtcagtttcagtcagtgttttggtgcaaaacatggatagatatattggatcaatttggtttgttctacaaaaggtgcgcatcacacaaagggactaaaacgggaacaactcttttcccccgtccgaaaatttacttttaaaaaaaaaaatttaaaaattttccgtggtggagacgtagggcacccttaaaaattgtacaattttttatatgagtgaaaaactgttgcccgttggaacattcactaaaacttaaagaaaaaaaatactctctaaactaattatagtaattgcatccagtatttgcctataggtgtccgcctgagaatttaacaatcg

SEQ ID NO: 26857 - DNA, 1112 bp, Heterodera glycines
  unsure (1)..(1112): unsure at all n locations
aaaattttgcgaatagactcatttttgtcttttgtcggaagaaattaaaatgctgcaattanaatgatgaaatatctnntaaaacaattanggtaataaaaaatcaaaaacaaagctttaggcattcaaaattatatgcagtgaatactgacaccaaagcggaatgattcacgttatcattacattggttagcagttagcctaaatgggttcagcaatttttattctttttttactttatggcgttttatattcatataaaaagaatgagaatttggagtgatcgctttttatgtttgccgcggccgcggcgtttgaaccaataacagttgtatttttgtgatgacagctccaacttcggcagttgtgcgtgagcaacatttggcccttcggggtctgtcaatgtatattacaaaatgttaccgaaatatttttgttttaagtgatgcgactgtccaatcccaaatttcatgagaccatttgcttgggccgcgatccggccgatcctttctcaatggctatttgtgattcgattggcaaattgagtggtcaaagttctgtcgatttgccgcttgattcctacttaattgcaccacatgcgatgagatgagtttataaatttatttttaaatgctttcaagttttagtgatgtttatctcggggaaatgttcactctttacatttcaatcatcaacattagcactgtcatttgcaaagaaatagccattaaggtcagcgaaactccaaagtaggaaaactcgttttgttattttacaaccaaattcagcttaggtcgacattcaaactcagaatcagcgcgtctctctcggagaattggccttcgccggaattgcccttgagccgaaccaacaaattggccaaatttttaaacatgacatccgggaactaggccaacacatgtgagttttgttttgttttttactagatcgttcataacctaaatatcttgttttgttttttaatttcaaaaaaaaaatcaataaaacaaaaatcaatgaaccgttcgaaagctctgatgattcgctataaaattaaaaagtgatattccgttcttaaccagtctaaaaaataatgaattttaatcgaatgat

SEQ ID NO: 26858 - DNA, 1636 bp, Heterodera glycines
  unsure (1)..(1636): unsure at all n locations
tttgtcagttgtcgactttttggtgagatttggtagacgtgtacatcgccttttgctttgatgctggcacaggcaattgctaatattccctaatttnaatatttagcagctcgtcccccccttcnnccgccctccgttcccgcatagaattttttttattaattattaaaattacacaaaaatcccaaagaatcgttgaaagaatttttttccttcaatttcctaaactttctgaggtctctgttgtaatttttttttaatttttacgggtgaaagtctattcgggggggagtaggaaatggcggacgacatccaactttgtactgtttttcgacaaaaattcgtcataacttttgttagagttgaccaaattaaattttttgtatcattcgatagcccttaatgttctccatcgccatgtaaaattcaaaaaattttattggttttcaaaaaagtgtgacaaaaaatcgtaaaaaaaattcgtccataacttttttcaaacttgattaaatgtacgagttggttttaccggaaagtaacggaaagcgggaggaagagaaaccataatgcacccaaaaaattacaatccgtgcaacatcagaaatgatgatattcgcatggtcaagcagtggctctcttcgtcgttcgtaacggaatgaaattttcttcaaaaagcacctgcaatttgagttttaaaatgatttaatcccctaattttgatgcttactcgtattcactttcgctgcgtttttccctctttttcacttgctcaatgtcactggtaaaaaacaattttgaaaagatttttttgagcgcttcgacagaagtgaaattggagaagccgacctttgataaagctaaaaacattgaggataagaaaaaccaattgagtttatcccttatcggcgcgatttacgtgtttttttttatttaaaagcaggcggaaatttttgaaacttaatttttaattttttttttttgataaaaatggcctctttagtattttgttttgttacaataatttatattaaatttaccatttttaatggagacaatccttttttccgctgcttgaaatggcctaacagctgtaagtcgtaccaaaacatctgttgaaaggtaaaatattaattaaaattaaattcaatattcatttcaaggactacaaatttttaaaataagttttaattacgccaaattttagttttttcatatgttccgattaaattggaattttgcgcagttaatttttaactgcgcaaataaaaagcaatggaaatggtaaaagaacacacttatgaatcgagcaaaaataataccctaatacactataaatgttctaaaaaatttttaatcttgtttttctatatttacaaattttttgaatgatcttttgtttttaccggtttacactttttatactcccgagacatcgtaaaatcctcgccgttgtttgtgcttcgtttgctttccacttcttccatcagttgttgtgccctctcgtaaattttgttctccttttttgaaggcaacccgcaatttttgttgacggcgttgttgagccactaaaagtgaaaaattttattttttatatatcgttgagaatatttaaatatcatacgattaataattttaa

SEQ ID NO: 26859 - DNA, 1055 bp, Heterodera glycines
ctgtttttggtcacaaaacacctttttgtcattggcggggcgtatccgccaggcattttgattgtcttcatgaaatcctccctgatgaccgggcttaatcccccggggccggtgtgccattcggaccgaacgacaatgccattgtggcacttttccgtcatttgaaattcatagactggcatggccaattcacaacttgcagagagatgcttttgtgctttgtttttctcttaaccaccctatcaacacaaaaagcgtttggcgtgtgacggcttcccaatttcataacaatttcggcatttgcagtcagtaaaaaatgccctttctctcattacagcagcactctcgcgtaaccaacaacgtcgctattttcgctcggttgccactgcttcgtttggacatcggggcggcccgcaatacattgtcaagtcgcgcagcgctgcggaaccacggctcttcaaccgtcttgtgcaccagacaagccgcggaatccgcgtctcagccttcgagggcggtggttcgcaccaatacggtgccgcgcaccaacacgtgccgggtggcggcggcttccgtgacttcaattctcgtcgcggtgtagggccgggagggtcagcggacccgcgccgttatgacgctggcaatgccgagcgtgaggaaatgctgcgcttgatggaacaacgcgaggaggagcatcgcaagaaggaggaggagttgcgcctggagcgcgagcgggaaaagttgaagtacgagcgtgagaagttggaacgcgagcggctggaggtggagcacatgaagttgaccgcccaaatccaagcgtccgggtggctccaagcagccgcactgcccgccgccggtggttttgttgctgcttcacccgccggttttggtgtccctgccgcaccacagcagtcgtctgcccgggactctcgccagcagcagaattattctcggcaccacagcgaagcggcggtggcactggcacgaaacagcgcgaaggtgaaggaatcgtcatcatcctctaaactgtcggcatcggttgttggtcgaaatgctgt

SEQ ID NO: 26860 - DNA, 978 bp, Heterodera glycines
  unsure (1)..(978): unsure at all n locations
atccccaagagaaaaaagagatagccattttttcggcaagaatttttttcgtttgcatttcaaatatcgtgtgagtgtttagtagagccagactagagaaggcaaatgttggtaccaagtttgcggtcaaatccccaagagaaaaaagagatagccattttttcggcaagaatttttttcgtttgcatttcaaatatcgtgtgagtgtttagtagagccagactagagaaggcaaatgttggtaccaagtttgcggtcaaatccccaagagaaaaaagagatagccattttttcggcaagaatttttttcgttagcatttcaaatatcgtgtgagtgtttggtagagccagactagagaaggcaaatgttggtaccaagtttgcggtcaaatccccaggagaaaaaagagatagccattttttgggcaagaatttttttcgttagcatttcaaatatcgtgtgagtgtttggtagagccagactagagaaggaaaatgttggtaccaagtttgcggtcaaatccccaagagaaaaaagagacagccattttttcggcaagaatttttttcgttagcatttcaaatatcgtgtgagtgtttggtagagccagactagagaaggcaaatgttggtaccaagtttgcggtcaaatccccaagagaaaaaagagatagccattttttgggcaagaatttttttcgttagcatttcaaatatcgtgtgagtgtttggtagagccagactagagaaggaaaatgttggtaccaagtttgcggtcaaatccccaagagaaaaaagagatagccattttttcggcaagaatttttttcgttagcatttcaaatatcgtgtgagtgtttggtagagccagactagagaaggcaaatgttggtaccaagtttgcggtcaaatcccccaagagaaaaagagatagccatttttccgcaagaattnttttcgttagcatttcaaatatcg

SEQ ID NO: 26861 - DNA, 930 bp, Heterodera glycines
  unsure (1)..(930): unsure at all n locations
cttagaatattataaaatcatattaatgtcatcantttgaaataaatctgaaaacatatacagtcatgattagggtcgtgacctttagtgacgaaaaatttcaaaatagttaactaaaatagtgagtaaaaatgccaaaatagtgagtgacaaaatagtggcaaaatagtgacgaatagtgacataattttcagccaaaaattgagcaaaaaaattttttattcattaatttcagttgcaaatgaataggactgggatttttaagggaaaaaacccaaaataggtacctaaaaaaataattttaaaattaaaaattcttgccatgaaaatgaatttttgagaaaattttttcatttcttaggggtgattttgaaattttttaggtcgattcttagggggtgtatttttgggtttgttgtatttttgtagaaaaattatctaaaaaattccgaaatagtgacaaaacgccaaaatagtgatttttattttcaagttgtccaaagcgagttcattgaacaaaaccagttcactttatcgcattgtcaacaaaataatagctcgagttgtgccgatcacactgataacgtatttacgaaatgcgttatccattgctgccggggcgacttttgcaacggcgtgcccgaccgtcgtgtagtccgggggtgggtcgaaagaatagggtattcaacctgaaaattgaaaagtttaggcccactgttgtttacatgttttttgccgtgttgagtgcaacgattttttccggtaaagcaacaataaatgtggcacaattaaatacattagcgtaatcgggttaattaattttaaattttacgaatcataaatcgagcttcaattgacatatcaaaattataaaacaattaaaagtaattatttcatcttcacttttaatccgaatttgtcaaatggttc

SEQ ID NO: 26862 - DNA, 975 bp, Heterodera glycines
  unsure (1)..(975): unsure at all n locations
gaggaggacagtcccggttgtgtggggcagcggggggaacagcggcggctgtttctggtgctgatttgttttgcggtgatttatgttgttggttgtcgcgccgacgtgcacccagtgaatccgttgttgttgtcgtgcaaagtgaacacatgccgttgctgcgacttttccgttctcgtcggtgagagtttcgactgaaaaaaaaacatttaaccattgaaggcttttttaggtgcacttcattccaccccctctgtcgtttccccatcggaaaatttaaaaaaatttcgaaaaagttttcaacgatttttagaaaatttgccaaacttttttttaattttaagggggaaacgacgcaggggagaacgacctgttccgacaatttttgttgtaatcggttaataatttatctgaaaaaccaaactatgaatttttgattgaaaaaaatgtaaaaaccaggaatggagactttgtcgatcattcaaaaaaatctttaattttctgtcattcgttaattacggcttcgaatttcttaaaattttttcaattaatgagagaaaagcgaattgagaaaaattagtgtttaaaattcgtcttatgccaataaatacctgcttcaaaacattggtctgttggtgctccgccaatgcgtcgttctgctgcagttggtccaaccgtttcttcagcacggctttgtccgccttaacactgccgagcgctgagagaagacgcgcattttcatcacgaagaagacgcatttgcacactgtcagccaactcatcgccaccaattttggaaagagctgaaaaagcattgttttaaattatgtaaaagtgtggggaactttaactgtcagaattatttttttggaattattatttattttttggcaaattcacaattaaccgttgtgccccagacaggattttgttttcttggntaagggtttatttaggcagtaaaaagagcgtaacg

SEQ ID NO: 26863 - DNA, 843 bp, Heterodera glycines
cgctgtccagttttccgcttggtgtccaattttccttcgatgtccaaaattccggcggtgtccagttttccgcttggtgtccaattttccttcggtgtccaaaattccggcgctgtccagttttccgcttggtgtccaattttccttcgatgtccaaaattccggcgctgtccagttttccgcttggtgtccaattttccttcgatgtccaaaattccggcggtgtccagttttccgcttggtgtccaattttccttcgatgtccaaaattccggcgctgtccagttttccgcttggtgtccaattttccttcgatgtccaaaattccggcgctgtccagttttccgcttggtgtccaattttccttcgatgtccaaaattccggcggtgtccagttttccgcttggtgtccaattttccttcggtgtccaaaattccggcgctgtccagttttccgcttggtgtccaattttccttcggtgtccaaaattccggcgctgtccagttttccgcttggtgtccaattttccttcgatgtccaaaattccggcgctgtccagttttccgcttggtgtccaattttccttcggtgtccaaaattccggcgctgtccagttttccgcttggtgtccaattttccttcggtgtccaaaattccggcgctgtccagttttccgcttggtgtccaattttccttcggtgtccaaaattccggcgctgtccagttttccgcttggtgtccaattttccttcggtgtccaaaattccggcgctgtccagttttccgcttggtgtccaattttccttcgatgtccaaaattccggcgctgtccagttttccgc

SEQ ID NO: 26864 - DNA, 1321 bp, Heterodera glycines
aaataaactgagagagagagggagagaaaatgatcgagagaggggagaatggaagagaacgagcgagagagagaaaatcagcgagagagtaagcgagaaagcgagagaaaatgatcgagagagagagagaaaggggagaatgggagaaaatgatcaaaggtcttatttgctgctgctgccctgcaattttcatttgaaagaaagtaggcaaatattctaataacttaatctgagtctgtggttaatagaaatgggaaatgatcacaaatcaaaaaatgcctattttctgctgctgatcagatcaaaatgccaagggcgaaaacgggggtggaaaaaaacgaattttaggacagaattagattcaaaaaagaagatacaaataagattaggggaatggattatgacactgaatttcatgggaatgaaatgccgatgccgacttaaaaacaaaaatgccaaaacgattaagtcgctcttaatgggtcgtcgattatgactgaatttcatgggaatgaaatgccgatgcctgacttaaaaataaaatgccaaaacgatgaagtcgctcttaatgggtcgtcgattaaatatgcataaacaacattaaatatgcataaacaacaacaatgatacgttttgagagtaaaaagatggcttttaaatttgttaaacattattgttaatgtattgaaaaatttgcttaaaagctaaaacatccaaaatttaaaaaagaaatttaattttaaaattgaattttccaaatttaataatttagtgctctttaaagggccagcagcaattttttacacacaattaaaatggctttttaaagcgcagtgattgatatttgctagtgggcagtcagtttctttcttatcagaacagattggggcatcgttaacagcaattaattaaaattaaaagaaaaaacaattagagagaattagtgtcagctttttagtaattaatgaagaaaaaaacatgcaaaacgcaggaatttttgacagaaaattattcataacttcacccaaaatgaatcaaattttattatcttgatatttttagctagccctaagtggttttctattatcctgcgaaatttcaaaaaagttatcacctgagaaggtcaaaaaaccaagtttttttcaacatttttggtcacaacttttttaaatcttaacgattttttttgaattttgtaggctaatagaaaacacttagggctatcgaaagacatcaaaaattaaaaatttagttgttttggaacaaagttatatcaaaaaatattttcatttgatggtttttgactaacgccatagcacca

SEQ ID NO: 26865 - DNA, 849 bp, Heterodera glycines
ccccccccccccccccctctctctctctccttttttggccgcttttctctcgccaattcctttcggcatttttctctgcccgcctttctcttaattatttgtcagtttcccttttccccgctttttgagaatgtccacaacaatcggatttgcctttccctttcttttctattgcttttcagcctaaaaagtgccattttcagcacttccgccgctttgtttgttttccacaaaatgtcttcgtcagtttaatcctccatttttttgtgccatgccttgcaattgtcagccgattccgccgccgccgccctttgatgtcccccctccccccgacccatcgtttgtgttccatttgctgagtgacgacccgcccgaggcatttgaaaaggtaaaaggcaatttgaagaacgggccaatggtaacggagaagtgactgactttttcgctgggcatttcacgcggattttctgaattgatcccatttttagcattttggggcttagttattttttaaattttcttagttttacccattgctgaaggggttcgtcctccgtgtccccttcctgccgatttccccggcatttcgctctcacttaacatttccccctcttccctctcagcttcatctcctccactcgtgccctcttcaaaaacagcttttcttcttccgttatccgttcggtcgttttcttccgttcgccacagtcgctgcttttctgctgctcacttccttctcagtcacggcctttgttttttggaggaaacggcggaggacgcgaagaatggaagagagggaggaggaagaagaggaaggaacggaatggaggaggaaatcggaggagagga

SEQ ID NO: 26866 - DNA, 960 bp, Heterodera glycines
aaaagtgatcggacaaagccaaacaatggcatgaaaagtgatcggacaaagccaaacaatggcatgaaaagtgatcgggcaaagtcaaacaatggcatgaaaagtgatcgggcaaagccaaacaatggcataaaaagtgatcggacaaagccaaacaatggcatgaaaagtgatcggacaaagccaaacaatggcatgaaaagtgatcgggcaaagtcaaacaatggcatgaaaagtgatcgggcaaagtcaaactatggcgtgaaaagtgatcgggcaaagtcaaacaatggcacgaaaagtgatcggacaaagccaaacaatggcatgaaaagtgatcgggcaaagtcaaacaatgtcacgaaaagtgatcggacaaagccaaacaatggcatgaaaagtgatcgggcaaagtcaaacaatggcatgaaaagtgatcgggcaaagtcaaactatggcacgaaaagtgatcggacaaagccaaacaatggcatgaaaagtgatcgggcaaagtcaaacaatggcatgaaaagtgatcgggcaaagtcaaactatggcgtgaaaagtgatcggacaaagccaaacaatggcatgaaaagtgatcggacaaagccaaacaatggcatgaaaagtgatcgggcaaagtcaaacaatggcatgaaaagtgatcgggcaaagtcaaacaatggcataaaaagtgatcggacaaagtcaaactatggcatgaaaagtgatcgggcaaagtcaaacaatggcatgaaaagtgatcgggcaaagtcaaacaatggcatgaaaagtgatcggacaaagccaaacaatggcatgaaaagtgatcgggcaaagtcaaacaatggcatgaaaagtgatcgggcaaagtcaaactatggcgtgaaaagtgatcgggcaaagtcaaacaatggcacgaaaagtgatcggacaaagccaaacaatggcatgaaa

SEQ ID NO: 26867 - DNA, 1554 bp, Heterodera glycines
cttggcgacgagaaggcggaggatggaagcgggagaattcccgggcgcagtttgggggagctcggtttcctggtgttcaaccaggatggtacgccggtggaattggacgacgaggaggagaatcgatggggaggcggcgtccttgatcatcctgaagcggctccgcggcgcgcaccggaggacgcaaaacgaaagaaatggcgccgatgagacggacggatcccacgcgtcaccgggagagccactaccgacagccaatttcgatccttccgccatttccctcgcaatttccccacatttattttgccatttcttattttattcacatttcttattttctctctcttttcttcgcctatcgtatccaatcgtctcacttctccgatttgcaaatagtttatgcatttcttcgccgttttcccaatcccccttttttcgctggcctttggccgtcatttatccgaaaacatttcctttgtcccaatttttgcacattttccatttcattcattcattccccttttttccttttgcattaccattttgtttatctgatcagcctttggccgattcattttgccgtctttgaattagttattcgccagcaattcttcgggggcgtctcccccggtctctccccctccctttgtcattgcgtaacttggccattttcattgtcattttcaaatcattcgccaatttgtaagggggctcctccccctgctctcatccgtcctcgtttttttcacttatgcctaattctatcgcattttcaacatttgttttccactaatcaccactggggagttgtctccccaaatttcaatttcccccaccacaaatcgcggcattcatttaccccctgccgtttgtcactgtcatcccccccattttgtttggttttaattacccaagtttgagctgcttaataaattgtgcttttaatcttgtgtgcttcaaagggtgggaaaggaaaaaagggagcgaactcccttcggacgaactcttcttagcccacggacgggctcgcgcatcgatcggtcacacgggactctctcacttggagtgcccagctcgccttagccctcgcacgggctcagcacgttaaaacgggactcctgcctccggagtgcccagccgtcccattttttctctcccttccccctccccaacgtcctctcttcccctccgagagtcggaccatcggacatcgtcagcgcaagacgggagaagcacgctcccggcagatcaacttgtgggattagccaaggagtcccggcttctccaaattctaagtcggtggtgccgttattcacatcacctggcgccctcgcctgcgccgtttgctgccagcactcaagcccgagggagtcacccctccctccgccggccgctgccagcttcagtcgttcggcacctctgcctgcgccgacgatcgaagcattcaaagcccaaaggagtcatctctccccttgccggccgctgtctttccttagggagtccaatttctccatcgcaaatctttgtttgcctccccgaccctccgcctcactc

SEQ ID NO: 26868 - DNA, 1029 bp, Heterodera glycines
atgtgaatgtttttccagtcatctccgccaaacacatgcatatcagcccaaagtacaacgttgagtaggcggggcgacatggcccagtgaagtgtgtcgtccggtgcaagaaattttgaggataaaatgtgccattgtctgagatttttgacagatttaaaaataatgaaaatagcaaaaaacacaaaataaccttttcattgacaataattatctctgtttttgatacgcataattaattaattttttaaattgtaattccacaccaaacattcatcaaaatcgtaccgcccaaacaaattatcacataattgccatatcttttgcaaatgatccattctattcctatttatcaaaaggcttttcattttacattttgcctatgccatttttcatttaaatcgctttgaataaaaaactatcctaatttatttcaaaaattatttagtgctgaattatccttttcattattcaatttaatttaaaattatattttaaccaacgacttagccaaagagagaattaattactagggctgggatttttaggggcgaaaaattccaatttagggacctaaataaggacaaaaaatacgcgaaataggggcgaaaataggggcgaaaaacttattttaggggcgaacactcaaaatagggatttttaggggcgaacatccaaaatagggattcctagggtcggataggggcgttaaagcgaaggattttcgaacaaaaaatgtgtttttgtgcatttctcgtcgagttaaagccgcagaaaaaataagtaaaaacctaagaatcccagccctattaattacaaatatgggggagggggttcggcccaattagagaaataacacgggcattaattcctacgtaaaaaataaaaataggtgaaccaatttacaaaaataattaaaaaaatattttagcttaaatgtaaatgtctgtgtgttattccagaggtaaatttgatgacgaatgtgcccggctttatatcagtcattccattataattatttattaattt

SEQ ID NO: 26869 - DNA, 1530 bp, Heterodera glycines
  unsure (1)..(1530): unsure at all n locations
ttttggaggattttggagaaaaaattttccactcaaaaatcatggtcacacnccttggtcccgaatgcaaaaatcacttttatttctataacttttttcaaaaaagtgataaaaagctaaattaaaatttataaaatagagcaaaaaattgcggatttttgtattattttactttttcaatacaacttttcataaccgagttcagaatttttttctgaaaaatcgaatttttccagaaattctggtataacttttttattttggaagatagaaattccaaacaaatctcataaaattctcctatttttttgctatttttcaaaccgtattacactaaatttgatcaaaaacgaagagagttatgaatttttgaaatttcactggatttcccggggcccaaatagtgacgatttttcaaaaatttgtaaccaccttccaaaaagtctgaaacccaaaataatgtatatattcgagttcagcaccttaaattaggccataaaaatgcattttggctaatttatgagcaaaaaaatttttcatgaaatgcaaaaccatggggtcccccctgtggttttgagtttcaaaatcacaattaattttataactttttttaaattcaagataaaaacatgaaataaagcacattagattgggcttaaaattctctacaaaaaagctcttagacgattttttgataaaatcaactcctgacgagttattgcgccagaactgaaattgaggcctagcaaccaaaattttctatttccaaaaaaattttgaaaattttttctgaaaatgacaccaatcgatagagcatgaaaaacggttgcttgaaagtggtctccgtttttcccggaaaaatctgtaaaaaatcataaaatttaaaaacggaaaattttcgagggggcctagctcgaaaatttctgaaaatttctgaaatctaaaaacatggttggatagagctcgtcaagctgtacaaaaaagccgcttacaccgacctcctatcatcaatatctggcgagttattcggccggcgctgaaatggcccaaaaaagtgacccatttttgcgcagttttccagaaaaactggtaaggcctaggggttcggtcaagaaacaaaaaatgtgccaaacatccatacgaagctcctttacgaggccgatttttcatttaggcctttaaaaaaattttgaatccgagcaacttcaaaaaaaattttgaaaaagccgtttcagcgccgttggcgctcagttggccctcggagcgaaaaacctatagttttcccagatgcgcctcaaaaagttgtccccaaggtcgaaatttcgaacccctcccgacgccccgtaaggagattttgtttttggaaatgagttgccttgtttctttagtagtatataaactagcgtgttggaattgacgggggcggcgtaggcaattggcttttggatgaagagaaaatggacatgctcatttgttattttagaacatacaaaacattaattgcattagtgtgctgttttanagcgctat

SEQ ID NO: 26870 - DNA, 966 bp, Heterodera glycines
ttaattttatttttgcacattaaattttacaattcaagctttcatcctgctttcttaagcttagtccacttgtgttttggtgccatttttcacttcggttccaccgaacttttgccctccccgacagatataacagacaaaccgaggtgtttttttacaaaattttgccaatttttaattgtttaaatttggtccccaaagcataaggtattggacctatccaccgagcacaaaagcgttgcccaccaccacgacaacgacgccaaccacaacaacaaccacaacgaccaccaccacaacgacgacgacgacaatgacaccaaggccaccgccaaaaaagtgccaagacattgacatgaattggtaagaacaaaaggccgagaatggggcgggcgaggggggaatttgggacaaatggaaattgaatttaaaacaaaaaacgaccaattggcattgtgtgtgcgattttaagctttacttgggtggcagagaacccggacagctgcgaacaggacacggaagtgttgagactgtgccgacggtcgtgccaaatgtgcggcaacaattacacagtggaagtgccggacaatgaggtggaggaaagtgagtaaaaaacagctgggacaattaataaagtgcaaaagacgaaggcctacggtaggtggtacagtaccccaaatttggttaattgggcctaattgcgtgcttactccccctttttgcgcagtgtacgacatccgtcgagtgcctgcccatttgcagcggttggcctttctgatcggacggtggcaaagcgatttcggaggaaaagccgactttccgaccatcccgcgcttcacctacggagagaagttggacttcagtgtgagcacccatctgaagcaatcagtgctcaattacaggtggcacacttggaggggaaggggggaatggacggcatttcgaataaaaagggagggggggggg

SEQ ID NO: 26871 - DNA, 1326 bp, Heterodera glycines
  unsure (1)..(1326): unsure at all n locations
tccagccctcgatcggtgtacatgntgtctgcacccctggccattgctcanaatagctcttcaaacgcccttttcatgtccgtcggtcgtttactctttacgggggtgccgaacattcgcctcgatagaacatccaccgccaacagcaagtaacggtagccgctgttcttgcgcgaaagtgcctggaaatctgccaagtccgcctgaacatctgaaccctgaattgtgcgcaataagccccggtacaacttaccggtcatgaaacccgtaggcacagtgcgtaggcgtcggaacttgtctctctttggcttgaacagcgtgtaggtggtgttcctttgcaaaaagtcctcaaactcggcacgcttcaacttcgggtgcttctccttcaccgccgcgtacagagcactcgcccccgcatacccgcccggattggccgggtcggtgtatattttgtttattttcttgtccattttgagggaacaaatcctctcgtttgtttgacttgtccgacgaacccagacccaacaaacagtcgattgagtaggctactggcgagcggattctgtgcgagtttcctcttcaactctttggttccgcgtggcgaaggggcattctccgggcgagggtccaccaggcgttcaattgaccaggccaggtccgagtcgataaactctcggcccgtctttgggttaatgattttcccacggtcagttgcgccgaatctctgcggatcagacataatgatggccaacaggtggtccttcttctcgatcaatttttgctgttttgctgctttcttattggtcctgggtgatcggctgcttccctgcgtctggcttgttggggttaaaaactttggcacttcaatttcttcctcttcatcttcgtcggtaaccatcacggacttgtccttcggttcgtccggaccaggccgtacctgcacacccgtctccactgttttatttagcagttgagcaccgttgctgagctgtactcggacgggccgctccttatgttccttgcgcatcttcaggtaccggcgcaggtgctggttgtacattgcgttccgctcgctgacgtttcccttccgcttctgtactgcagcggtcacctgtcgtttgacaaagcctaagtttgtccgctcagcaatgtcgtcgtcgtcgtcattctttgtctccctcgctgcaaccagccccttgtagtgctcgtacggcagcagaataagtttattggccattattgctgcgcgaaagcaggtatcgggcagccctcatcagaatgggggccaacaaaggggccaaaagtgatccgcctgactgctgcact

SEQ ID NO: 26872 - DNA, 920 bp, Heterodera glycines
ttattaaaagggccattcacaaacctatgcatagagagatgaaaatgaaattattaatttgtgccgctcggggtaaaaggggaccattaaaataattactgcgcttttttcactgattgatcgcttgctgtgctctgcttttcttctaattggttctgcatccgctgattttgcttgctgattcattgccagcccataataattagtcattcattccccacttttcctaattggcgctggaggggttaaaatatataagaggcgcgtgacgacaaaacagcgggaagcaaattcggagtcctttcattacaaaggaaaaccgacagatcaatcagcgggccatttttgagggaaaacattcattggttttcccaaataatcatttaaaattcgaaaattgggcaaaaaaatgcgatttaaaatacatttcccagtaaattgttggataaaattgaggacaaggtcagttcacttttgaaatatttgtggagattttatcaaattagttgcccatcgacaaaacaaattttttttaaatcttcaattttcgagtaatgaattttttgtgaaaattttttaaagtcaaaattttgatagaaaatatttttatttgttggtccatgattaaatggttcgcacaaagtgctcttgtggcgcaatcggttagcgcgttcggctgttaaccgaaaggttggtggttcgaatccacccaggagcggcagtcttttttagcattttttaaatattttatttttataatgtttattaaaatagctagatattttttattagagcgacactcacaagtgctcttgtggcgcaatcggttagcgcgttcggctgttaaccgaaaggttggtggttcgaatccacccaggagcgggttatctttttagctttttttaaatattttaaaaaaa

SEQ ID NO: 26873 - DNA, 922 bp, Heterodera glycines
tttaatttcggttggtggccaaatttcgaatttttcaaaatcaaaggacatattcactttgcataaattatagagctaacagatccgtttgtcgaaatatcggctttattcctgcaaaataatttttggcgcgcccaatttttagcaattttacgcaacttttttaaaatcaaaattttttattagttggccataaaattgaaaacaattatttttattatttaatttgaccgatttgtgcaattgtcttcccgcaatgtttgatcatattccgacagggatgagatgaaaatgatggcattcacattgtcaaagcaatgaatccacttcaaattcattaatttgatagcaatttgttaattattgtcttattaattatttttaattttttcaaataattgttttatttatggattatatgcaattgttgaaatgtttttacttttttacgttcggtctttgaccaccaacatcgatgaccctaaaaaatagagtagagcgggaccgggaccgggccgggaattcccggtcatccgaggtcccggtcccggttcccggattttgaaaagctcaggtccaggtcccggtagggcaaccgggaaccgggaaaaacaagcactggtaagaatggagggtctgagtgaaaaattagtgatgaaaattggagttaaagggaaaaattaagaaataatcataaatatattctttcaaagaaacaataccaatgtgcaaatggtctagtggctagtctcattgacttttcccttcttctttcccctggttcaatccctctacagaaattaaaatattttgaattttctttttgtatactcatggctttcttatcgacaaaatatgattcttaattttttttaaattgtattttatcattttttaaagaaaatccgtacaaattagccta

SEQ ID NO: 26874 - DNA, 1182 bp, Heterodera glycines
  unsure (1)..(1182): unsure at all n locations
ttaattagtcggtgttggtttcttaaatacttttaaaatgcatttgtttttgtttttattttcgtttgcccccaccctttgcgattgtttgcgttctctccgccatttttgccattgtcgcgcgcgacccgtgccgtcgtcgcctcccccatcgacgaacatcatcaaagacaccgccgcgggagttggccccgtcgttggcatcgctgtcggcatgtcgtccattgtgcgcgaaatgtcgcggatattgtccaatttttcgaacagagaataaatcagagttgcctgacaaacggaaagcgaaatttaattaaataaaagaaatactaaaatccaattaaatttattttaaaaacattaaaatacaataaacccaaattttcattttgtaaaaacatttgaataaaaataaaataaaaataaatattatttttcccaataataattcctcttacataattaatgacatagagagatgagatcctaaaatgaatattacatttataaaatgacctttttaattgacctaattaagtgaagtcgcagcgaaagttttgcatgatgtctaaaaaaggtgagaaatattgtttaaaaataaatccaaacttctcaatgcgcccgataaggtcaaaaatcatcggaaaaatatgtgtaattgtggacagcaaaaggggaacctgaaaaataaaataaataatttattaaatttatcaaaaaatcatgaaaatgatttgacctgattctttgtaaaaatactgcccgatgatttttccacagtttctgacgattggacggcggtatgtatacagtaaatggacagaagaatcatcgctattattacggtattagttgccttaacattgtttatttgttttttgcatgctttcacaattcaatgtaccaatctgatggcccaaagtgatggtttgcatcgccgctgggcgtggatttggcattcgttaattgcctcctaattacacgcaaatttaatgtgtgccccatttcgatcagttctttcccgtgtgaacagtttccagttgaacacgtactgttccgctttgctgcccgacaatttgctgaggcgggcattcaaagaaattctaaaaaataaataattcaatttaataaatattnttagagactgttttttcggacctgcgcaaatgataaacagactgaaac

SEQ ID NO: 26875 - DNA, 927 bp, Heterodera glycines
atttaccatttgcccgttgggtagtcaatttgtggcttaattccatctttgcttttccagtcgtcgttaccagcaattgtataccatggcacattcaaactgtcataattgtacacttttgtaaaattctataaacagaaaaacatttgtatttatacaaaatatagtgtttcttttttacatattaaatattatatatattttttccttaaaaaatctttatggttaattccttttctaatactccttaattaatttaattacctgttcaaaacgctctgcaacatcctcttttgttacgccttcgtcgtaaaaattgtcgccaacgttcaacaaaaaatggggtgccatttctccagaagcaattttatacaattcttttttcgactttttagaagcaaacacttttgtaaaatcctataaaaacaatttgtttaatttttacaaataaaaatttataggagaaattaaagaatttttatatcaaaactttagttttttgttgttaggattaattaattaattattaattacttttcgaggtgtcactccattactcgtagcaagcgaatccatcgcctttgccaccgctttttgtgccacagttggacgataatactttactaccgtaggacaattatttttcttacaatcagccaccgttccttaactcacagtggtcacatatgcgtttaagtgattattgtatattcctattttattttctctcattttaaaatgttattttgttctccctcttcaacttaccgtgtccttccaccgtacactgctgctgtttgccctctaccgtatactcctccccaccgatgtcaccgatgacaaaaaagcgcaaaacatttccctccgcagaacagccataattttgcgaatttgaaacatttgtgcatttaaagccaagttgatttt

SEQ ID NO: 26876 - DNA, 1029 bp, Heterodera glycines
ttttagagatagaaattccaaataaatcctataatattctccttatttttctctatttttattgctttatttcactaaaattgatcaacacttcgatttactataaattttcaaaaattaacccaaatttccaagggccaaaaaattgacgaatattcaataatttttaaaaaattccaaaaataatgaaacgaaaaacaaaggtcatattcgtaatcagcatctcaaaataccacagaaaaaaatttttcaccccccttttcaatccaaaaaaaaattccgaaaatttctagggggcctagctcgaaaattttttaaaatttccggccatagagcacaccgttcgatagagtttcaaaagctctacaattttgccctaagacactttttggctaaaaccgacccctgacgagttatgggcccgggactcaaatgtcccgctgaggccaaaaattttttctatttccgggaaaaaatcgaaaattttctaaaaattttaccaatcgatagagctcgaaaaacgatgttttggaagtggtcttcgttttcccgggaaaattcgttaaaaaatcacaaaattcaaaaaccaaaaaatcgttttttaggcctagctcgaaaatttttgaattttttgaaaattttaaaatttgcaaatatcgagctcatcgagctctacaataagtctgctggcgccccctggctcagatcaaacccgggcgtgctattcgcctggtactgaagtgtccaaaaaaagtgattcttacgttgcctaacctacaggtcaggcctttgatctgatcaaaaaatttttgctggcaatgttgtaggcaacagttggggcatttcgcttttggggtctactaagccctgaaagcaaaagcaaaaaatttcgtaacagtgagactgtcggcaaagtcggtttttgagccgctggtactcagttggcgaccggaccggaaaatccgtatttttcccggatgcgccatcccgagatgcctaagcctgcaaaatttcagcccgatccgttca

SEQ ID NO: 26877 - DNA, 717 bp, Heterodera glycines
tttttgtttttgggcagtcaccccgccccgatgcgcccagatatatgtggagagagaatccttcgtgaatagattccctatatccagtactttaaagagaaatgggatattttaaataccccatagtcagttgagtgccccccccggacgctccaaaaaatttttttttttgttttcggggcagtccccccgagccgatgcgcccagatttatggggagaccgaatccttccggaataccttccctatagtctgtactttaattttgcgttggatttttgctccccataattgtttgagtgccccacacggacacttgaaaaaatcgatttatttttgttttcggggcagtccccccgaaccgatgcgcccagatttatggggagaccgaatccttcgggaatagcttccctatagtctgtactttaattctgcgttggatttttgctccccataattgtttgagtaccccaaacggacacttgaaaaaatcgatttttttgttttcggggcagtccccccgaaccgatgcgcccagatttatggggagaccgaatccttcgggaatagcttccctatagcctgtactttaattctgcgttggatttttgctccccataattgtttgagtaccccaaacggacacttgaaaaaatcgatttatttttgttttcggggcagtccccccgaaccgatgcgcccggatttatggggagac

SEQ ID NO: 26878 - DNA, 1694 bp, Heterodera glycines
ccatttgttggcaaaaatttttgttctgttggttgtgctactgcattatatttatgatagacttgccctgatattttaaaacaacttgggcctggagttgtaaaaccaaatctattgcaagctaaagaagcgcaagcgaatgaattattgtattttcttatattattcgtaaaatttttcgaagtttcattttcttctgtaaacaactgttttaattcaaatggatattcatcaaataattccaacaaattttttgattttccaaaattgcaacatgaatggaattcattcacttttgaatttttgattgattgctcttctataaaatgcactgccttgcaaaatatacattcaatgttaaactcttgtaaagagaatttttttacattgtttagttctgctgcacttttaaacaaaaaacccgtcggtatacgtttcgtatttggttgagatttttgtgtttgagtggtttcgtttactccatctaaatcaatcatatccaggtttataacgctttccaggttcatatcttttccaattttctttctttttctttctatttcatcgctttctttaacttcttcaaaatcaatcatatccaaatttataacattttccaaattcatttcatttccaatgttctttttctcattcatatgcattctttcaaaagaatcaaacattgttcttgaccgcttttttccggagctttgaaccggtttaaccgcttttttagacgggagcttggaacccgtttggttttcagagatttctgaggaattattttgtaaagaagatgaagaacattgaagctcagagggaaataattgtttagttcgaaccattgcaaatctaaaaaataatttttgaatatatttttatagctattgagagcatttcataaaagattaaaaacaccttaaaaaattatgaaattcaaaaaaattatatcaaaaaacgattaaaacaaaaataataatgaattattagaaaaaaaatggacattcacaaaaatgtgataataatttaaaagaaaaatattaatgataaaaagttcctttaaaatgaagggcacacaaaggaaaagaaatccattcggaaggggaaacgtaaaaacaaatgatgaaatcaaaaacgtaaataacaaaataatgaagtgttctcttcccttcatacataatcttttattttattaaaatcatacataataaacaccaaatcaaatgaaataaaaaaattaattaaatagtgataatttaatgtaaaaacctgagaattttacgatgactattttaattatatgtttttatgagcaccaaatagtataaaaatatgaaattaaaagaaaataagaaatataataaaacaaaaatatatatacaatgaaatttaatgtgttttataaaaaaattactgatcgatgtttttagcttcttctcgccaatacaaaagccgatttttgtggaactcaaaccttacttaaaggatgaaagacgacggaacggataagcatttgaaggaacagaattttttttaaattttttaattaaaaataaattaattaaatgattataattaaaaaagtgattattataaaaatattatttgtcgctttccaagacaaatatcaaaaattggcaacttgctacgcgagccaatgaaaagtaatagctaaaatcaatttgattttactt

SEQ ID NO: 26879 - DNA, 1411 bp, Heterodera glycines
ggaacaagaattgatgatttgaaatgacttattttgctaattgctgactaattaccctccccccccccaaactcacttcgtgtttggagccgtcccaataattgccaatgaacggctcgttaggctgaaaagtcggcactttccttcacgttatgccattttcatttaagcttaccttgaactgccaatcggcgttcttcttggaccccttcacccatttgctgccctcgagccccgtgccgaccatcatccgataagtgccgttcgggaaacggtacaaaatgcgtgtgaacctgggcagctccactttcttgcgcatctcagggtcactgtaccctaaaagggagcaaagaacggataaatcggttgattgggtgggtaatttggggcaatgccatcaaaaagttgccgtgggactgatcagtctttccctcccatcgttctgatcagaagccaatcaatggaatcgatggctgatcagcagaattagttagcccaatccattgggaaataaatcatgccaaaataatagctaactgatcagatcacccttttgtttcttgtttgaagaccgcgaaaccgaggctttacctcaagactcggctccttttgaaattgcttttctctcttgggcaacataacactaatatccgattgaaatgacgaaaactttccaaaacagtcttaatttgtaaatggcttaaggcttgcctttggcaatcaaataatcgtcccaattgtcgctgtgatccaatttgaaggcgccataaaattgttgagggatttcggcagcgccggcattttcctcagcagccgaacaaacgaagggatggagaagcacaaagaggagcggcaaagcaaatttgatcagcatcattagcactaatgagtggtaattagagttaatttagaagtgattaaaatggtgttgcgcggggaaaggttaatttttagggagggggcgataaatgacgacgtcttattattattattatcattttatgggtggggaggggaactgcgcggtggtgtaatgttaacatcaattacgggacacattagggacaaacagcgaaagggggaggaagagaaggacaaaattgggaattgggggggggggcgattcggcggagagactcattagtacaaatgaaaaagggaattgttggcaccatcatttgccaattactttaatgattaaatccgatcaggtccagtttcggaacaaagctgcgaaaaataggtccaaagttgttggccttaattgcataattattaaattgtcattagattagtgggacttaaatactcccattcgttacgcggcctcaggcagcgaaaatttgcacaaaaagcgcgtgtaattgggcgggccgtcgtcattaatcagagagaccaacggacagagaaa

SEQ ID NO: 26880 - DNA, 1236 bp, Heterodera glycines
gtcgccatgctttatgcctaattaggcaaacattttctcagttttgacacattgggctctgtcgcgctgacatccgccaccgaaatgggcacgtgccactatgacctttctgcaattgtacgggtggaaacaggcgagaaaaaagcaaaacgttttataaaagctattttttgaaatgctttatactttccggcattaggtcggtctcgtcaaggccagcgtgaactttgaccgtttgtcgctgcactcgctgaagggctatttgaaggacgcgcaaatcgaagtgaacgtcgagatcgagttggacccgttcatgacaccggacgaaataatcgccacggggaagctgaaacagctgcgaaaccgagcgagaagtgcgaagcatttcaaattttaagaaattaaaacaaaaaaactacacatggataccatatcccaaaattaccttcaaaattggacaatttgtccctccttcttaaagagccataattgatttcacgaaagcaagaaatttggattcagattaagtattcggtcttgttctgctaagtttatatttgatcatcctttgacttaaaatattgtttttttcggtcaataattctctcattcatccttttcctacagtaatctctcattcatcctttttctacagtaatcactcattcatccttttcctacagtaatcatcgtcgagatgggcttggacttgcatacgtcacgctccttcatggtggccatctaccggtctcagatgaagaacccggccgaatacgtctacatcatcccgtggctagcacatgtaaataattaaaacgaaataaaaacaattaaacgaaatttaaagatgcacgaccattacccgtgggaggcgagtaacatcgacaaattggagacacgcgtggcattcgacgacacaattgtgatcacagcgcatggctatgacaagaaattcattgaggagttcgaacttggcttctcgaaagtgaccggagtgatcagcagtcatgtgaggagaaacacaatataaacttagatggcctttaaattatttttcaaaaatttatagtaaattacggacctaaaaatacgcccaggggcgaaaaaatgtaaaatttcacttaaacattgaaaaacacgatttttggatagaattttttaatgaaatttcgttgccttatgggatatcggctttcgatcccatttgttcttgtataatatgttggatacagtaac

SEQ ID NO: 26881 - DNA, 721 bp, Heterodera glycines
ctaggcagttagatggtgttatagaattatgaatgataaaatcgactgcctcggccgcttcgcgccctcgcatcattttcttggcttttctccaatctctgggactcaacccaccagcaattcaatctctgggactcaattctccggcattccaaacactgggactcaaatctccggcattccaatctctgggactcaaatctccggcattctaaacattgggactcaacccaccaactttcaatgacattccaatcactgaaactaaacccaccagcatttcaatctctgggactcaaatctccggcattacaaacactgggactcaacccaccaactttcaatgacattccaatcactgaaactaaacccaccagcatttcaatctctgggactcaaatctccggcattacaaacactgggactcaacccaccaactttcaatgacattccaatcactgaaactaaacccaccagcatttcaatctctgggactcaaatctccggcattacaaacactgggactcaacccaccaactttcaatgacattccaatcactgaaactaaacccaccagcatttcaatctctgtgactcaaatctccggcattacaaacactgggactcaacctcagcaaatttctttagcatttttaactttttgtgtgccttgggatgttgaacagttggggagggctcggccgcttcgcggcctcatact

SEQ ID NO: 26882 - DNA, 1304 bp, Heterodera glycines
  unsure (1)..(1304): unsure at all n locations
gcgggcgctttgctcgcctgacggcgggcgctttgctcgcctgacggcgggcgcttgctcacctgacggcgggcgcttgctcgcctgacggcgggcgctttgctcgcctgacggcgggcgctttgctcgcctgacggcgggcgcttgctcacctgacggcgggcgcttngctcgcctgacggcgggcgctttgctcgcctgacggcgggctctttgctcgcctgacggcgggcgtatgctcgctcgacggcgggcgctttgctcgcctgacggcgggctctttgctcgccgaaaggccagagtggcctaataataataataattaaaaacccagcaatgctcgcatcgccacagggagcaatgtgaacgcgattttgaggacgaagggaaggaattctacgagatagcatcccttcggctgtacgacatctgtaactgcctgcgttgtgaaaaaatctgccatttctggaagataagatttttcggcgacggatctgagtatttactggaaacagatgtactcgagcatgtaattttattaatcttattttgaaaaaattgacataccattaaggctggcgagtccattcttttgatcatggaagcaatcaataatcgcgccagaatcgagggccatatagacgtccatttggcgcgtaaaatgtaaatatggctattttaaaatcttttttaattttaattttttaaaattttctaccagtttcgaattttttcaacagtttttcttaacgttgtattttttacaacattttatctataaaaaaaaatttttgtatttacggatattaacgctaaaaagaagatagttccgaccaaaaacgagttattgtggaaattctcacaaaaatgaaaactgttaaaaatattcaaataaatataagccctagtcataatgataaatacgatcaattttagtattgttcaaaataataacggctccctaaaaattcacggttttgacgaatcgacaaatggcagcgtcaacattgcggatattttccctgttgtgcctatcgcaaaacacacaaggatggatcttccgtcttcaagcggtaccgtggagttgttcgaccgagggttggcattctctgtacaggaacaatacggtctacaaacggctgcgacattgcgacaaaaggacaaccagtttctcacaacatcacatgccttcgcccccactgaaatttctgctgatgctctttttaaatctgtcgttgctgcggcaactgtgcaaccacaacaaaaatcaccaccatcatcatcattatcatcggcatccccac

SEQ ID NO: 26883 - DNA, 1628 bp, Heterodera glycines
ttagaagaggtacaacgagtgattaaaaaggtacaacttttattagaagaagtacaaaagtgattaaaagaggtacatcgttgattagaagaggtacaacatggtttaaaattaaataaataatgaaaagtttttataaaaatttaattcaaatataaaaatgtaatttattattaataaaataaaaaatattttaaatgaataaaacaatgaaaacacgaaaaaatggtagttattaattaaaaacaacgttggaaattattaattgaatatttatttaatttgaaattaaattattttttttacaaattcaaaaaaaataatgaaattctttaatttaaaaaaaataaatttaaataatttaaaagaaatcttcaaattaattaaaaacagtcaaaataacccaaaaatgcacagaaaaataatgttacaccgtccggattcgaactttgcaccccccccccaaaaatgatgcctcagaatccccaatcacacagggattctgaggtcttgactatgtcaaaagtaaaactgattacgtattcgtgatcagcggcccaaataacccctaaatacatatttttggaagatttttgtgagaaaaatttttccactcaaaaatcatgtgctccccccagtgattaaaatttgaacaaaagtgattagaagaggtacaatcatggtttaaaatgaaataaataagaaaattgtattattggatgtattataaatttatcaaattaaaaaaaatccttttacttattaaaaataaagttagaaatttataatatagaatatttattgaaattgaaaggaattaattctagaaaattcaaattaaataaaacatttattcatcagaaaataatttaaaataattaataaaacaatattaaattaaataatttaaattaaaacatttgttcaccaaaataatttaatttaaattaaaaatttttatttatttttaataatacaaaacaaattaattaaaatcattaagaataacgtaaaaatgcacagaaaaataatgttacaccgtccggattcgaactttgcaccccccctcaaaatgatgcctcagaatccccaatcacacagggattctgaggttttaacgatgtcaaaagtaaaatctgatcacgtattcgtgatcagctgcccaaataacccctaaagacatatttttggaagatttttgtgagaaaaatttttccactcaaaaaccatgtgctcacccctttggtcccgaatctcaaaatcacttttatttttataaaaattcttaaaaaagtgataaaaatgccaaataaaatttatataatagagcaaaaaactgcggatttttgtagtattttatttttccagaatatcttttcagaaccgagttatgaatttttttctgaaaattcgaatttttccagaaattctggaataacttttttccttttttagatagaaattcaaaataaagtccataaaattctcctgatttttctctatttttaaggctttattgctgtaaaattgatcaacccttcgatttgttatgaattttctaatattaggccaaaatcccgagggccaaaaagttgccaaaaaataaagaatttttaaaatattccaaa

SEQ ID NO: 26884 - DNA, 1031 bp, Heterodera glycines
taatgctcgtaacgacaaaagctgaggcgaagacgtagtaaaaattgcgcagaattgggtagtaagcccagtaatgacgccaggggaacatgcgaagctaattttaagaaaatatatggtttaaaacattacaataaaaaaaattcgaagcccggaacccgaaaagaaacaagtcaaatttttgactttcgaatttttggctcaactggtttaaataactatcgtttgtatgattttcactatttgtcagcactacaaaaaagtggcagaaaattgtcaattttatttgatgcaaacaaagaacaaacccattcatgaagttgggttggataggcgggcattctttaattaagccaattacatatgtaaaataagcaaacaaaaaaccttggatcaagcttggtctttgggatttgccaatttgggtcaaaaaagactttcacagcaccgtggaagaatttgcaagtctcctttccaatataccacattcggcttaccacggccattttatatattaatctctgaaaagaaaatatacatacaaagtcaattaattaacaaatctatttttataaaaattttcatgcatttttctggtttacacagggttgccatccgtccttgaatggcaaggacgtccttgaaattgggccctctttcttgaaaataaaaaatgtccttggatgccaaggacgtccttgaaaatgaacatttagaaaagttttaaaaaaattcaaagaaatttgataatttttgtaattttcaacaatatttggattaaattatggcattatgtcaataaaatgcaaatttaattgcccaaaatctcaaaatttggtcattttttggacaaaatctactaacaaacagcattaaaaatacaaaattcttccggcgccgccggaccctcccctatcctcaaaattaaaaaaaaagcgcgccgtaaaaaaaccttttttgtcaacaaaaaaaagtcgtcgcatggcttaaatcgcaaaaattaggcagtttttggggaaatctgttaacaa

SEQ ID NO: 26885 - DNA, 1736 bp, Heterodera glycines
agaccgaatccttcgggaatagcttccctatagtctgtactttaattctgcgttggatttttgctccccataattgtttgagtaccccaaacggacacttgaaaaaatcgatttttttgttttcggggcagtacccccgaaccgatgcgcccagatttatggggagaccgaatccttcgggaatagcttccctatagcctgtactataattctgcgttggatttttgctccccataattgtttgagtaccccaaacgtacacttggaaaaatcgatttttttgttttcggggcagtccccccgaaccgatgcgcccagatttatggggagaccgaatccttccggaatagcttccctatagtctgtactttaattctgcgttggatttttgctccccataattgtttgagtaccccaaacggacacttgaaaaaatcgatttttttgttttcggggcagtccccccgaaccgatgcgcccagatttatggggagaccgaatccttcgggaatagcttccctatagtctgtactttaattctgcgttggatttttgctccccataattgtttgagtaccccaaacggacacttgaataaatcgatttttttgttttcggggcagtactcccgaaccgatgcgcccagatttatggggagaccgaatccttcgggaataggttccctatttaggcttatattttaaaaagtttcatcgaacctagcgcactaaaatcgataaaatctctccaaatgttgcaggccttctccattgtaaaggactaacttaacttgaaaaaatgccaacgcttgttgtttttaaaatttttcgaaattctgactttttcattttttatttattttttgcaaaattaattcataagtattttttcagaaagtgctctgaaacgttaattaaggctctctgatgctttttctatcaaaagggagatgaataaatattttaaaaatttttaattcctttttaaacaggccaaaaagtttaggcttatattttaaaaagtttcatcgaacctagcgcactaaaatcgatataatctctccaaattttgcaggccttctccattgtaaaggactaacttaacctgaaaaaatgccaacgcttgttgtatttaaaatttttcgaaattctgactttttcattaattatttattattttgcaaaattaattcataaatattttttagaacgtgctctgaaacgcaccaaatgttaattaaaagttaaataaggctctctgatgctttttctatcaaaagggagatgaataaaatttttaaaaatttttaattcctttttaaacaggccaaaaagtttaggcttatattttaaaaagtttcatcgaacctagcgcactaaaatcgatataatctctccaaattttgcaggccttctccattgtaaaggactaacttaacttgaaaaaatgccaacgcttgttgtttttaaaatttttcgaaattctgactttttcattaattatttattttttgcaaaattaattcttaaatattttttagaacgtgctctgaaacgcaccaaattttatttacatgttagtttaggcactctgatgctttttctatcaaaagggagatgaataaatattttaaaaatttttaattcctttttaaacaggcccaaaagtttaggcttatattttaaaagtttcatcgaacctagcgcactaaaatcgatataatctctccaaatttt

SEQ ID NO: 26886 - DNA, 924 bp, Heterodera glycines
cctttttcggggcgtcggtggaaagaaatttcccccccccccctcaaattcccatccatcggcgaaaggtcctccccccaccgacggatgcgcagagcgccccaccaattgcgcaacacaattttggcgagaggaaatttgtctgtcgtaacgacgggggggggggggggggaaagttgggggccgaccgacgaattaattcattggcattttatgtattactgtaagaacgcaaaaaagggaatacttttacaaaaaataaaacgaaatattcatgtggttaatatagtttttattttccaagtaaatttgtgggacaattcgaattacttggaaattccaatcaatttttttcttaataatttctcgagaaatttcaaaattctcgaatgtctcgtcgactcgagaatggtctctgtctttccgggatttcgttttttcgagtttttggcaaaataaattcggagtttccccctcagaaatgttcatttgtccctttcttttcctctttaggtgtccgttctgtccgcttcatttggccgccttttgcttctcagcgctttcgaagagggccttttgcgcgcgactcattttgaggaagtgccatcgacggcggaggagcagtgccaacggaacaccacaacaaaaagcagcggaggaaagggtgaaaaaatcagtggccagaaaatgcttacgattaattatgcggcgttagtcctacctccgtacttttatgcaaagccaacctttctcccaaaaaatgcaaatctgaaaatttagaaaaactctattttcccccacgccaaaacgccctctgttggggcattcactgggctaagtcaaccaaatacaacaaacttggaatcagcagcgggcattccgacaccggtcaaaataccaacagattttctttcgtaaatttcc

SEQ ID NO: 26887 - DNA, 925 bp, Heterodera glycines
  unsure (1)..(925): unsure at all n locations
ccactccacactttctatcaccagagtatcgccaatttccttttatttgtggtttttatgtgttttatttaatttttattttaatgtttattattatgattattatgttatttcttttaattttcatatagaaaaattatatagaattggtaattttatttttaaatttatgggctaaacttgggatatttattctctgatttgcataggcatttccattattgttttgttgaactatctttagtggacttttttatagttttgatatgattttattattaaaaaaatattttttttattcaaaaaaaaatattttttattttttatgagtcttatcattaataattcttttttattattattttatttgggttaaattcataaatttcatattgaatttttatataatcgcacaaatttatttaaaatttgattgatcagcgtttttacacggccgaagccgtagcttgccagttgagtctggcctggtgtacccaacacggtctgtcgttcatcccttcggccccaagctgctcaaaaccttctctccactccacactttctatcaccagagtatcgccaatttaataatattttggtttttatgtgttttatttaatttttattttaatgtttattattatgattattatgttatttcttttaattttcatatagaaaaattatatagaattggtaattttatttttaaatttatgggctaaacttgggatatttattctctgatttgcataggcatttccattattgttttgttgaactacctttagtggacttttttatagttttgatatgaatttattagttttttatatttaanatgaattttaaaaaaatattttttttattcaaaaaaatatttttttattttttatgagtcttatcattaataattcttttttat

SEQ ID NO: 26888 - DNA, 726 bp, Heterodera glycines
tttgattgccacatcacactaattcatcattattacgctaattagtcatcaattgcctcattatcacgctaattagtcagtaattgcctccattatcacaataatcaattttttgtgtttccctttgttgtcaccagttcgcatttttatttatgcaatgactgtttggccatgatatggccccattctttgtcatccatcgttttcgtcgttcgtcaacacttttctcgtcgtcgctgatctcttcccctaattgcaacccgcccctccttaattggtcaattgtgctcccttatttaatgaatcgcacaatcactctttctttcccccactaatgagccataatttgtcccccccccacccctctcccctcccgttcgctctttgctaattgatgtgaaaatgatcattgatgatacttttctcctcccgtctctttgctcccccccccaccccctaaaatattcgctcttttgccgctcttttgacgtttttggactttgccttcccctctattccttcccatctcccaccattttctccatacacagcaacaaaagagagaagcgtgagacaaagagagagtccccccgtctgagttcggccgattcagtcccacacgccccgttgagtcctcagactcagacccatcccctgtatgaattctgccgattcagtcccacaccctcgatgacttcctccccgtcgaatggagaaaacaacaaa

SEQ ID NO: 26889 - DNA, 1022 bp, Heterodera glycines
  unsure (1)..(1022): unsure at all n locations
atgcgtgacatgaatgaaactcgtgcctaaagaaattttattttattcattctttattagtaccttattgtaagtttgttctttttctgtaaaattaaaattaaaattatgttttgatttattttaaatttttattatttcacgttttttgtaggtgattgtatatttctaaattttaatggaatttttcggaaaaaaggccaaaaaaataaatttcttgcaagataaataatttatttaattgaaatttaataaatttttttgaacttgttattatgtcctaatatatgaaaattattgaaaattatatatttttattgtgtacaatattaactgatttattttttctctgaggcaatgtttatttaatatttttacaaaatgcattttcagtttttctctccgtttttctttataaatattttatacataataataattattgttgcgaattaaattatatttttatctttttttgttataaattgttatattaatttttgtaatttagtttttgaaataatttataaattatgatcattctaaggcttttctatatcttagtatgggtatttaatttttttattcgtaaaaacctaataattttccatttctgttttttttttcgtttccaatatttcaattttattgattttgactttgatttatttctttgattcaaatgtgtattttttaagtttatgctgtaaacttatattatattcatgaagttaacttttaaaggtgattttaatttttataattattatttaatctcaattattagattaattttattttttattattattttaaattttttaattttaattcttaactttcaactttatgtagtatctatctaataaaatactcaatcatatttatccaaaaattaaatcgtcctccgcttccatttaaggaattattggtggatgaatttttttaaatttaatttgttcattgttttctcacttttttcttttgaaatataanattatttttatttgaatattttttat

SEQ ID NO: 26890 - DNA, 1014 bp, Heterodera glycines
  unsure (1)..(1014): unsure at all n locations
ccgacgcactcaaaaatttncggaaatttttaagtaaacataatagaaaaaaataaatatattcattcacctctacaaatagtaaattgacaacaatacccaaaatttatcaaaatcaatggttggtaaatttaattaaaaaatttcgaaaattttctcctttaataaattgcgtaggcttttgagaataatccttcgctttcaacgctaaaatcctttcgagcaacaaaacacaacagagagaaagaagtaagtggccactttccttgttcttctttcaggtttcaaaagtgtcagcatttgtcaacgtatattggtccatttttactgtcacaaaagagaaagtcaacaacaatttcggtacttgtgcagaccataaaaaaataattttaaaccatataaacatttctagggggttctcgggatcgctgaccacgaatctaagctccgcttagaccgaaaattaaaattcgagaatttgaattttcgatttttttgttcgaattcgggtccggattgaaaataaaaggtgccgaagtgtttatgcacaattgtaatttttttgcccaataaaactgacagctttaagcgctgcgctcaaatttaacgctgtaaagtattttttggcgaatgtttttttattctccaattcccaacaaattgccgaaaatttccgtatcttaatcgaaaatttcggcaaaggtttttgcaagaaccttcattttgtctatgatttttcaccaataagcataaaaaaataaactgcagccaagcggactcgaacccacaccccatctcatataacccctagggattaataaataaatttcaaaaaatcatagaaaattaaatacttgacttctcaatagattcaatagctcattcaaaaatatttttaagctctacaacatctgtatatgagttttttacgcccattcattttcttaaaatttttggaaaaaaccaagtacttgataaaaagtcatagaacaaatncatgattttcaaaatctg

SEQ ID NO: 26891 - DNA, 669 bp, Heterodera glycines
cagaataaaattgtcaatcttttcggctttcacttcagtcccttttgtctgttttcgttagagtcttcatattttcatcaaatttggttttgtactccgaatctttatgcttttcacttttcagatgacaaattaatgatgatatgctcccgtcggaaagcttgaattggtattttggctgttttttggctttgcattcaacgcattctgccagtttgtcgttttccttgctcttctcaaacaacccaattttccaaatagggtgaaatggcgccattaattatgaattattaaaatcttaactaaattggaagaaagaatatcaaaaatattattcctcatgagaaagttgacaagcaaatattaatctgactatttaattttggctaaatgttttgccaaaaattcaaaaaattccaatttttaccagtgcatttttactcccgtttttgggtaaaaatttccgggagcgggagcgggatcgggagttcaaaattttccgggacgggagtcccgaacgggaatcccgtaaaaaatcccgttcaccgaaaaaagcgggagtcgggagcgggaatcccgtaaaatcccgcgggagtcccgatcccgccgggctctagttgatatcattcgaaagcttaacaaaaatttgaagttttttcttaatacatt

SEQ ID NO: 26892 - DNA, 841 bp, Heterodera glycines
cattttccccagttttgaccattctcaactcggcctcaaattggcacttctttcgccacgttttatactttcgaatgataccaaaaagatagggtttgttagaacatgaacaaagttattgtataaaaacccgggattgtcaattgattggactcataaaagtcgattggactcataaactgcactagagccaaaatccgttccctaatcatgacacataaacaaaaagatacaaaaacattcatcaatcccttttcatgtctataaaaatgtttgttttttcgctttgtctcgcatttgaaaaaaataaaaatttctaacgcaattaattattctgctctttgttgtgtgacatcattcggaactcggccaaaattgtgctaattgccacaaaaatgaaccgacggtaattaaattaaaagtcacaaattcgtcgtttatttaactaaactgttttcccatttcagttggatttgcaacgacgtttggatggacattttcccctcttttgaccgtcctcaactcggcctcaaattggcacttctttcgcacgttttaattcgctggtggacaaacatttcgatggcaaaagcgaattgacaatttggagaccaatcgaaattagcaaggacaaaggacctgaaccgaaactatctgtgcggatggatgacaaatttgtggaatttccattgcccgaccgtccgttgcccagcaaaatccgttttaagcgccttcagattgagtaattcggaatcagagatttatggcaataaaagcattcatcccatttttagggacattgatcactccgtcatcgcttttcttcgttcaaatcaacaaa

SEQ ID NO: 26893 - DNA, 1796 bp, Heterodera glycines
gcaatcattgccgttgaaatttcttgaaaatttatataagttcattaacagaatatcaaaaaaccaagtttgaagtttaaagaagattttaaaaagataaaataagttgaattattaaaattatactttgtaatagaaatataattagactccgatggagccgttaggcgcctatggaaattttttaaatttatataatccattaatagttttaacaaaattccagttttgctgtttaacttagtttaaaaaagataaaatacttcgagaattattatttattacatagcaaaaaacataaataaagtgattaaacgactaaaatgtcgaaaaaaagttataataaaattaattaattaattaaaagtcagattaatggaataaggctcaaggtcgtggaaaacatttaacttaacggcgattctaaaatgagtattagtcaaattattctggattattattaaccaagataataatttaaatgtactcaataagaaagtatttacaaagtgacatgtgtagcaactaatattacaaattaactgaatttataaaaattaattaaaattctttatttttgtatgtaaaaattattaagtgacattgaaaataaaatattattatataattgattaatgaatgacttgattatgatctggatgataataaaaataacactctcagggcaattatttaaatgatataacaaaaagaaacaataataagcaatcaaaaatgagaaagaatttttccgacgacgataattttaaattaaaattttgctacaataaaaaacaaaattaattttggtttcaaaaaatttaggctgcaaattcaaaaattgagagggccttggctaaagcgggacaatttaaatgaaacattaaaaaacccctttaataattaaaaaataaatgaaaaaattttttcatgctgccgatgaacaagttgaaatgatcaaccaccactcgttttccatttgcaattgattgcatctacaattttaatcatccgataaatttctctagtatcactttaaaaaaaattaaaaaatcagctaattctcttaatataaaaattaatttagctcttataaataaattattattacatgcgaaataagtattttattgtaagatgaaaacaaatcaaaataaataaaaactgatgtgtttgtttgataggtataatcatggcagcgaacagagagagcttcaagcaaattattaaagtaaataaaaaactattttttaaagaaatataaagaaattatttattatcaatatgattaatcggataaaatcaataactacataaaatatgctataaatatttaataactaagcaaaaaggaagaaaatattcagcaaaagaaaggtgcaaaattaattcaaaaatagcgaaaccattgggcacaaataaaacataatttataaatggattaaagaattgggccttaatcaaagaataaacaaatgttacaaatcaaaaactgattaccaaaaaattgaaaatgagcaaaaatttattgaattaaaaaagaatataaactaaaaagaaaacattcgagcaaaaaatagaagaaaatttattatttttttttcaaatttatatttgcattaaattttcattgtgcaaaaaaagcaagtattaaaaagcagaaagtcctgtattaaacaatttaattgaggaaaattataatttaaataaaaaattgtaatattttttttaattgctattattgtttactttaagatttacactttccaaagataaaaaaacaataataattgata

SEQ ID NO: 26894 - DNA, 1027 bp, Heterodera glycines
gaaaaattaaaaaaaaagtttttgtggcattgtcgcgagattacattataaaattggtaaaatatttaaaataatgacaaaattttagcaaccaaattatctgtatttcatgcacccataaaattgcctaacaagttcttattattcatattttaattttcacctctgcagattgttcacttgttcgtttacgtccgaggaagtcgcaaattcccaatctcgcttaaatttctgaaggttttaaattcgaaattgctattattataatgtaattcaataaaaaaaatttgtgtattttttaaaataaatttacaaatttgaaaaaaaaattttaaatttatttttaacaaaactcaccgatacacttgtgctgggttcatcgtccccatttggaccaatttgcgcaccagctaaaaatttataattaagaatattcattttgtcttttaccttttctgttttattccatacagatcgaaggccgcacttaacatttttaaaggtcttttttatcaaacgtctgacttcttttctgtcgtcaagaccttaaatataacatggttggagcccaattcatttccaaagagcttgtaaaatagttgtcaaaaaattaaataagtgatttttcaaattgcctcattatttatctatttcagttgaacaattttaaataaaaaacatcaaagcataagagttgaattatcacaataatggcaccctttattcaagcgtctcttcgtcattcataggcgtctcagtcgccagtgattctctccccctccgtacggggaagcgcctcccgccgcatacgaaccgccgtacgggggagcgcctcccgccgcattcggaccaccgtacgggggaacgcctcccgcattcggaccaccgtacgggggaacacctcccgcattcggacccccgtacgggggaacgcctcccgcattcggacccccgtacgggggaacgcctcccgcattcggaccaccgtgcgggagtacgcctcccgcattcggacccccgtacgggg

SEQ ID NO: 26895 - DNA, 1112 bp, Heterodera glycines
  unsure (1)..(1112): unsure at all n locations
aataaataattaatgaaaaagtcagaatttccgaaaaaattttaaaaacaccaagcggttggcattttttcaggttaagttagtccttacaaatggagaaggcctgcaaaattttgagagattaaatcgattntagtgcgctaggttcgatgaaactttttaaaatataagcctaaactttttggcttatttaaaaagcaattaaaatttttaaaaattttattcatctcccttttgatagaaaaagcttcagagagccttatttaacttttaattaacatttggtgcgtttcagagcacgttctaaaaaatatttatgaattaattttgcaaaataataaataattaatgaaaaagtcagaatttcgaaaaattttaaaaacaacaagcgttggcattttttcaggttaagttagtcctttacaatggagaaggcctgcaacatttggagagattttatcgattttagtgcgctaggttcgatgaaactttttaaaatataagcctaaactttttggcttatttaaaaagcaattaaaatttttaaaaattttattcatctcccttttgatagaaaaagcttcagagagccttatttaacttttaattaacatttggtgcgtttcagagcacgttctaaaaaatatttatgaattaattttgcaaaataataaataattaatgaaaaagtcagaatttcgaaaaattttaaaaacaacaagcgttggcattttttcaggttaagttagtcctttacaatggagaaggctgcaaaatttggagagattttatcgattttagtgcgctaggttcgatgaaactttttaaaatataagcctaaactttttggcttatttaaaaagcaattaaaatttttaaaaattttattcatctcccttttgatacaaaaagcttcagagagccttatttaacttttaattaacatttggtgcgtttcagagcacgttctaaaaaatatttatgaattaattttgcaaaataataaataattaatgaaaaagtcagaatttcgaaaaattttttaaaaacaacaagcgttggcattttttcaggttaagttagtcctttacaatggagaaaggcctgcacat

SEQ ID NO: 26896 - DNA, 933 bp, Heterodera glycines
ttcaacactttgggcaaataactaaaggaacgaggaaactcgtaggaggattattcaaaatggacaaagggaacgcacctgaactgcttgttcttgtccgaagacattgtctgttcaaggaatgaaactaggaaaagaaatgcatttgcacgaaacaaaaggaaaatggacagaaaaaatggcaattggaaaccaaatttaaatttcaaaaacagcgaaaaatggaatactctttatgatcaccaacatcatcaacaacagtaactacaaaacaacaaaaaacatatgaaaagtgaataaatatgcaaaaaaaggaaaagaacccgtcagaaaggaaaagtgccaatgaaaaggaagagaaatgaaaataaatatcaaagaatgccgtttcgacaatagaaaaaacaaaagcgaatcaatttgtttttggcagttttatcagttcggtaaacgaagtgaaaattctggagaaaaaagtgaccaaaaaggaggaagtggcgaaaatgccaccgaccaatgagcaaatgcgcagcatcaattggagaaaggacctaaaagaatggcaaactgtgaaatgagcaaaaaatgggttggttgtcacatggaaacggggtgcacttcgatcactgtggccgcaaattcgtagtcaaacacaatggaatcgtgcacgtggtcttccccttgggcctcttttttctgaaagaattaattcgctaatttttattttattttcccatattttacgatatatgtgacggcgtattggtaagtggtcaaatatttgctgcgtccaaacgaaggcaaaaagccacctttgtaaatccgagtaggaacaaccttcacgaaatacttgaacgtcgtcccggctaaactgatgaaatgattaatgaaatcgcattattttaaatttgcgctacgtttcgtcgcgaattg

SEQ ID NO: 26897 - DNA, 1727 bp, Heterodera glycines
aaaaatttaataattttgggggggaaaatttttttatttcaaagtttaaagaaagaactggagaaaaaattcagaattttgattcaatcattccattattttttatttttgaaatcttaaaaaagtattttagaaatgaatacaacaatctggaaaataggtttattgaaaagtcaaaggatggcaaaatggcggaatgccgaagatgtaaagaaaatgaaaggcccaagtatgaatttaccctctctgactctcccggtagggcaaccgggaaccgggaaaaacaagcactggtaagaatggggtctgagtgaaaaattagtgaagaaaattggagtcaaagggaaaaataaaaaataataattaatatattctttaaaagtaacactgcccaattgtgcaaatggcctacgggctagtctccttgactttcccttcttctttcccctggttcaatccctctacagaaattagattattttcaattttttttttgtatactcgtgggtttcctataaagaaaatatgattcctcatagtttttttttaaattgatacatattttatcattttttaatttttctattttttatttaaagggctacccgtatttcgatttatttaagaattaaaatagatttataattttttatttgttgttgttaaggctatttgggtagttcgcctagaaaatagaggcatcacttttttgtcacacctatttttcacgcattttatgaaaattcataaaccttagccaggtgaggggaagaattccccccttcccccgcccgaaatgaaaaattaaaaatttttacaggaaaaattgggacttttaaattttttttgtcgatttttcttaataaaataattaaaatttcaaaaaaaaacccggcggcacctatcggcaccgccggaccacgatttactcgattttaccttatttttttaaattttgactacaaaatggcaaaaagtagtctttttttggctaaaaatggttacaattcctgtttttgctgtccggcgctgaacttttttaaaaaacactaaataaattttaccaaaaaaaattcttcggactcccccccccccttgaagtgcttgtaaaataaagcccccgtgggttttattagaggctaactacgataattatattggaaatagatgtgcaattaattttgtgttcaaaatatctttcttcgaattcaatgcattttttcttgttccattttttcaaaatttcttggtgcaacggaaattttttttatttttttattaaaattgatgaacagatttttgacaaaaattaccatttttaaattaattttgaattacctagttttgtcagattttatgtgctgctcggctgtatgacatttgcggcctgtgctcgaaatcggacatttgcggctaacggaacgccaaattatcacttttttaattagggttggttgggcccccgacgtcggggttggaaaattcggggttgtcggggttgattatactacaatatgtaaaaccagtaatcaagtaattatggttttctttaatttgaataaatcaattaggtaggtattaacaaaaatttagttttatttaatttgaggaatgattcataaataattttcctctctatataaaaatattataagattttacattcttatttttattgctttttataaaatagtatatatggcattaacataaatgttaaatattta

SEQ ID NO: 26898 - DNA, 833 bp, Heterodera glycines
atcgggaccgcaattctgcacctttgcccatcttttttaatgctgctattattttttgcttaagtttctaaatgttaaataaatacgtttcggtaattttgaatatttgttcgtactggatttgattcgcgattgaccaaagaaaatcagattcgtgaacaacgacaccgaaaccccctaccccttcaacgatggtataaaattctcagatttatacaactaaaagcatcgggactccttagcaagaaaatatttttcagtgcgcctgtagtttaagcaggaaaaaaacttacaggaggtagaggttgctgggcgggttgctccattgcacaactgaaaaattagcatataaatgagagtaaaactaaagaaactgtaaagcatttttgtttccaaatggataaatgatgactgatagtttttagccagaacatacgaaaatagtcaaaatctcggggactgtcactgttttttgaacccgtgcagaaactgaacttggccaagaaatgtttcccgaaccccagtcccgtcccgtcaaccccaactttataccttgtcgcagggttcgaacagaacgccaatcagtgtccgccggcaaacacccgctttgtttggcaatcacttgggcagcgattcggcactcgacaaccctttaggaacaaagtgccgatcattgtttttccgatcatgaacttatgtgtttgatcaaagttttcttacccataacccattgatcatacaattttcttaaatttaatttgttttgccattgttttctgatcgttttcctcatcagtggctcctttagtcataaatttgtctgatcatctctc

SEQ ID NO: 26899 - DNA, 1414 bp, Heterodera glycines
  unsure (1)..(1414): unsure at all n locations
agaattgtttttgtatggggtgcagctatttgatggacaaaaaatagcnagagaagtcatacacacgcgtgcactatttcatttccctctcgctgtctctacttaacaaattctctcatgttggcacgctattttttcatctcctatttttttttactgcacttctttctctttctttcgtacacaagttgtgggtttgaatttaaatttctgatcagtttgattattagaacaaaaatgactgatcagctcattcatacacatttaaatccggattattctgaatttattgaacacagctcatttctgatcattttagttcgtcaattccttgatcagtcattttctgatcagatcaggtcccatcttctgatcagtttgaatcacaaataaacatccatttttctttttgtttgtttcgagttttcagcttatctgtgctgccaagcctttctttctgtgtcagactttttacactacaactttccctcccttttctgtgctatttgattccgatcagttcagatcactcactgcccattcattcctttttttgtatttttctctgttgtttgtttgttgttttttttaccacgatcgcgccaacacatcatcatcaattcaattcaattgaataatgttcgtctttcatttcattttcaatttcaattttaatttttttaattttaatttactatttactattttacattttaatttttatttttatttttattgttgtgccaattgggccgaatttgtgcaattgtcgtttcgatctgattactccatttcattttttaatttatttattttcaccacgattgtctgccagttatcgtatgcctgcctataagatatcatttttattacaatttactatcatggaccatccaaaatatatattataaagtagattaaaatgaccgatcagcggcgctgaaatggtcacgatcgaccggcctcagttggctcttatcaaccgcgctgaattgtccatgatttttccattcattcattttttaatttatttgtctgtttttctctgactctcttactgcccgccaggagcggtgcttgtctttcactgttttctttttcatttttttgtgtcgatacctaccgtaattcgtttaccgtacttgtataatacagtgtccgaatcggtttttatttaattttatggtaaaatgtaaaaaatatttcattccagacctccgcaagagatttttcaattaatatttatttaaattattttttttccacattaattttcgtttgccatttaattttttgcaataataaaattttgtactgttttgcgagttatttgtgataattatttattaatcataagagccaattaaataaaatattatttataagaaataactttaattttacgaaatttata

SEQ ID NO: 26900 - DNA, 1800 bp, Heterodera glycines
  unsure (1)..(1800): unsure at all n locations
tgattcgcgccactaagcatcgaccaattttgagtttcaaaaaatgacactaattagacnaatttaaaacaaaagtgcaaactttaatgaccataagtgatgagcattttcnaaggctttcaactttaagcgggcggacaaancgtcgggcaaatgaacaacagccagaaagggaaaangggttttgtgctgacaattagtaaatggggcatttttgcagtntaatggacttggtgaaaatccacagggtgacgtttttaaattatttttttaaaataaaagcaccccacctatcgtttttcatggtccacttaactgcaaaagctcagtctcaaagaaacctgttcatcagagcataatctgtgtagtcattggaaagcgaatccaaatcgatgccagcggagttaactgtgggaggcttcggttgaacttctgaatgtggaaaatcgattctcaccaatatttaccaagtgaataaccgtgattaataggttcgtcaacaccaattggatcatttatattccctaagtcgaaatcagcagacattggctcttcgataaactcatcctcatcttcctgctccatcccctccataaattcgtggtcatccattaataaaatcgggcaaatcttttgctttaataataaatataaattaaagatcatttaaaaatttatgaaacgttccaattatgagacaggatactatttgatctagagaccggaattttgaaatgaaggggactttgaaaatggatcgggatggaacccgggacgaggctcccgtttttccgggaatcccggtttcagccaatttttaagaaagtttttggtctggcggtatctataaatgtctgacggtgaaaaaatgtaaatttttgcaatattttttaatataggtacctactttaccaaaattgtccatttttgcaaattttagtggaattttgagggccagtggtgcaaagattattgacgatgccatcgagaatttgtggatttatgaattaagaaaaatgagtgcaattttcaaaatttgcttttttataaaaaaaaattgttattttttatttcagtgaatttcattaattatcgtaaaattcaagactgcactaattataatttgcagtgcattgttgcgattttttcattgggcaatggtaaagaatttggtccctaatgaaaataaattaaagcgttaaattttatcaagatttaaaatttgaccagttttaacttatattttgaaaaaaaaatttccaactttttgttcgaattcgggtccggggttcggaattgggcaaatccaagttcaaatgcgtaatcaacaccctcgaaaaccccgggaaactgatcttgagccgaaaataaaaaagttaaattagggaccacaattctttagcattgccaaaaatttttccaatggtagggaaattttggactaggctatacaaaaaaaaattttaagtcgttttgggcgtaccgcatttccaattttaaagaaaaaaattacgttgccatgaaggttggtgtgccgaacattgtgcgcagttggccatagcgtttggacaggccgaagtcggtgattttctaggattttttttgtcaattttttgaattttggaccctgtggtgtcgagagaactcccacactaatgattattttggttttctcttttctttaaagaaacaaacggaaaagcatttaaataaaaaaattcagcaatttttttggaaaaatagtaaatcaaaaaatgtcaaaaaaattttcaattggaaagtaccattttttgtaatact

SEQ ID NO: 26901 - DNA, 738 bp, Heterodera glycines
  unsure (1)..(738): unsure at all n locations
ctacccgacatttgaggatttgacatttgaggacccgacatttgaggatttgacatttgaggacccgacatttgaggatcccgacatttgaggatcccgatatttgaggacacgacttttgaggacccgacatttgattccgggctctgttatatagccaaatcttgtctgtatattttttccgttctcgaattcttatcccctgagttgggttttcaagtttttttgtgcatatttgatgcatatttcacgattttatttgcatatttatgcgcatattttggccatttttcgtgcatattttttgcagccctgtaaataacacattttccacttggtttgaggcttttacgttgacttttattatgcctttttttgcctttttctttggcattttgccgttttggtgcctttttggcgtttttttccgtttttggtgacttcttttggcgtttttccggaaaattcatttaaaaatggaataaaatcaagaaaacacacccctaagaaattatttgaaaaattttcagaaaatacatccttaagaattgaaaaacctttcagaaaatgcacccctatgaatcaaaaattttctcaaaaattgattggcaaaattcattttttcttgataaaaaattttagccttaaaaattttccttaatcgaaaaacattataaagtatttcataatcatttaaaagaccaanaatatatttctggttaatttttacttgttttg

SEQ ID NO: 26902 - DNA, 888 bp, Heterodera glycines
ttaagctttttaacattaatgaatttgatcctaacattttttcatttttattcaatattttggcatgtattaaaattgggaaaatccggtgtctttatgcacaaaaatcccagaaaattctcaataattatttctctcatagagaataaaatgggaaaaaatattattaggaccaaaattattaatgtttaaaaggcttaaaaacttttttggatatgaaaaaaacaaaaataattattgcagggtgcggaattgaacttcagaagaaaaaataaaatggaaggcatagaccactaggcaaagcattctttgtaaatgatattgataagtcaaaaaggaaaagcttcatatctcggccagaagcttcatttagcaaaaaaaaaaaaattttataatacaaaagggaggtaatctacccaccctgtaagtttcattcggaagtcccacagtcacttgggtacctctcctttgttagggactcaaaaactaagttttttttttggtcataattttgtagaaacttaataaaactttttgatattgtgccaagatagtaaaaatatttagggctacaaaaaaagatttgcaaattttttgaatgtatcatttgatagagtaaagtggaaaattcaaaataaaaatatactaattaattcattgctttttataggaaccaactacacaggtaaatttatgaacaatatcggtcgaacgaagtttattataataatcttttggaaaaatccaaaaaatcccattaatcctatacaaaaataataataatattaaaataataataaaataacaatacttatatcttttatactaatccctgaaagttaaaattatcaaaaaaaaataatatttttatataaaatatgcgaattg

SEQ ID NO: 26903 - DNA, 824 bp, Heterodera glycines
ttttaattagcgaaaatggcatttagaaagaaaacaagcaaaaaaaagggcaaaaaaagttaccaaatagaaattgagacaaattaatgaaataaaaattttaatttgcaaaaaatggggtttttcaaaaaatacaaaaatagttaaatttatataaaaaaatgatttaaaaaatcaattaaaaaaaaaagattaggaattattaagaaaaaaattataaaaaatgaattgaagtaaaaatatcttaaaaataaatgccaaattaagggactgaaaaatattaaaaaattcaattttcactattggaatctgagataataagcaacaaaattaattttataaagtttcaaaagcttacgtaaatttggcattaaaattaatgttttttatattctaagcatttattgcaatgaataaaaaatttgaattttccgaaaactctcaaccaaagaaaattggacgaagcttatgtgtgtaatatgatccaataataagcccagctgggaggagaccaatccagcaggttctttcgttcattttttcttttttttcagcccattaccatcattacgcggcccattcattcattcgctggtgaaaggaatttttattattatttgccgtgccgtccttttctgtgtctcgatgcccgttctcgcctgcccaggaacacacaatttgggtggcactggtggcggcagtatcaaattgtccaaaaaatatttgtgccaaattatccacggcaccgttgcgtggggggggggggaagtgccaattgttcaatgccaaattatgagcacacaaacatttttttttgaggggtg

SEQ ID NO: 26904 - DNA, 1888 bp, Heterodera glycines
  unsure (1)..(1888): unsure at all n locations
tcataactagggacgggatttctaagtttttgcttattttttctgcggctttaactcgacgagaaatgcacgaaaaacacattttttgttcgaaaattttgtgttttaacgcacttattcgaacttagaaatgcttattttggcgtttcgtgcttaaaaatgcttattntagaggttcgcccttaaaataagtttttgtacttattttagcgttttatgcttattttcgttcttatttcgcgatttttgggaacaaaaatgcaataaaaatgataaatacacccctaagaatcggccaaaaaaatttcggaaaaatacacccctgagaatcgacccttaaatcctgaaaatttctaaatgtacttcatttctaactgcaatcagtaaataaaattgtttgacttaattttaactaatttacatagagcaaacagcaattttaacaaatttcgcctctacatttggaattttttcatgcttattttcgcacttatttcgcgcttttttcgcccttatttaagcacttattttggactttttcgcgcttaaaaatccgttccctaattaagacaaattgagaaaaataatttttaaaatcaaaaattctcgtaaataggtaaaaatctaaaaatgtaagccctatttattattacgttggtcagttttcaaatttcaaaaaacaaatgcgcgtctaacatttgcaaatgaaagttggataaaaataatccgtcaaattgattttttattgattgatttgggggtaggggctaaaacgcccggcaaatgtcatcattttgcaaaatatattctcctctgttgcgttccttccattccaaagcactgccattccctttttctgctcgctttttgtcaatgatttttcgtctcccattggcatattgtccaacccctcgggcccatttgcaacaatttagggcaaacaaaattcaaaagttgttttgataaaatgtgattttcgttagaatttttggttttccgcttttctcattatataaaaataaagtttccaacgcaattaattcttctgctatttgtgtgacatcattcggaactcgtccaaattgtgctaattgctgccaaaaatgaaccgacggtaaaagaattttaaaagtctaaattcagcattatttagctaaactgttttcccatttcagttggatttgcaacgacgtttggatggacattttcccatcctttgaccgtcctcaacttggcctcaaattggcacttctttcgccacgtttcaatgcgttggtggacaaacatttcaatggcaaaagcgaattgacaatttggagatcaatcgaaattcgtcgcaaggacaaaggaccagaaccgaaactatctgtgtggttggatgacaaatttgtgccatttccattgcccgaccgtccgttgcccagcaaaatccgttttaagaatcttcagattgagtaattcggaatcagagatttatggcaataaaagcattcatcccatttttaggtacattgatcactccgtcatcgcttttcttcgttcaaatcaccaaattttcgacaaaagaggcaccaatttacatttgtggattccatcatcacactctacgaatggccagccgattttggacattttttgtcgtgaaatttggcccattttttcgacaaacattcgctgtttgggctttaccaatggtgttgatttggacaatttgcgtcgtctcatttcaccgacaattctcaccgatctcaaccaattgaattcaatcaattccggtgatttgtcgcccgctgcgtttggtggtgattttgatgggccaaatgcaacaatttctgctggccaagcattgtcaaaatggttgcactctccgagaaacgatgacaaccca

SEQ ID NO: 26905 - DNA, 823 bp, Heterodera glycines
aaaaaaaaaaaaattgtttttttccggtggccgtttgggggcctcaaccaattatggggagcaaaaatccaacccagaattaaagtcaggctattaggaaagttctcccgaaggattggtttccccataaatctgggcgcatcgttcgggggggctgccccaaaacaaaaaaatcggttttttcaagtgtccgtttggggtactcaaacaattatggggaccaaaaatccaacgcagaattaaagtacaggctatagggaagctactcccgaaggattcggtctccccataaatctgggcgcatcggtttggggggactgccccgaaaacaaaaaaaatcgattttttcaagtgtccgtttggggtactcaaccaattatggggagcaaaaatccaacgcagaattaaagtacaggctataggaaagctactcccgaaggattcggtctccccataaatctgggcgcatcggttcggggggactgccccgaaaacaaaaaaatcgattttttcaagtgtccgtttggggtactcaaacaattatggggagcaaaaatccaacgcagaattaaagtacaggctatagggaagctactcccgaaggattcggtctccccataaatctgggcgcatcggttcggggggactgccccgaaaacaaaaaaatcgattttttcaagtgtccgtttggggtactcaaacaattatggggagcaaaaatccaacgcagatttaaagtacaggctatagggaagctactcccgaaggattcggtctccccataaatctgggcgcgtcggttcggggggactgccccgaaaac

SEQ ID NO: 26906 - DNA, 1033 bp, Heterodera glycines
aattccgaccccaaaaatgtcggaaatcggaattccgtgccatccctgacggacatcatcggtcgggaatgggcggtagcggtataataaacggaaaattaagtgcaaaataaaatgaaatgtgaaattgaaattcctatggcttcggcaagaaaaatggcgttttttagaccattcttacaatgttattgtaaatgttgttggcattcgaacgaaactttattaagcaaattagtttctcattttaaacactcatacaacctgagaaaatgtggcgttttttaaatcagttaaaaaggaaataaattaattaattaattgggcaatgccgtctttttcactcagtcagtccttctctgttcgtcacaattgacttgagtccaacctttagctgctccattttcccctctatttcttccgcttccatcgctttgtacggtttttctgcgcttccatcggctgacacttttgcgtaattatacctcaaatagtcacgctttattctgtagtcgaaaaggttcaaagcatagttcaaatcgtttgcattttcgttcctcaaatttatgccaattaaccacacgttgcaataagttgcgctggaaaataatttgcaaaaaaaagtgaactataataagaaaactcaatgcttttcctaatgatttgttttggatgttaaggcatattttgggcattcccaaaattaatggtcgtcattggccatgggatttccagggtcatattttttcaaaatttgcttaatctctagcataagaaaagtcgatggatgtttgagattttagtgttataactagggctataaattatatgcactaaaaattctccaaatatgctttaaaaaccggaaaaatgcccaaatatgcactaaaatatgccttaaaaatgacccaaaatggcttttaaccctcaaaacaaaaaagccaaaattgtgtaaaaatacagaattggctttaaaaaatggctaaggagcgtttatagataagtgcaaaaaattttgatttctaaatttatatat

SEQ ID NO: 26907 - DNA, 158 bp, Heterodera glycines
cccctcccctatttccactcacccctcttccccactgctcccaccctttgcccctcccgttcccccgctccccgctccccctcccctatttccactcacccctcttccccactgctcccaccctttgcccctcccgttcccccgctcccccgatcccc

SEQ ID NO: 26908 - DNA, 713 bp, Heterodera glycines
ccataaaaaaatggaagtttttccggtgccaaatttttgtgaattttctttcgtcccgtcataaacggattgtttggggcaatatgaatacaaattttgtgttattcgaatgcgctagccgatctatacattttcttatgtatcagcccatagtgtctctccccgggtggggggaggggggaattgaaatggaaatggttctgctggtgattcccaccgccccgcctccccaccccgtcccctcccaccatcttcctatgtccatatgtcctctgatgatgagatctaaatcattttatggccaactacgatcgacgatatggaagtggcgcttagtagggcatcagacttaggcaacaatgagtacagagatccctcaaaaaattttcagaaatccttttttgtttatttttaggttggggccaaaggtggacccaaacgaccgggccctttagtaagcttatagaaaatgtcaattcatcggaaaaatccttttttatagccaaactcatatttggacggcacacaccgtctttcatgtcattcttatcgaaaattaataaattaaagcttttttagaaagattcacaattattaaaaattagcgagtgagagagagaaaatggatgtgccaaacgttggagacgaacacgaggacttcgaagacgatgcggtgagatatatcgtatggaaaaagaaagaggggggggggg

SEQ ID NO: 26909 - DNA, 1262 bp, Heterodera glycines
tggagcatacgtcagcttttttgaagcaattcggcaccgagttgggaataattggttcccaattcgcatcatgagtgattttgaatttgcggcaataaacgctgccggaaatgtcttcccaaattcggtcaaaagtggttgcctatttcactttgggcaggcgttatttcgtcgcatccaacgtcttcctaatttgtacacaatctacctacaagacagaaatttccaattgtcaattcgatcattggaggtagaaattggggggggggatttttcggttttagaccccacccccagaaaattttaaaataaaaaaataatttttatttttttttaaatcaaggcattggcatttgtgccagatcactatgtgtacaattatttttgtgcattgatgtcaaagtcttttggaaaaagcgcgccgaaaaaaagtgattgagaagcaaatctgaatttctaatagtcatttagcccaaaatgattaattgtttgaaatgattgaagaaaatttgtttgaaaattttcattaatttaatttagctctaacttttggattttattaaataaaaaatcaaaatttaattttgtattattttcaattgaaataaattaaaattaattttttttttaattttttaaattttttgaatttttaaaatttcccggttggtcccggttcccggtcccgaagaaaaatcgaggtcccggtcccggcttctcaggtcccggcaagtcccggtcccggttttgctcaaaattcccggtcccgcttcattctagtttaaattatgaattggttaatgaaagtttgagaatgtcacacctaatcaactgacaattagcataagtttgatcaaatggaacaaaattcacaataacaaaaatgaacttaaaccatatgacctttcttttgaaaaaattgtaaccacaaatttcaacggagtaaatctgtgtaaataaattaaataatttttttgaaccattggcaaatagagccgatgttcagttggaataaatgcgttaatttacgtcatttccaccggagcaaaagcccatataaatggctaaacaaattcgaaacatttaaaatatttttaaaatttggcccacaaaaatggtaaaatcccttctgtttgtgctcccgttgctttttgtgcttacggatgctttttggatgatgccattcggtggcggtggtggtcgtggtggtggcggcaacggctgcggcaaacgccaccacaaaatgccagaatcgtcctcct

SEQ ID NO: 26910 - DNA, 891 bp, Heterodera glycines
tttctatatcatatgtttccatatttcgcgatttatctctatagtttatgtccatattttggcatttttccaaaaaccccctattagaacggcccccatcagctaaattggccgttttgaccccaaagaccggaaaattttccgaaacacattttttacaaaattttgtcaaaaaaaattgattaactttaaattttcttaaaaattggttaatttatgtgaaagataagcaaaaaatggaaaatttcggttttttggtcgggttttttttgaaaatttacccctcaatttagaaaaatttatgtccatactttttgccattttatgtccatattttgagatttttaccattttatgtccatatttcgcgatttttagtccatattttatggccatatttcgcgattttatatccatatttttaccatcctagttataacatcatacctgagcattcggtggcagatatcggtaaatgtcatatatctgttctttgaaccccttggtgagcatttcatcggcttcatccaaaacgagcattctaatcgaacgggtacgcaaattgcgacggcgtatcatatctaacagtgagaaattgaataattaattcattataaatcattgtctatcaccgaaaacacgtccaggagtaccagctacgatgtgctgtccataatccaattttcggatgtcctcgccgacatttgtaccaccgatgcaggcgtggcattgcacattcatataatcaccgagtgccaaaataacctgaatcacttgttcaaaacaagtaagaaacaataagaaagaccttctgaatttgaactgccaattcgcgagttggtccgagtatcaatgcctgagtttcacgtgttttgatatcaatgctttgaa

SEQ ID NO: 26911 - DNA, 910 bp, Heterodera glycines
cgcttcactgaagacgccgaggtcgaggaggcggtggggcagtacctgacctcaaagatcggcacagattttttccgtcgcggcattaggaaacttccttctcgttggagaaaggttgttagggtccagggaaactattttgttgagtgatattgtatttacagttgttatgagtagggttgtaaattatatggattaacatattttttctgcgcatatgctatgaagaaaggggcttaaaaatagcatttctgcgttaaaattttttgatttggtgaaggtttttagtccatataaatccatattttgggggttttcgggaataaatccatatttcgccatttttgggtttttagtccatattttggccattttttggaaattttcacaagaaaaatgaaaaaaaaaacgaaaaatacacccctaaagatcaactttttggaaatttttaaaaattacaccccacaaaacacgaaaaatttgagttttcgtcgtcattttggcattttcaataaatattttcgtcatttttttgcgaacatttctttttttttaatgagaattttttcgaaatttggcaaacttggaggtgtttttgatacaacgaacaacaataaaaaatatgcatttttaagttttaaaccccattttttggttgtttattgtactttttaggtttatttaagcaaatattaaatatgcacaccttttttgggatttttgggggtttacaacatatattttggcattttttatccatattttggtccatatttggccatttttggcctttttagtccatatttcgggcttttttagtccatatttcgcgttttttagtccatataatttacaaccctagttatgattgttatttttgatattttatttataatttttttttctaaaa

SEQ ID NO: 26912 - DNA, 998 bp, Heterodera glycines
  unsure (1)..(998): unsure at all n locations
atataccaacaataanttagatttggttgacaaagaaaaaagttttagtccaaaaactgagctggcgccgaaacggtcggcgccgaaacgcagtggacccgggaaaatcccctacccctcgcgaaaaaaaaattaaaaaattttccaccgcacgccaattttaccaatagtttttgaaactttgcccacaaaatacaaaaaaatattcatttttttttgtcgaaaaacggcttcaaattcctgccttttctccccggcactgaaaattttgaaaaataacatcgtagaattcggatcatccctcctaaattcgtgatcaacgaccccaaacattgaaaatgtgccaagaaaaagcagcaacaattttcgtacttgaatgatggctgccaaataggacggaagtgaccaaccctcgggcagtcggccggtgtacagtgacaattccacccaaattgcgttgatggtcagccaagtgctaaattgcggaaacacaaattttttgcggcatttttcagtgtcgtaataatttaattttggggctattcaaaaaaattttttgaaaaaattgaacattggcaaaagttggtgcaaaatttacggcaatggtatcataaaagaaagtaataaaaatgttatggccgggggatggtacgttgattggacgcgtaaaagtcatttgaaccaaactaaaccaccttgaaccgaacatgcagacgcagaaataatttttgatgccagccattccttaatttaatgataaaaaatgccaattatgtaaaaaacaaacaaaaaatgcacttaaaattgaggaatttccaaaaattttatttataaatttggtgccatcaatttttttttgttgcgcttttattcgaattttaatcatttgagaagaattggagtgccgaaaaaaatgggacacaatttgctttttctgatttttggagtagcgaccaaatttacgctcaaataagcacgaaaaacgttaattttggtaa

SEQ ID NO: 26913 - DNA, 1012 bp, Heterodera glycines
ttgaaaaaatcgatttttttgttttcggggcagtccccccgaaccgatgcgcccagatttatggggagaccgaatccttccggaatagcttccctatagcctgtactttaattctgcgttggatttttgctccccataattgtttgagtaccccaaacggacacttgaaaaaatcgatttttttgttttcggggcagtccccccgaaccgatgcgcccagatttatggggagaccgaatccttcgggaatagcttccctatagcctgtactttaattctgcgttggatttttgctccccataattgtttgagtaccccaaacggacacttgaaaaaatcgatttttttgttttcggggcagtccccccgaaccgatgcgcccagatttatggggagaccgaatccttcgggaatagcttccctatagcctgtactttaattctgcgttggatttttgctccccataattgtttgagtaccccaaacggacacttgaaaaaatcgatttttttgttttcggggcagtccccccgaaccgatgcgcccagatttatggggagaccgaatccttccggaatagcttccctatagcctgtactttaattctgcgttggatttttgctccccataattgtttgagtaccccaaacggacacttgaaaaaatcgatttatttttgttttcggagcagtccccccgaaccgatgcgcccagatttatggggagaccgaatccttcgggaatagcttccctatagcctgtactttaattctgcgttggatttttgctccccataattgtttgagtaccccaaacggacacttgaaaaaatcgattttttttgttttcggagtagttccccctaaaccgatgcgcccagctttatgggtagaccgaatccttccggaataccttccctatagtctgtacttttaattctgggttgggatttttgttccccataaatggttgaataccccaaacgggacctttgaaaaaatcaatttttttt

SEQ ID NO: 26914 - DNA, 1207 bp, Heterodera glycines
atccgaatgagaagccattgattggaaagatgagaaccgcttctcgtgtcacaagtgtggagaacaaggacacattgcgaagaattgccggcaatgagaaagagtaagtccgtggaaatgaatggttaagaatgagtatgaggcccggggacggtccctaaggggtattggaggagaatgaccataaagagtgctttaaaaaaatcttttgcagtgggctatggcccaatacgtattttgaggtcacctgcgttgtctttcttttctcaaaatcttatttttgtccactattgtacctaactgtcttcttccgctttattttctattgtaaaataatacatttaacttttcttaatatgaaataatgactagtgagctacggcccaaaagtattaaaaatgacgtcaaatatttcagcaatggaaaatcacataattcctggaatcccttttcttcttgacggtcaaatcgccataaaattcttcactttgcgatatttcactagcaatcatcatccagcaccgtttgagatggatttcgacgactggggagtgagacacatgcactcgtccgagcaagggtatttcgccttgcgtgcggttgagttcggtgaccgacaacagttcgaatatgttcttaatttggcttcggccagagatgtgaagaaccgaggaaaaagggtacgcggctacaactatgggcattggcagacggtcaagagagaacacatgctgcgcgtggtcttggaaaaatttcggcagaatgaaccgctgtgtgaagctctgctccggacgggctttgtccgactcgtggaagccagcactgaccgatattgggccgccggattgctgataactgatgaagctatacgcagttcaaataattggatgggtcggaatgagcttggctgggtgttgatgcacgtcagagaccaacttcgaccattgccgcaacaagtccacctgatccacaagcactacatcgtatgccaggcggcagcgcctgactacgttgtggccctcgcagcggagccacatgttcagccgtatgctgttcggattaacaacgaaactgtcaatgctgcccgacaactgcaaattggcgatactttggtgatagaaagtgtggagtggagagaaggttttgagcagcttggggccgaaggaatgaacgacagaccgtgttgggtacaccaggccagactcaa

SEQ ID NO: 26915 - DNA, 985 bp, Heterodera glycines
actaattgcagaattcccagaaaaaaaaacttgaaacttttttacatttccttgaatttaataaaaaaaaattcgaatttatttatgattttttttttgatttaggctagataactaaatttttaataattttttaaaattaaaagaaaaatttgcggcgacattttgccctgctcccccctccctccgcaccacacctccttgaaactgttgacccaatcgaagtccgcttgtgcgttcaaatttctgccacaacgaaatcacttgggttggccatcttttatcggagagtgcaaccatttggacaatgcttggccagcagaaattgttgaatttggcaaaaacatcccaaatccgctgttttttttggctgttgttaagctacttttcgagttattagggcctattttctaggtttttattttgaaggaatagaccccaaaaaccggtcggggtcgttttcgcgtggccattttcgcgtgagtacctgtttaggactgaaattggtcggatttgtgcaaaacatccatgtttcgaatcccgaacccgaattcggacaaatttcttaacttttttatttcttgcggctagtatcttctacaataatttgtcagtttggtcggatgtgcgtcaaacggaaaaaataattaaaattggttctagtcggttttacgcgtcccatgacactacgcgtcccatgacactttacgcgtcccatgacatttaacgcgtcccataacattttacgcgtcccatgacattttacgcgtcccataacattttacgcgtcccatgacactttacgcgtcccataacattttacgcgtcccatgacactttacgcgtcccatgacattttacgcgtcccataacattttacgcgtccgatgacattttacgcgtcccataaaaatttacgcgtcccataacattttacgcgtcccatgacattttacgcgtcccatgacattttacgcgtcccatg

SEQ ID NO: 26916 - DNA, 1407 bp, Heterodera glycines
  unsure (1)..(1407): unsure at all n locations
ttttttttttttttttttttttttttttttngggcaaaaaaaaaaaaaaaaaaaaaaaaaaaaaaaaaaaaaaaaaaaaaaatttatatttttttttttttttttttttccttccccccccccccccccccccgccgtgggggggtgggggggggaggggaggggagtttttttttttttttttttcttttttttttttccccccaccacacccaacccgggcgggggggggggggggggggggagagggggggggggggagacaatcatctttttttctctccccacctccccccccccccccccccccctccttcttttttttttttttttgcccccacaaaagagagaaagagttttttttttttctaaaaaaaaaaaaaagttgttttttttttttttttttttttttttttttcttttttttggaaaaacccccgggggggaaaaaaagggggggggggggggaattttttttttggaaaaattaaaaaaggggggggggggttttttaaaaaaggggggaacccgggccccaaaaaaaaaaattaaaaaatttccgaggtttggaaaaaaaaaacaattttttttcgggccccccccggggttttttcaaagtgtttaaaaaaattttttttttaaaatttttttttaaaaacaacagtccctcaccggtttcccccagttggaagggtagggtccacggatcgatccgggaagctgggagtaattgtaaagcatncatcaaaatggtaaaaagaccgtacgcattttcgaaattccatttttgtattatttcaaatncnaaaagatnncattancnagacaatttngggtggggtcttcccagcgactaanttcgcaatttaccaacgatttcgagcattttgctgatggacggctccaaaaatcgacnnaaatattcgccactcatttgcttggggaaaaagcgcagcacttcggaggaatttttggcacgaaaatcggcgattgcgtgcagaattttggcccacgccgttgtcggggaaagggcgctttgctcctgcggcatttgttgctgactcccagtttctgtcgtggcattttcatggtcaacatttctaacatgaaattcaggcttcccatcgccgtccaccacggcacattcgtagcgcacgcggtcgttgaagtcacaggtggaccagaaaaggcgagtgacacggtagccgacctgtaaactttcacaaaaatgaatatggacaggaaagtaatcaaagtgccattgaaaaaggaatttcaattgcctaaatggtgattcaatgaaagcctttttaattatagtaattaatagtgtttgatattaaccgggaaaatgtgctcctctgtggtgaatgccttcagctgatcgggcaacagttggccaattcg

SEQ ID NO: 26917 - DNA, 1228 bp, Heterodera glycines
ttaagtttcaaaaaagttatggccagaaggaactcaaacattgagtatttcgaacttttttgccctgatttttttatgtatgaataaaaattttttgaaaattgcatttttcaaaagctttcgaataataccaataatgtttaatttggttaagaaagaaaaaagttatggtccaaaaagtcgtccgacgacgttttgtcccactccggccgataggtgccgccgggaattaccaaatttactttttctcctgctttttgagaattcgaataacaaatgaagcataatcattggcacagatgtggaaactaagttcactgcccttgttgagtgtattggtctaaatgatttaattgattaaaatcatttttaaaggctgatcatttctttaaacttacactaatgacccgttgtgccccatttttgtcccaatcccaacggataatttgtgccaatggcacagaatttggcttggaagaagaagcattgccaatgtccttgattttcaatatgggataacagcttgtcataaaatcactgaaaaatgtgaaaaatcacgctaggccaattatgttatcaaaatttgattgttttttaatattatttttaattttaaaatttaaaaaattgaaattacagtgcagcaaattgggtcacatcacgaaatgaccagttgtatctgctatagttttggccagagaatccattgatcgctttttcgtcaacaacaataaattcgtcaaagatttccattgattatgtgcttttaattaaaaaaaatattttattaaaaaactttgacaataaaaaacaaaacaaattttcaaagaaaaagttttgataattaaaaatgtggaaaacattttaaaaagatgcaaatgcaattccatgatcaatatttttaaggtcagagaaacgttgtttattcaaatgatttgtttacatgtgaaaagaataaaagacatgaaggaaaatagaaaaacaaaaagcgttattttcttaattaactcataactaaacaattgccaagtttattcatgccatcactaattgatttcataatggaaaaacgcgtgactaattgacgtatatttaaccccgacccgagtcggggttagggtaggggttcggggtcgtcggggttggaagcgtccgggttcgggtcggggtaaaccccgaaaatggccaaaaatgtcggggttcggggtcggggcggggtcgggatgca

SEQ ID NO: 26918 - DNA, 1422 bp, Heterodera glycines
ttttagtagagtgaagcgggaccgggaattttgggcacgtatcgggaccgggaccttttcgggttgaaaaaccgggaatttttggctgggaaaaccgggaaaacccgggactagtccccgtcccggtcaaaaccgggaccatggtactcagttgtactcagttgtccgctaccaggtcccggtcccgcttcactctagtttttagggacccgtgtgggccccagtttttgggccccggggtcgtttgggccccaacccaaaaatagaaaaatgtgcttttttaaaaattaagattctaaaaactaagcctgagggatccctcgccacttggcataaattaggtttaattaacattcgctcattttttacaattttacttattccaactcctattattttttaatagttaaccaatttgatgtgcattctgatttggacatttttcagaaatggctaacccaattgcaaccaaaaaacaaaaagtaaaattgtcttacgaaggccacctttacaccttcgctaaaatgagttctgattggatgacaaaattttgaagatgcgagttcaaaaaatcaatttcacattattttggagtttctccggggaatttctcgcaactatcgaatgaacccgtgattttttgttttattgtccaaattaccttatgaacccgtgaatttctgttaatttttacattttttattgttaaaattattgttgaatttatttttaaaatgtttattttacatttttatgctgaaatttaaaaagttgtttttactgtgatttttcatttttctgtacttggggcccaaacgaccctggggcccaaaaacgagggcccaaaaacgggggcccaaacgcgggggaccaaaaactggggcccaaacgcccccgactcctatttggcccaaaaaatggtttaaataaattttttagtactttatatgctttgatgttcattttattttgtccaaaatttacaaaatttgcaaatttttagcagatttttatcaaaaaattgtttttttttgatttttggaaaaatttaatagctttgttctttggcatccaaatccaacaatcttggtatcattcgaaacacattgtggaaggcgctctttagcggcattgacaattacatcacatatcttaatattcttatacatttaaagtcttggccagaaaatccacaattttgtagttgcgaagataaatgtgatgaagaagccatttaattccgaggaaaaggacaaaatgtttttggttctattggtggacaacaaatactactatgagatgaatcagtggtggttcgttggcgttggctggtcgctcgggtgaagaaaaggtcgttccacccacccatcccaccgccctgcctcgttcaacacacactttgcatcaatttacataaaaaac

SEQ ID NO: 26919 - DNA, 998 bp, Heterodera glycines
  unsure (1)..(998): unsure at all n locations
atcatttgataatggattcaacagaaacggaaaaattcgtttctttgtggaaaatattttacttaagatttggtttcagacgcggtgtagaatctttaaaaattaatattatttaaatcttttataagatttacgcgatacaaattaaggaaatagtaaagttcatgtgatcttgatagaaaatggataatgaaaatgtggtttattgaaaaaaatggtgttaattcgcgtgcagaatctataaataaattaatattattttaatcattaaaaatattttagttatataaatgataaatcgaaatttattaatgctctgataaaaaaagcatttgataatggattcaacagaaacggaaaaattagcactttgtggaaaatattttacttacagatttgaaggtttcagacgcggtgtagaatcttaaaaaattaatattatttaaatcttttataagatttacgcgatacaaatataggaaatagtaaagttcatgtgatcttgatagaaaatggataatgaaaatgtggtttattgaaaaaaatggtgttaattcgagtgcaggatctataaataaattaatattattttaatcattaaaaatattttagttatataaatgataaatcgaaatttattaatgctctgataaaaaatcatttgataatggattcaacagaaacggaaaaattagcactttgtggaaaatattttacttaagatttggtttcagacgcggtgtagaatctttaaaaattaatattatttaaatcttttataagatttacgcgatacaaattaaggaaatagtaaagttcatgtgatcttgatagaaaatggataatgaaaatgtggtttattgaaaaaaatggtgttaattcgcgtgcagaatctataaatanattaatatttattttatcattaaaaatattttagttaaatgataaatcgaaatttattaatgctctgataaaaaagcatttgataatggattcac

SEQ ID NO: 26920 - DNA, 752 bp, Heterodera glycines
cgacttacaataaaagccgaacattacttcaaatgcatgttaaaattgtttggtgaacttatctttgtattttgcacttttccttacattccaaactttctatgaatgcatgggctgccattgctttcattttccaattttcacaaatttcttttaattctccgatggaattttttccaattacctgcggctcattataaaatatagggttcgagccccgtgggcgggggtggcttttcgcgggggcgggggtcagagtcgcgggggcggtggcgggggcacgataattccgcccccgcgggggcgggggcgggggtttgctttgaattagctccaaaaatctcacaaaaaaaatattttttatgaataatttctttggctccacattgtctaatggaaaaattactggaattatagaaagaatttttttttcaaaattcagcctttctttcctaaacctagtgatatatgatcagcgctaactgtgatgaagaaattctttgaacattagtttttcagtattaaatcaggcgccgcattggcgcttatgccaggcatttcgttgggtaaaattttgtaaagaaaaatttaatagcaatagtttcttcataaattaatttgttaaatgaatatgcttaaggatatttttcatattaaattgttgatataaagttagtcaaaaaaccatcaaatcaaattttcattggtaattgcaagaaatgcctttcaaatactcaatgacacggggaacg

SEQ ID NO: 26921 - DNA, 991 bp, Heterodera glycines
ttatgcgcgcgcgtgttaatacatttctttaaacatggccaaataatctgaatcggttttttgagtatttcagcaataactttaaaatttgtaatttaatagtcaatgatcgtacagtaccaaaaatgcttaaaatttgtttaaagaaataaaaaagttatgttacaaaaaaatgtttctggccggcgaagtttttgcctgctccgcattcggagggagtactgtagtacagtattttaatctggctatagattaacgaaatttcctcttctctattgatttaataacataccttataattaaattaaacaatatacagtacgtacatggactaccatttggcgaatttgggccaactgtctccggcggtgacttctgctgctggcaacaatattgccgcaggcggcgtcgatttcttccagccgcaacttgcgcaattcaactcatccgccgcaattggactcatggcacaacaacacccgccaaaagacatcaaaagggagcagcagccaagcaacacgtgattattacactcacccaaattaaattaattaaaaaaataattctctggaatttgaatgcatttccgaaaatcccaaaatcttgtctgcttcttttaattgggagaaaagattatttgttagaactaaaactttggtaatatttgtgccttgtcaaactgatccatcattgattggttgttctcttttgtctctactcaaattttttaaatgttttctgaaacattttgttcatcaatagggaacaggttttaaacagcaaaaaatttcaaaatacgcgtcagccctttccatttctctgatcagcaaagcgttttctactttgtttgggttttgtactttgatcattaagtgctgccgtcggcattgatcacgtcattctcaagcaacatgccgccgccgctgctgcagcaacccaactgaaaggcatgccattgatggggatgcgcggaaagcttagttcggctgct

SEQ ID NO: 26922 - DNA, 1522 bp, Heterodera glycines
tttattgtttattgaggcgatgaatctttttcatgtcttttaattggtctttttccacaaaaaaacataaaataagtatggcgaagttgaaaaaatatctatccattcttgaaaaatgctataataattgtcattctcctcaaaataattattctccaatcaattttaatttgcataattatggaattagtcaaaatcattcgatgccaaaataaaaattctaaaaaaatcaaataaactttagcgaaattcattaaaatccccgtgacacacggagagtggctaaaatttccttctcaaagtgtgatggaattgttcattttttatcacgacgaatacgaacggttgtacaattgcaccgggctgaacattgactccgtccctttggagcagcgccaatttgtgcccgagtcaatcgcaattagcattttgtgcaccatttactatgtaattagagaaattaaatgcctaattaaattaatgtaaaaattaaaaagccgaatagtaaaatattcgaagtcagattagctaggttttttgatgattttgcattaatcgaattcacttctttttaatgatttaaaattttaatagaaaaatgactcagtgttaatgactaataaatttgaagaaaatagaaaataatcacagatagaaagagtactgtattgtctgattcaatacgttgagatactgtatctgccctgtatgtactccatatggaagcgtttgcgtgacaattcctgctacaaattgctgttctacatcggcatcactgacatgggcattttgtggattctcggcttcttcagggcatggcttaacctgcatggatatgtgttctgctcctatcccacactgatttattttgtcggtgttttggtaacaggtgagaaataattattagttattagtcttatattaattgaataaaattttcgcttatatctctcagtgaaaagtaggactggttcattcccttatttgctagagttcccaggttccggtttttgaagagtcaatttcccggtccgggtcccggtagaataacgggagctgggaaaatttgccattattaggttaaaatttaaattttgactaaaaaccccaaaaaaagcttttctgacaataaacaccaaaatgagtatttatccagttcgttttttctgattaaccccttttccactgatgaaagtttttgctaccggtcttggtattggttttcttaaccctcttttgcacaaaacttttttttaatttctaaactctcaccaaaattaaggaattttcggacaagttgaaaatctaagtaaattatcagttttttgaaccaaggtaccgaaaaaggtcgggaattggggatgagagctcggggtcagggatttctattgaaaattaagtggatttaaatttagtaatattttatttaataatgttttctcctttatttttataattaaaaattttagccctttggatggctgaaagcactgctgatttggtaggctaaatttaatcaaat

SEQ ID NO: 26923 - DNA, 969 bp, Heterodera glycines
  unsure (1)..(969): unsure at all n locations
gacaaagatagatatcagacttttctgatttgaaagaatttaatcagaatgttatgatttcgtttaattacaaagatattaaccagaaatctaattttgaaacaatagaaaccaaatgttatgtttttggttaatcacaagatagaaaacagaattctgatgtggacaaagaatatatatcagattttctgattttggtttaattacaaagattcaaatcagaatgttatgattttggtttaatcacaaagatagaaaacagaaatctgatttggacaaagaatataaatcagaatgttctgattttggtttaatcacaaagatagaaaacagaattctgatttggacaaagaatataaatcagatgttctgattttggtttaattacaaagataggaatcagaatgttctgattttggtttaatcacaaagatagaaaacagaattctgatttggacaaagaatataaatcagaatgttctgattttggtttattacaaagatagtaaccagaatatctgattttgacaacaatagaaaccagaattttatgagtttggtttaattacaaagatagaaaccagaatattcgaattttgacatcaacagaaatcagaatattctgtattggtttattacaaagataggaatcagaatgttctgattttggtttaatcacaaagatagaaaacagaattctgatttggacaaagatagatatcagactattctgattttcaaacgaatataaatcggaatgttttgattttcgtttaattacaaagatattaaccagaaatctaatttgaaaacaatagaaaccagaatgttatgtttttggtttaattacaaagatagaaaccggaatttgatttggacaaagaatataaatcagatgttctgattttggtttaattacaaagataggaatcagaatgttctgattttggtttaatcacaaagantaga

SEQ ID NO: 26924 - DNA, 1348 bp, Heterodera glycines
  unsure (1)..(1348): unsure at all n locations
aacatacaagtattttatataaagctttaaaaattgaacacaacatttagaggatttctgcaaatttaaaatgacatattacatgaaatggaattaaaaaaagataaaaatataaataaaatgcgtatcaaaactaacttcggttacatatttttcaaaaataatattaataaaaagtaattaaatatcttttatgtagtaaaattaatgaattttcaaacaaaaaaaactattgtcatgttcgacagtcctttaaagttaaatatgaatttcaaacaaagaattaaaacataaaagcataaacattgaatgagtttattaaattaaattaaaaaaaaaaccctaattaaaaacttaaagattattttgtcttagctttactccaaaaagcatacgtattaaatggctccacaataatggcgacaaatcacattgctgcgtggatgagtaaatcttgaagaatgcaatttacttgcgacttaaaaaattgacaaatataaacaaacaatgtatttgcaataatttatttatttattaaaacttaacgattaacggataagcaccttagaatcagttccgatcgctgttgtgcaccaagactggcgcaaaacccaaaaaaatggatggattcccttggccgtcaagtttttccacatactgttgaataaaacaataaaattaaaacaataccatatccaactataataaaaagctatgaaaaatcacataatatgctgtgttttaaaatccagaactaatagcttactataataaattctaatattatttaaatgtaaaagttaaaaaaataaaactatcataagaaaattattcccaaaattaattaattaaaaagagatctaattatgaataaaaataattaaattttaaaaatattttaataaattttatttattcatattttatttcaaaaatacgcaaagcaactggacggatcttgaatgctaacttagcacacatgattttaaacaggtattaatatttttattttttattccaaatttaattttttctatttagcaccaaatttaatttgtaagttttagatttatacatttttcattattagcaaaaacacagctggttttatgctaccttatattttatataaattttctttaagtagcaccgcgtgataaatccagtgtttcaggttcataatttattttaaaatataatattaagctctttattgctttaatttataaaattactttttgatcagaaatttttgttatattaatttatggtcaccttaatatcatanaattatattttggaaaaatgaactatttgtcattatcattttagtataagtttaataatt

SEQ ID NO: 26925 - DNA, 936 bp, Heterodera glycines
agtaagaaattttagttacttttcactgtgcctcttctaccccatgaaaatttgaattatcgaatttatatggaaatttttttgacgttggatatttaaaaatgaccagtgccaatgattttatctgtaaaagcattggaattgagatttttggtgattcaaccgaaaaatattttgaagatttttttcgattgttagccaatacaaaaaatatttaaattaaaaaatttattaaacagaaactcttttggacaattgacaaatattaagcataataagcataatgaactgctaaattagacatcacactttatgtttatattgtgcacttttcggcatttgcttctgccgcttttccccaccattggtgcggatgaattttgttgtgccgaaagtgctttttttgtctctctttttacattcgcccactttccgggggaaaagcattacttttaaaaatttagtgccaacatttcccatcaatgcactgaaaagagccaattttgttttcaattccgaaatttctttgatgtaagtttttttaaaacttttaccgcttacttttagtaaaaaattccaaaagtcctttgacaggctattctaatcattaaaagcttttttaagtgcaaaaaatttatttattttccaatttttaaattgaaattcgctttttgttttacttttttcccatttctcatgacaaatcgattttattttccgtttttctccggcggatttcaattcatctcggcggctgatgaatgaatcgttttaacctcttttactcatctccgtccaccttttaatcacatggaatttttattatcctctgaaagaaagcacagccaaacacaactaacaaacaactttttatgctcacaaaagtcacaaagttcgccctttaaattttcattttatccattctctttttttgga

SEQ ID NO: 26926 - DNA, 1274 bp, Heterodera glycines
  unsure (1)..(1274): unsure at all n locations
taaaaaataataataaataagatcaaaaataatcaataataatttaggcggcaaattatggcattgtgttggactccctcccaccgctcgatgactactaccccggcggacacttccctgaggagctaaagaagccggagcagtggtacgaggagaaccgcaacacgccgtttgacctgcgcgaagtcattgcggattactgcaaagcaggtaaaaattgggcatcaaaaaaaaatatgcaaattttcttcagatgtccaaattttggcccatggaatggccaaaatgcggcagctgttcgccgctgcaactagccaggagctgaccgactccatcaccatggcgtctgttcgacttcacaagggccaacgggaccactgatctttaatggggcaaaatgaagaaagaatgccttttccaatggccaacgggacaactgatcattttagggggcccaccatcgaccttataccataaattatagatgcatttgcgtgataaacaaatttactatcaatcgcagcccgatccgtggatttgttggaaaccaatacgcagtcccataatttgagaaacttcatgatcagattaatcaggtacaaagtcggacacactgtaatttggggctcttataaaaacttctcgttctgccccgatttccgccttaaggattggactgatcatttgcactctctccgtcactttcgcgttgatcaattttctaattcgcttccaatgcctttcccttcccgtgccatttcctttcattcaccaactgtgggcaatccataatatccaaccacactttgctatttgtacgtatttccgttcattctttcgcctctgacgaatttattcctcgctgaagctgcgctataattttgtgaaatccctccacactttccctccccccctttttcctctccctttctctccgccctcacaattcccccaaatatccgtcgtcgtcgtcgtcgtctgcttgaaattcatccccgcaggcgttgtacgcctccatcccccctcccttctcgccttccttcgcattcgttcgtttcgttcggcttcccattttattccctctgcatttccatccgaaacaacacaaaacaaagcaactttcgccgtccgtcgtcgttctcctttgttccttttcttttcgttttttggatccgcccgccaatccgtccattttatttttgtattcgttgtctttcatttattgttgactatntttcgttnaactgctgaagtaccgtaggttggccatccat

SEQ ID NO: 26927 - DNA, 1169 bp, Heterodera glycines
atatctgctgctcaaacgttatgtgtcacaattatgataataacattatataggacactctatcctattttcctaatactaccccgatatgctggaaatggatagtgtgtctccttaatattgaattacataaatgtgtcttggcggcgcgaattcagtgttgaaaagtgaaaatttacgattttcgactttttgttcgaatccgggtccgggttcgaaattggtcgaaatgaatgtcatattcgtgatcagcggccccgaaaacccccggaaatgtattttcatgactttttaaaaaaattttcaaaaaggccaacttttacagtagcgccagaaaatctgtataaaatggcctttcgtttcttagggcaaactttttcacctgactgtagttgtcaaattatttattttcatgtctttttttggtcgtgtaaactgcaatagagccaaaagtttttcgggtttttacaaatagaccgaaagacgtcgaagttaggtatatttgaaagaaatttcccaaatttctatgtgtctatggattctgaaataattttttgcgatctttttaaatttgaaaagagcaccctccagcagaagggacagttgcgggcgaccgggaccttttcgggttgaaaacccgggaatttttggctgggaaaaccgggactagtcccggtcaaaaccgggaccttggtactcagttgtccgctaccaggtcccggtcccgtggcactctaataaaaacgtcttttccgaggtttttggggtcgctgatcactagggtcgcaacttttagtgacgaaaaatcccgaaatagttaactaaaatagtgagtaaaaatgccaaaatagtgacaaaatagtgtcaaaaagtccaaaatagtgacgaatagtgacataattttcagccaaaaaataagccaaaataatttttattcactgattgcagttgcaaatgagtaggacttggatttttaagaccaaaaaacccaaaatagttacctaaaaaaatttttaaaattaaaaatttttgccaagaaagtaaatttttgagaaattttttttcatttcataggagtatattttgaaaaattttagctcgatttttaggggtgtatttttttgaaatttttttaggtcgattcttaggggtgtattttttggttttat

SEQ ID NO: 26928 - DNA, 1063 bp, Heterodera glycines
aagcgatgtcgaagaatctgtcgtcgtcctccccccctccgccgttgtcaatcggacggaaaccgaacccttcaacaattaattgtctttttgccgcttcaactcccattgttcctttttcaccttcgtctttctcctttttgcctcgctttttgtctccgccccgcacgaactcttcgaaagagaccaattcttctcggctttccctgccgaatccgttctcatcgaccagttcggctattgggcgaccgatgttcgtcccgaagcattcgtccactgggaataatccttccgctttttgttggccactcatttcacacaaaaaaactaaaataaatattaaatgcgcaaaattccgaaaaaaagcgacggggggagggacacgaaaagtgactgcgtgctcaaatgagtgattctgagtttgacagccggcactttaagattaattgtatgtatcacgaagtgtgagaaaacttctcccgcccattccatttccgttgctatggctacaacttaacacaaatccattttctgcctaattcactgaattctttaattgtacaaaaaaaggctcgattaaatgcacgtgacgttggcttttttccttaatttattcatgccaaattcacttttgtatgtgaggcgctcaacggagagtattatgaaaagcacaacttttctgtttttgagagtatcccttttgaagtttgctcacaaagacatacaaattgctaattagaaaatccagtgtcaggagcagtagaatatagaaattacattgtgtggattttgggtgggcaaaaaatcagagatgggtcgaaaaagaaagggaaccctctttttggtttgcataacaatttttttgaagataatgataataattacatttttacaaggacgctgattatcatgaatatactttttagctatatgtaataccgatttcgcttttgaacaaatgactttttccagcaccaaaaaaaacaaaatgctatttttttaacaaaatggattggaaaataaaaatttagtgtcacactctttgctgaatgcttgaaaattc

SEQ ID NO: 26929 - DNA, 976 bp, Heterodera glycines
  unsure (1)..(976): unsure at all n locations
ttgcagaagcttcttattattttttttgatttttccaggacaaatccatcaaattttgcaaaaaatccttgtaaatgatgaaatgacgtacctcttgttgcaaagtgagtgccattgtgagtagttgaagaaattgaagaaggaagtaaaattaaaagtaagggcaaatattagctataaatacatattaaacacatgtaaaaaccagtgccctacggtggtctctctcttctcctcttccacttcctatttcccctttctcttcctcttttcccttttctcttcctcctctcctcaggtccctcttcccctttctcttcctcttttcccttttctcttcctcctctcctcaggtccctcttcccctttctctttcccttttctcttccactcctcttcctctgtcactcctgtccctctttgtcttccactttctcttcctcttctacaactgtctctcttcctctgttcccctttcataatttaataaaacgaaaaaattaacaattaaaaaaatacaaaacaaaaaataagtgtcgaaaattagctacaaatacatattatacaaatgtaaaaactcaaaaaattaattttttttttaaataaaaacaggaggtaaattgttttaatttaaaaaatgacggttggatgaaagcggaggaaggcggaataatgtacatacaaaactatgatcatttgtctgtccgctaaatgccaaacgtcgatcggtgcttctgtccgtgatgagtcacccccccccccctcccgtaacaatttgtcgcacctttttccaccaccactttttctctcccatccacacccttcttcttaaggatgggatgataanaatctcttctgccaccagcagcagcagagccgtttcttcatctcttctgtngtgtattttctgtgattttttattttccccattaagcacatcatttgaaaatataagaaaaaatgtctccatttttcc

SEQ ID NO: 26930 - DNA, 1079 bp, Heterodera glycines
  unsure (1)..(1079): unsure at all n locations
aatttcgacattgttcagcgatgttctagctttatcgagtacacaagcatacctaagcattgccctttgtaatttatttggaattttctaaaagttttaaaatttatctaattccaaaaatagacgagagatattcaaatgtataattaattttttttttcgattttttttaaattttcgtcctatggcctaatttcagtcgaaaatttatttgaaaaacgccactctcggctgagaaaatgtgtgaatttttgttcttactaagtaaagagactgatggggttagacgcggctactctttttagagtttcttgggcccgaatcttgaaattctcaaaaaaactttggacttaggatagtcgacaaaaggattttgaatctttttagcccgagattgggctcgttcccgtattttccataggcttatgaccaacaaaaatccaagacccaaattttattttgatttttaatgcttcacagtttgggcccctgccgtttgtctgtggccttgggcgtttgcccaaattggtccctcccaaaaatctctcggaactatcgtcggttgtggccccagggcaccaccaaccaaccacgcaccactcactctcattagtcactcattaatagtatttaccaaaaacactgtcccaccaccgcacgccggtggccaccaattgacgtgtcccccgcccgaccaaatgaatttgttgtatacactgccaccacaaaacactctttttgctggtgatggtgacgaattgcgggggtcggacgaaggcgccaaaaaggcgggagaaatgtccgtccccatggcccctcaggggtaccatctgtcgttgaaccggtttttcgaggggttttgggcccccaaattccgcctcatttttggtggtgacttttggggcccactttcgctctccccccacacgctcagcaggcaaaaacccaatcaaatcatttcccattagcaaaattgtttctgtccgggccgggccaggccagggccaacagcaggggactgacgactgtctgtggtcctgngccaacggaaattcgcacccacccaaatttgttcccca

SEQ ID NO: 26931 - DNA, 826 bp, Heterodera glycines
ccgttttgctgcccttcttctgtcgcttcttctctttccttttccagaactcccgtttccgcccggttcacttcttcttcttccgctaatgtgttttttcgttggcgtttcctgaaaggaaaaacattaagccgaattaaaggagtgataaaaccattacggttttatcaaaagcatcatggctttttcagccgcttttctttttggacgatcagttgtgctgaaatgcaaaacagattttataattttcaatgaaaattttaccccccccccccctccattcttaccaggtaaaagttgtctcgttgctgctggtgtccgaataattcaccagattaattgagtgtgatgtatctgcaaaaatttttttcttttttttttctaataataaatttgaagtttcatactttcgacgtcgacgacaaatgtgtcctccgcattggccccgggcaaacagcgggccatcatcgttggtagcggtggtgcggacacttctccatttggcgaattggtgtcaatgcgcagacacccttgtgagaaaacaaaaaaattatagaccattgaaaatgtaaagaaaaaattaccatcaattgctgacaaatttttgtccgccatcaataaaaaattgtgaacgagctgggaagcttttgagctaaaaaagaaaaagaattatttaaaacaaaaattattatgctttttattgtgaacaatttatgtaaaaatgggaagcaataggaatgcgacgccgccccgtttcctatttgccactgtgaagaccccctcccccctgctatgccatcgattaactgacccctttaaaccaaaa

SEQ ID NO: 26932 - DNA, 1671 bp, Heterodera glycines
agtgccattcgccggtccctccccacgccatcccccccccctcttttcccccctttcggcccttttctcacttgaacacattcaatgcgctgaccaactccgatttgaccaaaataaagccccccgcgtaagccatcgcttggctcagctgttgcagtccgttcgttgtggcaaaaccaatggcctttgattatattttatttcgttaattggtttaattttgcaactcactcgtccatttttgcttttgtttaagtaattgcaggccaaatgttgaaggagcaattggcagcagaaaatggcagcggcgagaaggcccatcggacgattgttttgcagggaagaagcgattgagatcagaagggagctgagcccataaacgaattcgacgggaaggaggggcacccaaaattggcaaaaaattgggggggggaggaagccggggaaatggaagggcaaaccaacaatttcaagcagtccatgatcgacgacctttgatgcggagtcgtcgtgaaactttgagtcttttttgtgctcctccaacagttgcaagcccattttgccaaaaacagtgttctgtgtgtggaatttggttgaaaacgtacaaaaaacaaaggaaaacgacccaaagagtgacagcgccgaaaacgatcattcccacaatggcataagcagagcaaatccaaagcacatctcctagcagagattcatcttttttgcctataaaatcattgaaacgattcacaaagattaactgtaattaaatcagtaacccattttttgctcaaaaacactgaagaaaagcccggttaagcgtgtgaacactggataagcgaaggaatgggccagacaagcaaagaagccgacggcactttggcagggccattttttaagcagcgacaattggattccaatccagcaacgaacaatctgcggttgttaaacataagtggacatcattcggtgtggggcagggatgtgcctaggtttcgcttttcgcatttcgcctttcgcattatttgcattttttggcgtttcgcatttcgcatttcgctttttggcgcgaaaagcgacttttacacccctaagaattggattaaattcccataaaatttttcaaaattttacctataaattggctaattttcagtgaaaaccagtttataaatgatcaaaatttccaattttttccccggcggcgcctatcggcaccgccgcgccctcaaaactcctattttttcttaaaaaatggcccaaaatcgcaaaatttggtaatttgatgaaaaactgttctcagcggcgccccaaaactcttatttctcattagaaaaatgataaaaatcacaaaatttgatcattttttagtgaaaatctgtcaacaaattttaatcaaattttcaaaaattttcccggcgccgcctgccccctcttcccaaaaagtttttttggaaaaagcgcgcctcaaaaaagcgttttatcgatttttaaatttgcaataaaattttaaaaaattatttttgctttaggaatttaattattaaaaagttgtagaaaaaatttcgctttcgcatttcgcctttcgcattttcgcatattttagcttttcgcatttcgtttttttaaatttcgcatttagtttcgcaaatttcgcttttcgcatttcgcttttta

SEQ ID NO: 26933 - DNA, 1895 bp, Heterodera glycines
  unsure (1)..(1895): unsure at all n locations
tacttttantgacaatttggcattaattcttttttccatttacgaaatgtcacattagaaatgcccaattccttcacaaattctttctgtttgcctttgtcgtataaacttttgaattcatcaattcgttcaatgaattcttttcttttcttctcataaaaaattttctttttatttaaatttaattcttttttccatttatatattttatggcgatttgcgcctaataatctagcaattttcctctcaatgttggttgtattttcccagtggtattttcctctttccttaagcttttctttaattgcatcaaatttttgaatgatttctcttttttgttgatcatttgggtcatttcccatttctccacccatttgatcaactgctgctgatctttcattatgttcatttgggtcattttgttccatttttataactttatcttctctttcatttttgttccatccttcgccaaatatttcgtcaaaatttgtttgaattttgccggagtcaattttaaaagcaatgaaaaatataacaaatattaaatgccataaaatcatttttgctattcgaaaatatttgtaaagaaaaataatttatttgagaatttttttgaatggattgctcaatatgaagaatttttaattaatgtgaatttttttattatttgttaattttattacatattagctaaaaatgaagtcaataaatgtccaattaattgtaaaaaagtaataataaaattttgcaaaaattatatcttttctcgtttttcattctttaaatctattgaaaacttataaatattaagaatgcaaaaagatatggacacaaaaaaaaataattaaattacacaaaaccattctgttatttgcttaaatttcaaaaaatttctaactgatataaggaattttttttttaaatttccaataatccattggactggaagcattttgacttacgaatgttgttataaccatgattatatgctgtgtaaacaaatggacaaaacgctacaattgcggcaataacttttgaaattatgtttagaatttgttatgctggtcaattaatatttttcgtgacattttaaagatcagaaataaatgtaaataaacagattaaaattcaaaagatttgacatctctttatcttgaaaattccgtcataaaaattttttcaacttcattaattctaaaaaaaataattgaccgaaacaaaaataaatgggaaagttaatgataagcaaaaagtaaagtgtgactggttcagcttattatggagaaaaacttatgtgttcataaaacgagatggatggacgacggccggggctttttctgacaaaaaacctcggtctgtgtgcaaaagcaactggtcttttagcgcatgaaaaaatgagcgaagagcccccgggggtgagagtaattgcgatcaaaaaaaactcctaaaattcgcgtataaattgcgacttcccatcgcatcgcataaataataaaatcatgtcttgtgaactgcccgtcaaccacgccgatgcccatctccctctggctgcagccacggcagaagaacggaagaagaatgccaagcggaaatgggaagagacggtcagagtgaaaacggaaactgtcgacgaaccgaagcagaatgagccggaagaaaatgccaagcggaaacgggaagagacggtcagagtgaagacggaaactgtagacgaaccgaagcagaatgagccggaagaaaatgccaagcggaaacgggaagagacggtcagagtgaagacggaaactgtagacgaaccgaagcagaatgagccggaagaaaatgccaagcggaaacgggaagagacggtcagagtgaagacggaaactgtagacgaaccgaagcagaatgag

SEQ ID NO: 26934 - DNA, 1108 bp, Heterodera glycines
aaaaagaggatttttctgaccgattgtggcgccgatggacagaaatggtcattcgagacacagaacaatcggaaaaaggtgccaagtcgacagagagagtgtgccaaacatttcgatttgccatttctctgctcaattgtttatggaaagaaatggacgaagaacggaggaaaatgttggcaaaatggctaaaggacggccgatggacagaatttgtgagaattgtgaacggttggttaatcacttcacttagactaaaaacatttagcttttgatcgggagcacattagacaaattggcagagggacaaaaccccaaattggccattgacgacgcacaattgttggagcagttcaaagtgccgttccatttgaaactcgtccacagcctaacgatttacagactgctgaaacgctcttttcaattctcttcgtttttttgtggccaaaattttcaaaaatttaacgaagtcaaaaataatctgttcactttgctcaattcgtccagtgaattcaattggttggaacggaaattcccttttgtgctgaaaattggtaattattaaaaagcaaagaaaaataaaatttatttttgaatttttagagaaaatgaaccacagaatgcgcatttatttgtaccgaaaattgataattaacagaagttggagtgccggatcgctggcgacccatgcccgaattattttgccattgttactggaagaacttgacacaaaaatatacaataaaaatatcgcaaaatgtcgaatttttgaggagttggaagaactattgttaatcatcaagttcgaggtgttcagagcaattgaaagttttagcagtgtttgttggcttatgtacttatggcaatacgttgaggggtacgacgggaggacaatggagtcgacgaaagagatgccgaccaggcaaatgatcgacgaatgtaccaaactcaatgccgcgatgccggtgtgtgggcgggcgtggggtagaagccgtgctcagttggaacagtcgggaacggcattctcgggactgactcagatgggaacacattgttctttctactcagattttcgtcaacatttggggttggcttcagcacaaacact

SEQ ID NO: 26935 - DNA, 1579 bp, Heterodera glycines
aaagaatcttcaagccataatcaaatccaaattcgccataatcaaatccaaattcgccataatcaaatccaaattcgccataatcaaatccaaattcgccataatcaaatgcgaatccgcaataatcatgtccaaagcagggctcacaaacttttttacaaaataagacaaaatggctgaaaaattaagattggacccaaaaataagatttttctaaaactaatagtagcgcgaaggaacgcaataaaacatgaaaagtcacattagctactttatgcgattttaggcataaaaatagcaaaataggcattaaataggcacaaaaattttcaaacaggaactaaaataggccaacattttttattaacgctttttagttagcaaagcatgtataacttgatcaaaaacttaattttggtaaaattttaattcaaataaaatatactggcacaatggggatggactttggataggatgaggggtatgacggcaaaaacacaaagggaatgatgagagagatggatggcatatgcaacagaggtgaatggatagaaatggcacgataacattggaaatgaggggataggattggcttgggatgggatgaacagatggataagtttatgacgggttcgggtcgggcggggaaagtagggcaatttacgttatgcataaaatatgaaattttgaatagtgcggatacagcagattcctttcgattatcatttcattgatgatgttgacgagtagagaaaaacttcgaatagcaatttcataatctttcgagggattaatgccaacgaatacaaatttcaagaacgaaaattcaatcctttggagtaattttctattaaaatttccgagaatttctaaatcttttaatttttatcgtacagtttatttttccttttcgtacaatttatttttcgctttatttttatttcgaaatgggttgggaacatagaattagggcgcgcttgccctttttcaagctgaaaaagtgccagaattggagtgccaaactcagctgggactcaagtgaccgccctataaaaagcactaaaaaatacattttaaataattcttctagggtaatttgtggcgatgatcatgaatatgacctttattttacaaaattccgaaccccgaaccctaatttgaacaaaaatttgaaatttataaattaaagaaaacatatttttaggggattttatcctaataattataaaacaccgatgacaccctgtttttcattggtcagatgcttacaattttttggtgaaaaattctaaaaagtgcataatgtatatttttctgctcattaaaaagtctagcttaatttgattaggtcactccttcatcgtgatcttgatcccccaaaatatattaaaaaccgggaaaattttgaaaaagtgctgttttgaattaaatattattattattaacaaaatttttatcgtttgctttatttgccaactagcagaaaggagagaggaagataaaacggagagaaagagaaatgaaacaagagaggagtgagggagacagaatggtgctaggtcgttactaaccatcatat

SEQ ID NO: 26936 - DNA, 1725 bp, Heterodera glycines
  unsure (1)..(1725): unsure at all n locations
agcagtgtcatganaatgttaaaaaagcggttactgtattactctggtgtagcaaatctggccaaaaagacactaatacaaaatgccacagtgatccatcccattntaatggcacaccaaccaaaaatgggtgtgccaacgctgcggtagtagtagaaccgtgccggatgctccgtttgcgcaccattgcactggccacgctccatttgcgccgctcgtccgcgtccacccattctgtgggggtggtgccaacgagcgatttatcgattgattagccaatcgtttgattttattgattaattttgcacgataaatcaatgaactctcagtgctttatgatgagccatgaacgaaccagggaaggtgccatccttgagaaaaagcgggaccaactctgttaaccaaaaaagtgccaaatgatttcttagaaaaatatcaatccccgccgtgccacggcacaaaaaaactgaccgggtggccaaatgccatccattatcttaattggtttaattattaattaaagcaattaattgtttttggtgaacaaatcggcataccatgtgcgtctgtggcactcggtgcagccgaccctccttcacttgaatggcattctgaaaatcagttacaaaatttagggctcgatggcggcacgttgtgccaatctcgtccatcccttgactttgtgccattctcgtccttcctttctcaaatcttctatcattttcaagcttgtccacaactatttaccaacctctccaccctaagccgttgtgccatcccgcccaactctcacaattggcattatgccatcccccgccttggcattgagccattcatacccctggcgttgtgccattcaatttctttccacgagatatgccagtccccatcacctccccatttgggattgtgccatccccattggcattgtgccatgcccatcccctacaccatttggcattgtgccattcccatttggcattatgccatccctatcccaacgtggttccattgactttgtgcccaccgtgatcagttgctccaagtccaagtcgcacagcactgtcggctccaggccgatgttgtgcccgagcgcggcgagcagatcacgcactcgcaaatgcttggcaccaaaccaaattttgatgctggcaatgttccgaattttttggcccaaatagtataattttttcacatatgttgagccaatgtctgaaaaattttcggttgaaaacccgaaaaaaatttccctatttttttgccaagtgcaatggtggaaatggcaaggccaaagcaaatgtagccgatcaccagcggcagatagagagcacttaaattttaggaaattttttaaaatcattttttggccaaatgaattggccattaaaaatggacagggggtgatcagggaaattgatcattggtttctgatcaattttattcaaatattttaaatgataaaaaactttttaatttttaaactttaattattttcatcataaaatttgaaaaaattgttagaaaattttttttttaatttgttcaactcactccgtaggaattaatttgccgtattcaatggcagttaaacagaggaaggcgaagtaaatgccatttgggaagtccaccgaatcgtccagccaatcgatgagcattgcgcccaaaagctgcaaaaattgggggaacaagttgagggtgaccaatttggaccaattaagaagtgat

SEQ ID NO: 26937 - DNA, 896 bp, Heterodera glycines
  unsure (1)..(896): unsure at all n locations
aaaagcatnttcggatttaataaaacaaacgaaacttaattcgaaggtttcttacgcaattgccatttccaaacctttgtccatcacagtcatttcttatgggaccagcccactcactgagcaggaactgctccaaatcgtcaacgacaacttcgacctgcgcccaggcgtcatcatcgagtgcgccttttgcccttcgcttcccttttcctttcctctcaatttgcccattttcagggaactcggcttgaagcgcgccatttattcccgaaccgcggctaatggacactttggacacgccgatttcccatgggaaaaagcgaaaccgctcgaaattcgtcctgagctgatggaaaaactgatcgcctatagaaagtctgaacacattccgaatggctgcttcaaagggacgcacattcacgcgcaccactgaacaacgaattgttaaacgaaggaatggaccagtgacttatccgggggattgagcatttgtgtggggccttaaattcaaattatttaattgattttataaaacattttcgaaacttaaccctggataagtctctgaaaattggacgataatatactaccataaaggccccctccacttcggttttgtattaattcgatgcgtttgcacttttccaccgctttatgcattttgttttgtttttaccaaataattcacataatacaatgttttcccacaattcgccgtttgttattgttgtccgttttttcatagttttctgctgccttttgttgtcatttattattttttcatctttacaataaaaatgtcatttcattttcgttaattgctgctattgtaactaggtaatctcccggacgaatgatttactagtaatgacgagaatcttttccttaagcagtcc

SEQ ID NO: 26938 - DNA, 886 bp, Heterodera glycines
  unsure (1)..(886): unsure at all n locations
aaataatagaatgctaattttataccatatttcctcggcgcgttcttgggcaatttgttgacactttcatgccaacaatgccatccaattttttagagcttaatattattttttaatttaaattagcttattccgaatcatttcaatttggtcgaatcccaacccttgatatctttttatgggtagtttgattttgtcggaaagggatccatattatggttcaaaatcctcttattccttgctttctttacttgtacaattgtcgggcgcgtttccattttgtgtcaagctcatcatcaatttgaaatgatagaacccatttcccggactgattgtcatcataattaaaatgtgatgccgcaatttgttcattttcttcgaacaaaaatggaacgaccgtttcagacgaaggaaatttttccgtatttgtgtcttcttcagacattttcttcgttatagttttgtggtattattggcggatggcgtaagaaagctctcttcattagtttgagagagtcgcatatcacagttttataaaagctgagatttttggtattaaacaccgataaataacaatagaaaggtataattatgcggtgtactgctcggggtaattgtgccgtaggaatgggaagacagtttaggcccgaagcaagcagtacaatgcaatcattcagtagcaaaaaatggaaactggttaataatcaatttatagctaaatccggtttccgtgaattgctaaatttttccccattacaagacaattgatcattgcaaagaaaacaattttacatttttatgagcacgtcaaaatagccttagaattcactttccaacttanaaatcaatatcgatcacttctcgtaattcattgcttctgctgatc

SEQ ID NO: 26939 - DNA, 1745 bp, Heterodera glycines
cacttcctaaagaaccgataaagcgtaaaacggatatacaaaaaagaattgactcgagaacaaaaaaaaacaattaagaattcttggcctaaaatagaacgccaagaaacatttttaattccattcaaatataagcacaaaagacagtggtaattttctctggattgaaagtgtgattgatgtctgagtttacagcatgtaaaaaagggcagcagaaacgaaagatacaaagcgcacatttacgagtaccaaatcaaatcagtgagcggaaaaaagaatggtgtcatatttcgttcctatttcttccaaaagtcgagcaaagtcattgtcctcctcttcttagcagtttgctggctcggctgattccttctcgtcccagtcggtgtttcagcagcaatttttttggcactttggttgggcaattcgatggcaaagtccgtgcataaaatttgacgcattggctgtcgagttggaagggtgcccaaagtgatcagtcgttgtggggaaatgttgtcggtttttggctttgtcgtaatcatcgggatcaatcggttcagcagagaatgccttttaaggaatgagaaattagctgtttactaaatgtaaatgcagatgaaagtgccaacctagcaggagttttatgtgccgtacataatgtaaagcgatcggctaacagaagtggtctgatcagttctgtgtcggctagttcaaacgattcgtcgatgaggaaaaaatcgaacagatttgaggaagaaagaaaatcatttgaaggaactgacgccaaagggcaggccaccaaaaggggctgaaaagagaaaatatacaaaaagaaaaagattaaaaaatagttatacataaaaaattaattgttaaataaacaccttttgctgtgtgagctgtttgacctgacaataaaatgccttggctcctccgtcagtgtccactttggaggcgaactttgccattttggcttccaatagcaaatgctgaaggtctggccgaactgcctggcgtctgccgatgcgaagaagatgggcatcaaggacagacttaatggaacttagaaattggtttgcacagcagtgcgatagtgccgattttttttaaatttccgaaattgcctccgaaccccttatacgacaaatatgaaaaaaatccacaattttacagggtcagaattgagaagttggagcatttcatcaacggcggcattgctgttggaacagaacaacacggacttgttcagacggagtaatgttcgacaaagcacgagaaggaaagcagaaatttctttaaattaagaaaaggatgtaaaagaaatgccaaaaactcccaccttttctgtcacgtcccattgcaatggcatagtcaggtgtgttcagcactcgttcaacatgctcgctcaatggctcgccttccaaaaacggcatttccgatttatcagcaactttttgttcgccctcatccatcaataattcgtcatcaatttgttgtttctgttgtgccggtgtttccctgtcgatttctgttgttgtcagtgttgcggatgacgaagaacattcagcaagggaatgtgccgattttggcaccgaagagtggccaagggtcaaaaccgagcgtaacctttgcctaaataaaaaatgttttgatgagaatgaacatgattaattgaaaattgattaatcaaattacgcccgttcgtcgttttcaagcagtgcagcaacggagccaagacggtaggcaaa

SEQ ID NO: 26940 - DNA, 933 bp, Heterodera glycines
ccaaaaaaaagaagagattattataaatttctaaaaagtattctaattgatgggtcatcattttgcccaaattacttttttgccgtcaaatgccagcccataaatagaggggagattcagcgcaaaagatcaaatgttcattcattcattcatttacatgcgaagatgaattttatttccaattttcatattttttttatttaaaaattttaatttgtagccagtccaattaataccttattaattcgaaaaatgtcttcaaattttatcggttcgccaaattgctttttccgtccaacagctgatcagggtaagagaaataattaaaaaaagaattacgaaaaaaggaaaattattttatctgttttaaataaaataaaataaaaatttatcaccattagcagcagcagcagaagaagtggacaagtatgaagtgttcagttggcacggagatttgagcgaccaattggcagcacaatttttggtcagtgatcagcagctgttgaaggtgggacattttcagaacggacaaatgagcaaagtgggggggggggacaaatgagcacagatgggggggggggagggggagagaggccggacggatcagtcacggacaaagggccgaccaattccgagagcaatcaagagacattttgccaaaaatcagacaattaatgagtgaaggaaattggaaattatttagtggactgaaaaactttttttatttaaggaatgccgagaaaaacttgccagtgccgaattgagagaaacgaaattgctgtgcaaaaacggggaattgaatgcagagaatgtaagaaaaattaattattaaaaaaaatttaaaaaatgacgaaataactgaaagcgaacgcgcataaaaaagaaactttccaaattttgaagaaaattcaaaaggcgcttaaagcaaagttg

SEQ ID NO: 26941 - DNA, 1220 bp, Heterodera glycines
ttaaacaaaaatatgtaaagtaaagatcaaaaatgttattttcgttttcacatatttattaattatatttggtgttttgccaaaaagccaatttgtaagaatgttcttttttgtgagatttttccttttttggagtactgaccacatttttgtgttatttagcaaaatttcatgtaaaatgagcttttttgtgactttttgaaaaaaaacctgacgataatcattttttgtgcaaaatttttcaaaaattacaagattaaaaaattgaacaaaaactgcacaattttgcaggttagacaaaaccttaacaaattcaatttcactcttttgaattgcttcttattcttaaaatgccatttcaacattcaattcaattaacagtctcatctctcttggcatgttttatcactcattttcacattttcttccttttgtccttcttttcttttcccttctcatcagaggtgcgttcttaaaatgataaggtgcaaataatcgcaaaattaaaaggaaataatttgcagcaggtatatcatcattagcatcacgaaaaatgatagcacaaacttcattcgatttcggtatattatagcgccttaaatctgttccttctcttacatcaaataacattgtaatgtcaggaatttcacagtcagtattttttgaaatttctactgctttttcaaatacttctttcatcattttatatgactgggaatgaaagtttcgttaattggtctttgtaggcacttaatcgataattaatcgcttcatcagtatctataaaataaagctgtccattcgtcggtagttcttcttcatttggcctagcaacactattatatgaatgataaatgctaccttgtattttgaaaattggcacatttttatcaggaaatttaaatcgcatacatcccaaagacgcacatgaaaaagaggaatttaaatatcttaatttctttttgaaatcattgtgtaactctccaatttgtgtgtaattattttggtctatttcaggttgaaataaaacccgcaaatccattgggtattcttgtatcatttcttctaaattactgtttttaccatagttgcaacagtcataaaattcttgggttcctttgattttgttgttttcttcctgaaaatgaatagctgggcaatgaatgcatttaacatcaaattcaccaagatgataactgctcaaatcatttactcgaaat

SEQ ID NO: 26942 - DNA, 1163 bp, Heterodera glycines
  unsure (1)..(1163): unsure at all n locations
tgtgcaaaatttcgaaaaagtatttctatttaaatttaaaaatcagaaagcaattcaagaattttttatttttaaatgcatttttaccacatgaattatgataaatttttgcgtttcgaattcattntggaattaagaaaaataaaaattgataatcatttgatcatttttagcgcactttaagcaccgccgttaggcagcgcagttccaaaatttattccatgccacagatattatgggcaggacacgccaagtacctcaaacttgggtaattaaaccgaagaaagaagtgcagtggggaagaatgacgcctaaaatgaaggaaatattcgatgctgtgcgaactctttgtgacccctctctgactctccaatgcagcagttgaccatttttaccactatttttctctcactcatcgtctgctcgtctctcctttattataagctattttcctaagccaacaacgcccttttctccctcttttctgttagtcatttctcattggtgttgacgatccaacattcagtgtacaaatttgttaaacctctcaacattttaaatcaaaatcctaataaaaatttcgttgaatttcttcgcctcttatttgtgcaaaattttcgaaaaagtaattttctatttaaaattaaaaaattcagaagcaaattcaagaatttttttatttttaaatgcattttttaccacatgaattatgattaaatttttgcgtttcgaattcattttggaattaagaaaaataaaaattgataatcatttgatcatttttagcgcactttaagcaccgccgttaggcagcgcagttccaaaatttattccatgccacagatattatgggcaggacacgccaagtacctcaaacttgggtaattaaaccgaagaaagaagtgcagtggggaagaatgacgcccaaaatgaaggaaatattcgatgctgtgcgaactctttgtgacccctctctgactctgccaaatgcacagttgtccatttttaccactatttttctatcactcatcgtctgctcgtctctccctttatataagctatttttccaaagcccacaacgcccctttctccctcctttccgttaggcatttcctcattggcggtgacgatccaacatttagggtacaaatttgtttaacctc

SEQ ID NO: 26943 - DNA, 1427 bp, Heterodera glycines
  unsure (1)..(1427): unsure at all n locations
cagatcgactcgtacatgatggacctgaagcggagcggggacgcgctgggcgacgccaaacgccagctcgaaacactccaattcaaaatatgactcaatgaccaaccaacntgttggagaagcagcaggagttgtccctgctccgtgtgcagaaccactcgttgggcgaacagttggcgctgtcccaaagccgtgaacagcaggcgaggaaggaactggaaattttgcgcgccgcgcgctacaacaacgaacgccatggcactcacactgcaggaggtggagacggtgctgaagcgggtggaggcggagaaggcacacgcgtcggaaaggtggggctgatcaactattgtttcttaaaatttatatgcattttctattaaaaaacgccctcatcgacaggggcttgagttgagacacttcattcctaactgtctctaagtaacagtagttaatgcaaaagaatttgtgtaaaaaatgctttaattgccaaattaggcaatttttaataattcattagcctcacaacgctttatgtcggcttcatttaatagttttttaagtcaactccaatccgcaattctcgagcgtgacaatttgcgtcaattgctcgacaaccttcatgatcagaatgcacagttggtgaacggtcttaaggtgagccaagaaagacaacacgtttttgcccaatcattacaaatttccattttgaattttgcatttcttttccaggccaatctcagccaggcgagtggcgaccgtgacaaggcactcgccgaggtcaaatcgttgcagagcaacatcaacgcgttggacaatgtctaccaacggctaaaggctgaccatgagaaattgcgtgaggagatggaacagatccaatccactgataccaacgtggaggcgtgcaagaaggagattcaggtgggtaatggaacgcaaactttgcccttttatgtctatttttttctataaattcaaaattttctttaaactttatggaaaaatacttttagaaaagctttccgtgtcattaatacaattatttttgcacagaaattgcgcaacacggtcgcttaccaagagaaacaaattgcggaatgggaacaaaagtgtgaggagctcaaccaaaccattgagcgcaaggacaaacaaatggaggaaatttgtcgccttggagccgacatggaaagcagcattgaggtgaaactaaaaaaaccaattaccaaacggatttaccgttaaagaattataagacaatgcataaattggggggcaatcctgcagtttactggtcccgttttttttttttttgtaaaattctgggaaaacttttctagggctattttagggtactgagcacgaatccgaccttatttttgacaaattctgaaccccgaacccggaatcgaacatttttcaaacaaaaaatt

SEQ ID NO: 26944 - DNA, 1829 bp, Heterodera glycines
aaataaaaacaggtaatgggaaaaaaatgaaaaaatgtgccaaagtcaaagaaaagaataattaagaaaagttaaacaaacctcaaggaaaaacacttaaaaaatgcaaataaattaataattatacatgaatagagaaatggaaaaccaagagtacaaaatcatcccgatttgaaaattaaggaaaattaaaaacaacaagcaaaaaaagtctgtatggcgtatgcatttttttctttttgatcattcaatcgtgctttttttttttttgcgcaggccaagcagttctgtgttgagtgcgagcatccggttgaccggcgtacgcacccgctgggctgccgcgctgtgtgtggcctgtgcatgcgctacgacgagctgcgcttctcatgccggcgccagggcggcgacggcagcagtggcacgttctgccaacagtgccgcttcgtgttcccgaacgcggactgctttgaggcgcaccgccggcgcgtggatgttgcgccggcaccgcctccgggcgtcgccgccgccgctgctgtgcctcactgtggtgaggaagcaacgggtggagacggtgacgacgcggtttctttagctgctgctgttggcgccgctgtcgcgccagcgtttgcggaccgccgtcgcgggcggccccaccgttcaatgtgtgaggagcggcgcctgtgtgagtggtgcaatgtggttgtgtgggcgagaagcggtccgcacgtgtgtcgccgccgtccgcagcagcaacagcagcaggaggatcgcgcagttctgcagcagcaacaacagcagaaccaccacaatcagcagccggcaccgccaaagtgtgagaagtgcggcggtccacacgacccggaacgaacgccgcacttcatccagcccaagcaatacgcgcgccagtgccagtggcgacgcggtgcggcacgtggcgcccacgacaacgctgacgacggagcggttgctgatgctgctgatgctgcagccgctgttgatgacgatgacgatgatgatgtcagtgaagaggaaggggcggaagctggtgccgcgcgtggtggtgttggagatggcgctcgcggacaccttcggaagccaaagccggtgcgcttcatcttttgggatgttgaatgcgcacaggagcgcgtgggagagcagcaggagcagctggaggacggtaatgaattcgtttttaaacgatgatgattatgcggctttgcttacgcagacgaggcagaggcggcacacggcgctggcgacgaggcgggcgcaatggatgcagttcaacagcagcagcagcagttgcccgaactgttgaagcacgtgccggtgctggtgtgcgccgaggtgatctgcgagcgctgcatcgcctacggggtggacattgagcgtgagccgttgcgccgcgcgccccagtgccagtgcggtgtcccgtggcgtggtgcgaaccggcgccggtggtgctctcgcatcggcgaggagctgtttgacgacgacgacaccggcggaccagcgaccgcacaacaacaacaacaacaacaaatgccaccggatggattgaacccgcggcgactgcgcttcttctgcgacggcgagccgggcaccggacgtggcgcaatggcccaatttgtggactttttgctccacaccggccccaaagggacgcgcaccgtgatgttggcgcacaacggggtaagagcagcgagggggtgggatggcaaccgattggtagtgaaaaaataacattttttcagggtcgttacgacgttcacctgctgttggaggagttgcagcggcggggcgagcggccaaagaaggcggtccagcat

SEQ ID NO: 26945 - DNA, 1071 bp, Heterodera glycines
attttgtcaaataaatgagtcgagtgtccgttgtctccccccaatcgtcgcttttatcccaccgggcttcatgcgaatttccacttgctgcggttccaattggatcactgtcactccgtccgctcttctgctgcccaatggcaaattctttaaaaaagcaaaaatctggttgtttttttgttgataagattctttccatcccattattttcaaccgtttttaatgaccattaattaatcggtcagtgcaattccttctgcccttcgtcacactcacgtgttgcggcgccactttgatctctgtgcttggcgagtacagctgcgtgacagcgcaccgttcgttctccgcaaatgcccatttggcatcgcatctttgggtgccgttgaagcgctgacgagaagcgggcaaattaattaattaattgagccagatgaaaatattaggagggtgtcaatggtcaaatacaacggagtgggcggagacaccgaccaaatcggaacaccacgcgcattcgacgctggcggaaacgcacgcgccgcaacttttggacgcttccgccgaaagacacttttgccgggattcgtcctgtgcaagggcaaattctgaagcattttacaattatcatgaagaaaggagaagcaaatgacctgctgaaaggcaaagggaaaggagaaggaaaaaggcggcgactgagaaaattggggggcaaacggctgacaaagggaaagtgccatctctgccgaagtgccgcctcctctcccattgctttgtcggtgccgcaacgtcccgctccatttggggatcattagcagtggcagaggttggcattattggaagaccctccgaacaaaggtccatttgctgacaaattatcaataggccaaatgattgaaaattgagttttgagggagtgcattaaaatagaaagttcaatgggggagaaagtgttgaaacggacggaaaatgcagtcaattagggcaaaatgtgcaagaaaatggaaaaggacggccgaagggggggggggggggagacgaagggaatgtgtcggaacgatgtgaaagaatcaacgt

SEQ ID NO: 26946 - DNA, 959 bp, Heterodera glycines
  unsure (1)..(959): unsure at all n locations
atattctttcagaatataatattacaaaatttttatcttaagtataaaaagagttatctcaaaaagtcttatgtcagaattttttgtacagaacttttttgaaattcaattaaattttctgaaattttaaaggtaaatagagaattcttagagctatcgaatatataaattaatttggctcaattgcattttatagatttaaagcggcttttcctttttttatagagtgaaaagaaagggaaagcaattgagcagtgatggcgcagtggttatacttgtggctttactttttccccaaaaagttcgaatcccacgattttaatttaatttttttttgtttccaattaaatattttttatcagatcattatcaaaatacattgttttgatcaaattatttttttaaatttttgctaaagaaattaattcattttttgtacgaaaaatgtatgcaaacaaaaatgacctagttcgctcatcagcatggggaaagtgctttcgggtggaccttttagatcataattcagaacaaatacctcaagaatttccccccccccctccccaaaaaatgccaattcgaagatgggctttaaaaataaacaattcagcagaaaataaaattccaaatttcaaagccggcaaacgctggttaaaaaacttcaaatcatccaggaggattgtttctcgaaaggtttttgaaataatttaacaatttaaattgggccaattaagatcacaaaattttgaattgtgctgaatccgtcatggcaagatgtgcttggtgtgataactttctctgttttattaatttttaccaggattatcatatatgccaaactctttagcaaaaattnttacttattaatcctgtagatacgagtcaaaaagtgcgacatttggtcattttttggacaaaatcagttaagaaattgacaaattttcaaaaaaaaaaaaattccg

SEQ ID NO: 26947 - DNA, 1503 bp, Heterodera glycines
ctaataagggaacatcgcgaactgtgagtgtccaaatcgctttaaaaacacttttatcgtgtagagcatagttgatttgctattgtgaattttcggcttttttggctctggcgccaaaatgatcagaaaaaatcgatgaaatgaaaaaaccaacaaaaatttgttaatttgattaattttttcctcttcaccgcttgccttgggttcggatgcgctcgacagatgatgaatttttttgaatttttttcaaactattattccactagccattttattcagttattttagctaaaaatatgtacaaagagtggtcaaaatatgtacataaataaaatgacctaaataggattagaatcacataaaaaggatttcacattctcctgaaacaaaaatagaaattttaatttaattagttagaacaattaaaaatttataaagaattaaaatctaaattaagcagaaaagcaaaataatatatacaattagtattaaaaatccaaattaatcctggcattaacgatcataatttataaagcaaaattaaataaaaaattttgatcaaagcaattacaaattaattctaacaattgaatattaaataatttagtgattaaatataaaaatgtgccacgccaccaatcatttatatgaaaattatataaataaattgaaaagatttacttgaacgaaattcgcacaacaaaattttactgaaataaaaagtttaaattgaattttctcataaaaattcaaaaaaatcaatttatttttcaattgacaatttttaaaagtaaaataattatacaaagaaagtaaaaaaattcgaaacgaaataattaagaccaaggctctcaagttttaaacagagttggaagatgaattctaaaggaaatgaactggcttacgttactcaaaaaaccatcaaaataaaaaattttttgaaataaatttgctcaaaagagtcgtacaaaacagaagaggattgttgtcaggagcttttaataatgttgttgcactgcacacagcaaaagacaacagcccaaagcaaacacaaaacaatacagcccaatgccgaagataattatttatttcaaataaattaaggcgaagacaatcaataaaaactgacgacagcataaactaacaactaacacttcacaaaaatcacaaacaaaaatgaaacaaattaaataacaaaacgccaaatatattttaaaatcacaatattagcacatcctcgccctctaagaagcgatgtcctcagcgctttgggctcatcggtagtgcattcggcgttgaaaggggcggcaagggtgtcagcagtggatcggttcggcatgtaatcgcgttgcaaggtcagacctgtaaaaacaacggacaaaacgggtctccgacttttcatctggacttataaattcatcagcggtagcttcttgcgcacacctgcgatgtccatttggaaaattcaggcttttacccattatcaacaaattttcatgattg

SEQ ID NO: 26948 - DNA, 963 bp, Heterodera glycines
aaagaatgtgtttttcgtgcatttctcgatcgagttaaagccgcagaaaaaaaaactaagaatcccatccctattgattacaaatgtctaaattaatattttttagatttttaaattgatcacttagttatataaaagtgataaaaaattatttttatttatttagatattctccttttttcaattgaaagatgatgatgcttcgtgttttttaaaatattttaaggtattattcaagaatgttgttttttcttatttttcattttattttaaattgtcattttgctttattaattaaagaattttatggtccaatataagaattaaagaatcatttattttaaattatagactctcatcttaatgatattaatatattttctgttacattcaattattctttttcttttaatgaaaatttattaaatgtgttgcaatcaaaaattaagaaatataattatttatttatgtttatttaaattatttattttttatttattgtcaatttatttaactaaatctacatttatattatcttataaaaaatcaaaaataaatttatatcaaatactataaatttaatggttggttcacagtatacaaaaatgagaaattaagtatttttatccaatagtaaaaaaaagtttaaaattaaataaataattacgcataaggaaaaaggaaacaatattttttataagagatacaaaactcgaaatagtattttataaagaattaaaagaaatgatttaattgacaaaaattatttagaaaaaatcatttcattcgacaaaataataagcaaagcaatcaatttatacataatttcccaatttacacaaaaatagaaagttttgaattaattggttaaaattaaatgtcctctccccccccccccccccggcgtccctttcctccccaaacaccacagccacaccaattcattctcttctaactttccaa

SEQ ID NO: 26949 - DNA, 986 bp, Heterodera glycines
aaataataaaaattaaacgaaaatccaatcgccaataaatagttaatttttgagaaataattaaaaaaacaagaaaatagggaatacattaggcatcaaccagacttcatttttgcaatttcgtttggttctaccaaagataatcgctaaaaattttaaagaaaattgttttttggatttttattttctaaaatgttgaataaaaatgagtggtaaagtatatggtgtttaaacttttaagtttattttaaaatgtttttcaatttccccaattaaaacccacataaaatgggatttctttgatccgtagccatgtctccaattggatcgccgccggggataaacttggggccgaatcggtgtgcggaaattgcaccaaatacacaacattgggcttccaattttgtaccaaaacttctgaaaattaaaaattcaaattgaaaagatgagcaaattttgccataaaatttaatttggccattgggaaaaataaaaaaaaaaattgtttaaatttgtgccacctttgtcaatgtactgctcgtccaactggtcaattgtgagtggacgctgcttgaacagtttttcaacgccatttttcattccaatcataagagtcactaccattttaccgaatctgttgtgatggacgaaatgaagtaattactgtacttatcagtgatcagggattaaaactaactctgattttaattaattcaattcatttcattaaattgatcttttccttattgatgtcgcaaattaatcttaaactacaactaatatgatattcaaacccttatataaccaacctatcaaataatagtcctaaagttatattgcgtcatttctttctaattattattttttaatgagtaaccctttttgatcaaaatgatccctaatctggcggaagactaattagcccacataaattttacaaaagaactgattcaatcacaatgtaatatcttatttgatattaatga

SEQ ID NO: 26950 - DNA, 1337 bp, Heterodera glycines
  unsure (1)..(1337): unsure at all n locations
taagaaaatgttccattttcctaaagtacttggtaaacctcgaccgacttgcataaataattcaatacaattattcgtttactgaaatatcttataccacttccgccgcaagacatttagccgaaaactcggcacttctttgctctcggtggaagtgatatgactaaagattaaatggccaattataaagaaagataaaccaactatttgtgtgtntagctctctgttaattatgacacgttgtctttaccttagtttgggttaattgccatgagtcatgccattttgaggccagcattcttttatgaacctccgacaccttttaaaaataatatgcattcactaataatgcattcttcaattcaaatattagtatatttgatgcgttctgccaaagcaatttaagaaaatgttccatttcctaaagtaactggtaaacctcgacagacttgcataaataatttcattacaattattcgtttacttgaatatcttataccactttccgcgcaagacattttaccgaaaactcggcacttctttgctctcggttggagtgatattgactaagattaaatggccaattataaagaaagataaaccaactatttgtgtgtttagctctctgttaattatgacacgttgtctttaacttagtttgggttaattgccatgagtcatgccattttgaggccagcattcttttatgaacctccgacaccttttaaaaataatatgcattcactaataattcattcttcaattcaaatattagtatatttgatgcgttctgccaaagcaatttaagaaaatgttccatttcctaaagtaactggtaaacctcgaccgacttgcataaataatttcattacaattattcgtttacttgaatatcttataccactttccgcgcaagacattttgccgaaaactcggcacttctttgctctcggttggagtgatattgactaagattaaatggccaattataaagaaagataaaccaactatttgtgtgtttagctctctgttaattatgacacgttgtctttaacttagtttgggttaattgccatgagtcatgccattttgaggccagcattcttttatgaacctccgacaccttttaaaaataatatgcattcactaataatgcattcttcaattcaaatattagtatattttgatgcgttctgccaaagcaatttaagaaaatgttccatttcctaaagtaactggtaaacctcgacagacttgcataaataatttcattaccattattcgtttacttgaatatcttatacaactttccgcgcaagaacattttaccgaaaact

SEQ ID NO: 26951 - DNA, 424 bp, Heterodera glycines
gaaaaatcatccattttttaaattaagatctttaattttaaattaaaaaatattgtcatttgttaatttaaatattgtcatttgttaatttttcttaaaaaatccgtaaaaatgccaaaaatttccacaggtctccaaaattccaattaaattttcaaagtttaacgtaaagttggccattttgtgacttttatttttttcaaaaaagaattatcaaaaattttttttaattcctaaaatattgtgaaaaaattagattagaaattgttgtctacgtatttttccttcggtgcatatctgcagcgccggactctaaaatccttattttcctgaaaattttgctcaaaatcgctaaaaaattttggtttttttggacaaaatctgttaacaaatcgcatccaaaattacaaaaaatttttcccgg

SEQ ID NO: 26952 - DNA, 1663 bp, Heterodera glycines
  unsure (1)..(1663): unsure at all n locations
taatttctaataaataatntattatcaaaagccttttctttagaaaattagtgatttattttcatgttttgtatattntaagttaataattttctntaaacctaataatagtctgttaataattaataaattattataagtttgttatgtttaaatttattcatcatctaaatttactgattttaaaataataattcatacggtctttatcttaagtaattcatgagatgctttgggcttaatttttgtttttttccttgaaaattttacggtttgttccagcattaaaattttaaaaaatgggaaatttttattttgacttagaattgaaatgaaaattttcaattacaaatattacattactaagttttccatgatgaaaataataaaaaaatattaatcaacctgtgtaacaaactgcaaagtttttttttgtcttgtaattcaaattgtttagttaatttatttttaaatttaattaatattttgactattagctttatcaattattttatttataaaatcaaacaattttaaccctttttaatattttttataaatgccaagtttgtacaattgttgttataatctttttatgaggccaatctatttaatcccagtctactaataacattttcctctttaccttttgctttaggatttttcgcttcgtgaatcattttattttgtttcctttttctaattttcgcgattcacttttagcttaattaaattaagtttttactttttgaacgcattttttaattcgagtaaaaggcttacttaattgtaattattattatttgcttgaattttactgacttcactactaaaaagttattgctcttttttaaattcttcaataattcatagcttataaattaaccattaatgctcatgtaaactcagactgaaaacaaatagtgatgattctggtatttttaaattgaaaagtttagtatcaaaaaatttttgaataaatgttttttaaatttaattaacataaatataattcaattttaattaataaatttactattttaagtttggttttttcacttactccaattttgcaataacattgatgctttttctgtgtataaatcatttataaacaatttttcaatcagtaaatttacaaaaaatgaaatctttttaaattaaaaaaaacaataaattaataatttttatgactgtactttttttttcaatttgcgatattttttaacttttttaaatttattttctctatattaattttttaaaaaaaaaagttatataccaaagaacaacaagacactttcaagtagtgaaacttcgtttaaatttttattttacaaaaatataatattattaagtttaatataaatcattctttaaaggttttttccaaaaagtatttgatcatttattaacttttattcattaattgacaatagttattacaaaataagatttaagatttttttaaatatcttggaaaagcaagctttttaaaaatatccttttcttttagtcagcgttattcaattataaatatttattattaaatatttttcatcttttatgcttatttttttataaataaacattcttttggaaactcaaagtttttctctaaaatatcacaatttataatgtcgctatttttttattcttttaa

SEQ ID NO: 26953 - DNA, 214 bp, Heterodera glycines
aaaaatgccaataaacaagaagagatgatgaaaatgccaagaatgttgtgccataagaaaatgccaataaacaagaagagatgatgaaaatgccaagaatgttgtgccataaagagatgccaatagaagggtgcgaggccgcgaagcggccgagccatagtcaattttatcattcataattctacattacaaccgtactgcctagcggttgcga

SEQ ID NO: 26954 - DNA, 652 bp, Heterodera glycines
aaaagcttaaaaaatttaaatatagtgccgtccctaataataaaaaatattaagcttattaattaaactcttatatgtacacggaaatatcaaccgactaatgagaaacaatggcgatttggatgggctaccaaaggttcattaggagagaacaaaaaaaaacgattgtgtgatcgacttaagattttgtaatagcattcacaatcgcatcggttcgattattacttcagaatgatatcgattcattttgggagtaaaaatctgccaaaagtattcctctctattttgtctacacattacaatatttatttgatatgcagccacaaaaaaatcaaatgcactcatccgtcagacccaatattaacagtggttttgtattttttttgttggtcattccttccgcttcccctccccctccccgctctctccctcctcgtttcccccttttcaatcatatccaaattaagtttttttatggagtgaattgattgcccacttttttcctttacattgacccttttaacacttttatacaccttattcttcattcttcctctttctgctgctgcttcgtccatttgttgatgataaccaccgcttccaacagcaaaggtcgtccctcgcccccactcccccctctctctctctccct

SEQ ID NO: 26955 - DNA, 1339 bp, Heterodera glycines
acgcgtaaaatgtcattggacgcgtaaaatggtatgggacgcgtaaaatgtcatgggacgggtaaagtgttgttgggacgcgtaaaatgtcatgggacgcgtaaagtgtcatgggacgcgtaaaatgttatgggacgcgtaaaatgtcatgggacgcgtaaaatgttatgggacgcgtaaaatgttatgggacgcgtaaagtgtcatgggacgcgtaaagtgtcatgggacgcgtaaaaccgactagaaccaattttaattattttttccgtttgacgcacatccgaccaaactgacaaattattgtagaagatactagccgcaagaaataaaaaagttaagaaatttgtccgaattcgggttcgggattcgaaacatggatgttttgcacaaatccgaccaatttcagtcctaaacaggtactcacgcgaaaatggccacgcgaaaacgaccccgaccggtttttggggtctattccttcaaaataaaaacctagaaaataggccctaataactcgaaaagtagcttaacaacagccaaaaaaaatatgtttttcgtgcgtttcaggccacgctgagctcaggaaaaaatatgtaaaaacctaaaaacatagccctatttataacacatgaacaaaaagatacaacaaacttcatcaatccctcccttttcatgactataaaaggtaaaagtgaaggatactgacgggatggaaaatgtatataaattatataccaatcgactccgctcggtctctaatgaaagaatccgaaagaattttttggcggtaaccaatcgctgaagagttacagacccgggactgaaatgacaaaatggctttgggactgaaccgtccaaacccttaaacgcatggaattgcgacaaaatgcatataaatcgattccgcacggtctgctaataaagaattcgaaagaatttttggataaaaaagaaattgacaaaagttacgggtccttaaaaatctcaaaaaatgacttaattcaaaaattaatttaggtgagccaaaaaaacgtaaaaggtttttgaacttcgcaaaattaaaatagtcctaaaattttgaatatatttttatgttttttatttataataagtagggatgcgatttttaggcaaatgcctaaaatttttgcgcacttaatacgcacagataagcacgaaaaaagccctttccgcttggtttggggtgtctacgatgacttttataatgcctaactttggctatttcggggtttttgtgcctaaagtgcctattttagggtttttgaaaaaatccttaacaaaaatgcaataaaaacaaaaaatacacccctaagaaatg

SEQ ID NO: 26956 - DNA, 1711 bp, Heterodera glycines
tataaaatacgatacaatgtgtacatatgtctgtgggggcatacaacaggacaattatacaatacaatattacaacaatacacgtgtttgggatatacattggattttcatgtcactaaacggcacaatttcgacatcgatatcactaagagccctccgatgaagacgatgatgcgtcggaagttttgtcctcagaagtagcgtccgccgaagtcgaacctcccgagccagatccagagcccgatgctgaggacgatgcagagccggagccgctttcggaagtctcagtggtcgcagtttcgtcggtcgtctccgtcgtttcctcggtcgtctcttccgtggtcgccgacttctcctctcctccgccggtctccgcggctccctctttctgcttctcctctgctgccgacccgccttcctctttcttctcctcctcagctttgtcgccactgtaaaagaaaagcaacattggttgaaaacaacaattccgccctttttgctcacccatcgtcctcctttggctgttcatctaccacttgttcagcaggcactgtcacgccttcaccagcaggtggagtctcctttctgaaaatggggcaaaaaccgttaatcctcttacaattgtagacaaatcaaatcggacttgtcgtcttctcccttctcgacatcgccatcagctgttcctttggcttcttcgtctccttcttcgtcgcttgccgcactctttggcttcatgaacaggaggtagatgaacgcgccgatgacgatgaccagcggaaccaacaaaatgaaggtgagcatattatatgcagcagttgcactttcgccgttcttctccgctgccagcgacacatcaagcgtacagagcagcagcaccagcgctgacgacacaaggcgaagcggaagaggtcggcgacggaaaggcgttgtgttgacgcttttcatcgttggtggtgtgaagaatttgttgcttgtcgaaggccgattctgcaaaaaaaaaaaaggaaaatgtgaaatgggaaaaaaataaaatctgaaaaaagaaaacttacaaaatattacagcggatgatacgctttgagaaaagggcacttgggagtagcgaatgtgaaagggaaaggaaaaagcatctgcttttatatccaatgactgacacagagaatttttcttccatcacggatttgaccgattgtatgggaggggggtataaaagggtggcaaatatcacattcaatcaatttctttaaacattaattttatttttccattatgtttttgctcggctccacagacgcgcagcggcgacggcaccgacaattctatcacgttgtcaaatcgcttaaattgtgttatttgccagcttcaaaacatgaagtcttagaatgacaccaaattaaaaatagcagaaaagattatctgaaaaactattaaaaacaaaatcagttaagcggaatttcaatccctgctgtgaattgatcaaataacatatagtgtttttaggctaaacacaaagcaaataagcaaattttaatactaatttttggcagaagcgtcaagccaagttaaaaacatgtttttcgtgcgtttcaggcctcctacagtccagaaaaaatatggatttctatattttttcgaacctttgaaaaatctcaggttatttaagcacaaggaaatttatacaaaattaaaataaagaaataaatgaggacaa

SEQ ID NO: 26957 - DNA, 1421 bp, Heterodera glycines
  unsure (1)..(1421): unsure at all n locations
aaaaaccntgttaaaaactagcccccttcaccgaaaatttgttaaaatctggttttttgatcccgactgcactgaaatatacgatttgctaattccctccccaaaattgttaagagagataatgacaagcgaaaatttatataaaaacgatgaagaatttatcaatcacttacatgaactccaatatcgaaatttggcatgatggaattagtaattataatatataatttagaaaattgtattggttaagcatattatttttaatgagcggcgaaaaggtcgattttgttatgcggcgcaaatggcacggcacacgagtaatccgattaccttgggaatttggaattgagtaaaattaagtgttggtcaggtcagattcatagtgaactgcccgaattctctaagattactggtcaaatgtctcactgcttaaattatttaaaagtttttcaagaaccttccaagaaaatagagactatttttcgatttccaaggacagcattgggctgggcctctgctgaattatgcaaacaaattatttgttatttacctcaacagattttccaatttggcaattttcatctggtgcttgcccatcaacggattggttgcactggcaacattttggccattttgttggagaaatattatatttaaggaccaaaatattgcaaaataatgcatcatttttattttaattttttaaatatatatttttgaatgaattgtgaatacccctaggcaaaaatgcaataacataatttattttcgcgattttacacgtaaaaatcaatacgtatcctatgcaggtttttccaaagcaatgaaaatatccaattggtttttcaattgggtgaattgttgagagaaaatatttttttaaattggcagaaaaagaaaatttatttgaaaataaataataatttaatcatttcttttaaaatagtaaacaacaagaaacattagccttgtagctgaagctccaatcgttttttgatttttgacttggttcgactgacccccacacagaataaaattattttcattatttttttaaatattcattaaagtaagtaaaagtaaaactgttttaaatttaattacaaaattcccaactcaacaaaaactaagaaacttattttttaaattgtatcctcaaactgagaagggagatcctagtagctggaaaagcggatgtggctttaggatgttaatttttctaagtgttttaaaataaaagagtccggcagtggcgataggcaccgccggaattgcatttttttgactttgaattttttaaaggattggcgtccggtggtgcccatagggcgaggtgaggccaggaaaattgaaaaaataaagctaatactccaattggggcttagaaagttcatcgacgaaaaatgagatggacgttttta

SEQ ID NO: 26958 - DNA, 1878 bp, Heterodera glycines
gagaaacgaaaattagagcgattgttggtcgtcgatatggcaattggcaatgcagagcaaagaattgtcgtaaagggacgggacatttttcgaaggtgtcctcattatgttgaccaacggccatagggtgtactaaaaggttctaaattgtcgaccaaacaaatttttgaattgacgtatctttgggcacgtaaatatggcacaatagatgatcttcagcaagaaaccggacacagtcggccaaccataatcgattggtttaacttttgtagagacgtttgtgctgaattttttatacgccagcccattgccattggaggcccaggtttttgtcgtcgtattttttctgtcgtaccttgtcttgaagtcgcttcgtcgagattgacgaaacgctggctgtcaaacggaagtatggcgttgggcgaattttagtgaagggcgaagtttggttatttggtggcgtggaacgcgactccaattgggaacgcgtcttcttggttcctgtggaatcgcggaccgcaaatcgtctgatcccacttatccagcaatacatccttccggggaccactattgtttcggatgaatggcgttcgtaccgtggaattccgaatttgccataaaattacactcattggaccgtaaatcattctcagaactttgtcaatcctgccaatcgtcaagcacacacacaaaatgtcgagtcattgtggaagaaattgaaaaagaatttcaaacagcattttggaaatactcgggaaacggctagacttggactcagcccacccgaaaaaatgacatgaatttgttataaaactgcttaatatgaatattattcacaaaaatgtatgaaaaagtgacgatatatagtgaaaatttttttttatcaacatttgaaatttttcaaaaaaacgtcatttttgagtgtaatatctcttaacagccgacaataattggtcaaacgcatcaaaaccattctttttgacctctctgcgccattgatactctaccaacgtgtcagcaaaccggaaacctgggacgcgccgttcgcggaaccaatcctttgcaggacgccactgagcctcaatacgttgtgtgtgcgtcccatcctcggctaaactttaaaatttatcaaattttacttgactttaaaaaaccaatgaaacggtgttcggggtccgagtggttgacaattttgtggagaaacccatcccttaaaaaaaattgacttcgcaaaagggagcatgcgaagacggagcaagtagtggggcgagaatcacggtctcatttcataatttcgagaaattccgatcaaaaaagcaataataaagtgatgattaaaaggctgatgaattgggaaaatgttggtgtctacgttgttaagtggtaaataattttgaaccatcgtgagaattcggcggtctgcttcgcgatatttctttgccttttgcggtggttcttgtccagttgaacacttcgcgaagtcatcatcggataacttttgatcctttcgcaaaaggtcaatgaaatgccaaatcgatggatgtgaacaggcaaatgcgcattgcaggcgtctgttcgcggcttctgaatggttattcgtccggtcatcgccttgcagtgttcgagtgtaaacactccaaatgtttgcgtcaaatcgcgggcgtattaggcttacatcatgcttaagacgacccgtgtagttcatgatgaacctaataaataattaaagaacaataaatagtaaacaatttctgagattgtcaatttaccagtcaaggacgggaggaagttcgtctggaagagccatgattgctcgctctgttcgtccgtacgcgaatacattttgtttgcgtctgggatgattaagtctgtgagcgt

SEQ ID NO: 26959 - DNA, 298 bp, Heterodera glycines
tataataacgctgcggacatctacatttttgaattgaaaaaaaattggtatttactctttctttttctctatattgaccatcatactcatactccccccaccctttctcctccttcgttttttttttttcctttccttctccaaccctctcctccctctcttgatagtttaaactgaaggcgggaaacgacaatctgatccccatcaagctagcttctgcaggtcctgctcgagcggccgcccggggatcgatccccgatctagtaacatatatgacgccggactcgacaggatcccc

SEQ ID NO: 26960 - DNA, 1243 bp, Heterodera glycines
  unsure (1)..(1243): unsure at all n locations
ccgtgacggcccaactgagcggttccgctttttttggggttgaccaatttcctggaaatgcgggggggcggagggggggggggggnggtggcgagagaaccaaaaacaatgatcaattggaatgggttttggtctctttttatggcgacgaatgaatgaaattttattgagttttaaaaaagatagggtcaaaatcattgagtctaaattttcatttagcaaataaaaataaaataataagttaattaaatattacaatcattgatacatttgtcacttcggctcaccacggggagaattcgttgcctttccgataattgaaatcgaaaatggagaaatgaaagggcgagttatagattatagtaaatgctttcgtcaattgtcaaattttcattaacaacaacacaaaacgacattaatcaaatggaaagaggggcaatgcgaagacggagcaaatggtgggacggacgcacgccgagcgagcacggatggttgagagcgcatagttaaggtcggcacgagcaggcgggatcgccattctccgttcccggtcaaatttggagaaaaaaacggaataacatgattcagttaaaaaatccaagtccaggccattttcggcaacctggatttttgccgccccctaaaaattcttattcttttaaaaaaattggctcaaaatcgtaaaattttgtcattttttgaacaaaatcgttaagaaatcgcattaaaaattacaaaaaattccccggcggcgcctatcggcaccgccggactctcttccctcacccatcccaaaaaaatttcggaaaaatgcgccgaaaaaaattgttaaaaatctgtttttttgattctgaatgtactgaaatttacaaattgcttatgttttccacaaaattgttaaaatcgattttggaaatatataaatttctcatttcaaagccggaattgctcagaaaaaattggcgttgataaatatgttgctaatgcttgattttgttgaataaaaaatgcaatttaggttttggaagcgcgttttaaaaaatatccttattttttaccctaaatcttatttttgaccagcgatgtacttattttgcgaaattttcaaggataaccctgaaacaccaagacattttcattatttgagagccaaaaaccgaaactctgaaagtacacccctaactgatccgataaaaatttataattaaaaatttaaataacatttttgcaaaaattaaaaatt

SEQ ID NO: 26961 - DNA, 2101 bp, Heterodera glycines
ttccactttttaatgagtcttttttggcatttagtgcctaattgaaatagcacaaaatgcacagaattgatgggcaaagagggaggagcaaattaattaattttttgaaaatgtatattttgagtaaattaatttctatttgagggcgaaacgtgcatcacgcagctgagatctgtctgccggtcgattaccattaccgcgctgtcccatcccgtgaaagtcaattttgtggatcaattgtacgcggataagttgtaataaaatgtaaacatttaattttataatttcataatttcttttggcattgtcggaattgccaattcaatcgaaagatttggcggaccgttcccgagtttggatgtgtttggtctcgaccgtgacgatccaaattatgtaagtttaacacctgtcgtgcagctgtgcagctatctaaactgatttaaaaattttcggcaagtatgccgcaatttttgtgtgccataattcacctcccccaaccatcatccattttgcagggtttttgtattaacgaatttcgttgttaatggtacatattttaggcgaaccgcgtgatgaaagaagccgccgcaattgtcgatgattgctgcgactctcagctgtcaactgcggctgatattcatgtgctttctgagtgtgagttcatttttttgtaaaatattaattgttttggtattaaaaaataagcatgttttcaaaaataaattaccgtacttactgaaatatgacccccgcgggggcagaggtgttcgaaaatttatggacgactctatttcattgaatacagaataataatactttttataaatgcaaaaattgaatattctatatttttatgtaataaaactctccctcaaagatgtgatcgggctcaaaatgcagttgagtggtttgagcaatggaagcacttaattgggctcaatgttgttgaccagaagtggaaggatgatgagtggaaggatgatggtgttgagaaaatgttcgaagtttttgaatttatttaaattgccaatttaaaggggctgccaaattctttgataaggaaaaacagtgattaaaaaaattttagattaattaatgcaaattcaattatgtttaaactcaaaattaaagaataaatctgaaaaacatagaatatttcgcagccgctcgcttaccctaaattttccattttatttttcaatatttttttatatcgccataacccaaacatatatttttgtcattttgtcattgtagcaatttagaataacaataacattttatgttaaattaaagtaaatgttgtcagtcaaatttaactcattgattatagtgaaaaaaatttaaaaaattcttaaattaaacattcacaaaaactttataaaaatattggtaatttaaattttggaacttaaaagaatgcaataagattctttttttttttaaattgatccatttttccatttgagaagcaaaagtgaaaagcatttgagttcaaaagattcgcgcttcaccgaatatttatggccattaaaaaaaataggacaaatcttggcagcacttatttgttaggaagagtagacagaactcaattgcccaactaaaacatttatcggaataattttaatttatttatttcattaaaaaatgtgaaaatttttaaaattattttacataaaaatatttaattttttgagcagcgataaacagatgcaatggcgaaaatgataagggtggggatccgtttttgatcgaaaggaaagttttttgtaatctttccatcaaatcacttctcctatttgggttttccccacaaaaataaaatgaaaaaaattccccccgaacttttgctggaaatgatcagatttattcgccgcaacaaaaaatgggcaaaatgccgcgtttcctttgcgtttgatcactttttgctctcttgccattatggtgcctgtggttgaagcaactgaaagaaatggggagaattgtttaatcatatatataaaatatattttaatacgataatttattttaattcgatttatcattttcatttttaaattaaaacaattttgatttattatgaaaagccatgtttgaattt

SEQ ID NO: 26962 - DNA, 770 bp, Heterodera glycines
ctccccaattcttctttccttttgtgaatttttccaattattctcaactatccacatatcattgatccatctccttttttttcgcccatccatccgcacaccccccaccctaccctctacacaaacagtctccgtaccagtcacccccttcgactgtgttgtgcacgacttcttccagccgcccccctcccaatataatcgatcgtacacttcacataacgaagttccgaaaatatctttctttgctctttctttttcgtttttcagttatcattttaataaataatacaatttatttcatttatgtaaaatttggtcaatttcaataaaaattcagattttttcttacaatagaaattttttgcctttttttcccctattttttacaattttattccgttttgcacaccggatcattttgaaacaaaatataatgttccaaattttcgtcaaaactctcaccgggaagaccatcacccttgaagtcgaggcgagtgacaccatcgagaatgtgaaagcgaagatccaggacaagcagggaattccgccggaccaacagcgcctcattttcgctggtacatccgcttgatatgccgggatattaaattttttcgcgtaatccttatttttagggaaacagctcgaggacgcacgcaccatggtcgactacaacatccagaatgagtcgacgcttcagcattgtctgaagcttttcgggggcgcaaggacgggcaaaacagcacactactcgcggagcgtaagtcatgata

SEQ ID NO: 26963 - DNA, 1221 bp, Heterodera glycines
  unsure (1)..(1221): unsure at all n locations
ccgcaaaaaaaggtaaaatttttgatgaaaatcattgaataattttttaaagcaaatatgtttttaaatagatcaaaaaatttttgagtcatcttttacttggttaagaatttaaaatttagcctattaaatgtttagaaaatttttattattttttatgttttttgaaaaatttccgatttccgaattccgaaaaagtttttgaaccaaaaatactaaattcgaaaatttggactttcgacttttattcgagttcgggtccggggttctgaattggctgaaattgataccggattcatgatcattgatctctaaaaagcaatttttctactgacgtattttgcgatagcaaaaagggcaggtggttagaaaaaagatttagtgaaaaacagaggctgttatggaaaaactgactaaaccaaaaataaagccttaaaaatgtctaattgtaaacacatgaaattcatacgggtcgaaccaaccgcaccccgttttgagcggtgtaaaaatcttgtgacaaacccgtgttgggacgaagtccgaatagggcaagtaattaaatttaattaaaaaataataatattttgtaaaaagttaatttttcatttttatatttaaaaatttggatacacttgttatctttttaatctagaaatttatttttaaaagaagttaaatatataaatatgttttaatgaacggtcattgtcatgtgtttacgacactcccattttattccgtaattttgtcaaatgacggttagtcttaaatgatcttggtatcaaaaaataccttaatcaaaatctcatttggcttatttcggcatttttttggaagaattctgttaaaccgggttttaaaccggttaaaacttaagccagtgtgcttaccgaagaaaaaagttttaggtataaaaatatataagtttttctatactgaattctctacaaaatgcatgaaccatgtcccaatcggttcagtattaaaagtctattcggtagagaattttgtcaactctgataggcccactcactttttcggaagttttcccagtttcaactaattttaggggtgatgaaggagtgatctgaccaagttagtgttaaaaacttttgattagctttaaaagttagctttcgcctcaaattagattcaaatagtggttgtaaatatatgactangattatggtaacaaaattaaaattttgagtgatttgggaa

SEQ ID NO: 26964 - DNA, 1108 bp, Heterodera glycines
caccgacaaagtctcatttgtaaactccaccatcacttggaaactctcatttgttagggccaattgagctgaaatttttacattttgtttttcacatcacacttaagtactggtctgatcatgacggcgtaagactcttctgatcagcatcgaaagtgttattagactaatttactaaatttatgtatatgttgtttttgaaaaaaagttattcttattttcaagtaaaattataaaaatttgggcaatttagtgaaaaaattcataaagaatttctttcttttacactgcaattttttgtgtgcttttaatatttatggacaagatatgattggtaaaaatttcagcttgattggcccatgtaaagttgagaaatttaagtgactttatctttggctgtgtataaataaaatttcaaacataaagaatatgtatgtatgcacaacccttattcaaagaatatttttattaataaatatttttaggggaacggatttagttgcttagatttcaaaacataacaaacattcattaaaaaaccgaaaaacctctcaaatatttctaaaattgaataagaaatgagcgattgttttcattaaaaatgctaaaatgttgccttgcaaattgactaaaataaattttcgaaatttataaattatacttagtgcattttctttagaaataaatattacattttgttaaactcaataaaaaaataaagctttttaaaaactggaaataatattttaattcttactgtttctcttttcacgtaaaccattttctgcttcggcatcttaacataaattaaaaaattaacattacttaaatttcctattttaaaatttcttatggttttagggctataaatttttagaaaacgtggaaataggcgtaaaataataaagttgtaaatcattgcttaaaaaaacaatttttaatcaaaatctcaaaatatgcaatccacattaaaactattggaaaatataaaacaaaaaatgcaaaatatggagaaatggtggtcatcttttccttcgaaaaaattctcaaaatttatttaataaacccactcaaagttaccatttttacaaaattataaaattacaaa

SEQ ID NO: 26965 - DNA, 1010 bp, Heterodera glycines
ctttatgaaagtttatatttgcaattatacatgcacttttgctccataattttataacgattatataatttagagctctaaatttcaagaaaaccgcataaagtaggccaatttttgacttttatgaaattcactgacgcaaaagtcgtacaaaaactaataaaacggagatttaattttgttccagaattttcgttctttgccctatttttaaggtttgtatttcaaaaaagttgctcataataaaggccatttgttttgctttatgaaagtttatatttgcaattatacatgcacttttgttccataattttataacgattatataattttagagctctaaatttcaagaaaaccgcataaagtaggccaatttttgacttttatgaaattcactaacgcaaaagtcgtacaaaaactaataaaacggagatttgattttgttccagaattttcgttctttgccctatttttaaggtttgtatttcaaaaaagttgctcataataaaggccatttcttttgcttatgaaagtttatatttgcaattatacatgcacttttgctccataattttataacgattatataattttagagctctaaatttcaagaaaaccgcataaagtaggccaatttttgacttttatgaaattcactaacgcaaaagtcgtacaaaaactaataaaacggagatttaattttgttccagaattttcgttctttgccctatttttaaggtttgtatttcaaaaaagttgctcataataaaggccatatcttttgctttatgaaagtttatatttgcaattatacatgcacttttgctccataattttataacgattatataatttagagctctaaatttcaagaaaaccgcataaagtaggccaatttttgacttttatgaaattcactaacgcaaaagtcgtacaaaaactaataaaacggagatttaattttgatcacgagaattttcgttctttgccctatttttaaggtttgtatt

SEQ ID NO: 26966 - DNA, 1057 bp, Heterodera glycines
  unsure (1)..(1057): unsure at all n locations
ttcaaacttaaatttcatttgtaaattccaacattcgttggccatccacaaaactttcgtcgttaaatgtttcgaaaaattggcactttcgtttttggcatttttctgctgctgctttttgcattgcctttggtcaggcaaagtccgccgcggctgagccaaatggaaagtacggtagcatttcgcattttagtgttttactgtaaattaatggtgatctgctggaaaaagacgaaaactataggttgcgaacgaatatacctgagccgtaacatgaatatctgagattcttacaacccactgttgccgagaggcgccttgggaataatctcccctaattaggctgatctcgcccccctcctcttggacaggcgtcgtccagcagcaaccgcccgcacctccgccgccgtctcagtcctcccaacagcggcacatttccgttgaggaagacaactccaacgaattggagcagtcacagcagcagaagcaccggaaaaaacaagggcgaacgcagcagcgcccctcttctgttggcgatgtccgtgccgccgtttgtcccttcggttggctgaacttccgggacgagcagtgcttttacgtagggttgcgtccccgaccccgcccccgacccccgacatttttggccattttcggggaaaaccccgaccccgaaccccgacgcttcataccccgacaaccccgaaccccgacccttaaccccgatcggggtcgggttaaatatacacccctaagaatggcattttcgtgggagaaaatgcaaaaaagttagacgaaatttgaatttttttaaccatttgccaaatttttattaaataaagaaaatttgctcaattttggacatttggaatgtggtgtagaggttagtgcattactttctgtcgtgagttcgataccgtttgacgttttcttctttaattattttctttgtgacaaattgtttttttaaattaaatactcatagaaatcgaccaatcttggcatattttgacaaaaagacgatatcgaagaaaannacaaaaantttaccganaattca

SEQ ID NO: 26967 - DNA, 949 bp, Heterodera glycines
aagaatttgccgttattgttgatgtacgccttgtcaaaagacaaaaaattggacgtttatctttgtgattagccatttgctaacttttattagggttttatcaaatattagcgttaataaattgttgaaaattaaaaaaatatttttttttgcggcgcaaatgtcgatttggctgggcggcgcaagtgtctgcggcgcaaaagtcgcggcgcaagtgtcagcggcgcaaaagtcacggcgcaagtgtctgcggcgcaaatgtcgatttggctgggcggcgcaagtgtctgcggcgcaaaagtcgcggcgcaagtgtctgcggcgcaaaagtcacggcgcaagtgtctgcggcgcaaatgtctgcggcgcaaatgtccgcggcgcaaatgtcgcgctaccgttttttttagttaattttgttcataatcaattaaattttatttattttcatcggtagcattaactatttattttctattagctagtaaaatttcaaaaatatttcgttaagtttcgactaaaaatgttcaaaaaaccattttttgagttcttctggttcagaaagctaatgaaaatttttgagaattttgcaggcttatagagaaagaacacttagtgctatcgaatgagatgaggatttaaaaatctagttaatctttagaaatattatgtttttaccgctggaaccattaaactttcgaattgtcccattctgacccagaaaaattagcgatagtttaaaagtctataattttgacttttattaaaaatcaaaggggggcgtccttttggttttcaatttttttatgataatgccttgtcataaaaatctgttctgttcccgtgttttttgagtgcttgatcagtgatcacgaatacaatattttcaacttattcgagttctaaagattagaaaaattgtcaaaatagatgccagaatcatgggcag

SEQ ID NO: 26968 - DNA, 1316 bp, Heterodera glycines
cgctttgagaacaatattttctcgcattttcatggactgttgacgtaaaagtagtgtaatacatgtactaagctcacgattaagggtcggcaaaatcccccaaaaaataggatttccaactttgaaaatatccaataccgaacccaacggcaaaaaaggaacagtgagaggatagtgatttcgattaagcgcgcggcatattaagcgctaatcggggggatgaaaagcgtgaatccaatctcgtgattccttatgtaaatggaaaggcatcatttaaaattgcccttgtaaagtttaaatggagaatttttgaagataaaaatggttcttgcctgtctgatcagatttgatgcgtcctgaaatttttatatttttaaaaaaattaatttttaaaataaaaacattaaaaagcaccttttctgtgtacgaccctttggccacaattcggtcgaacagttcgccaccggtgaccagcttaaggcacatatttattgatataatttgtatcatatcaataacaaattcaattacctccatcaccaaatatacgcaatgcttttcttcttaaaaacaatttaataattaatcattcgcagtagcaaaaatataatttaaattcaaaaataaaatcttttaccaaatgtgtcgtacagctgcacaatgttgttgtggcgcagtctgaacaataacaatgaactctgtgattacgtgtgtgtgtttgatcaacatgctcaaagtgattcgattttacggattcaaaaaaacgcggttgaacacaaaatgatcggatttatgttttattttaaatgatctgatgttcttaggttgggagagcagggtagttaattagttacaaattgggcaatacgtttttttccgatcagttttgagaaatcggacaaaatgcctaaagtcagtcatttggcggtaattgttccttggtctcacgttgccctctttcaaactcaattttggcaacgcaccttttcaacacccgtatttcgttttccaacgactcctccttgcccttcagtgccttcttgtcaatgcatttgatggcgacaaaagtgccgggcacaaagcggcactcggccaggaacactttggagaaggcgccggtgccgagcagatccttgaactcatatctgaacagaattttgtggggtattaaacgtgatatcatgacatcacagcatcatcatcaagaaatgagatcagtgatccggccaagaccatcattctcttgtaccatacaaaattcacttaatttggtcctccgtgaacattggttttcgttaaacccaattttttttttg

SEQ ID NO: 26969 - DNA, 1742 bp, Heterodera glycines
gcaaagtttttggacagaagctgctcaacttggaaatactcttcggcatccgaatcgtccaaactgacagagggggagcaaagctcttcgaacagacacggcactaactgaggggaagggacggcataataaactgtctcgaacgcccacctccgaccaattttgaaaacctaacaaaactgctgatcaaccatttctacccggacccattgatcaattggacttttcattgttttggtttggcccttcccaccgatcaaatggcacttttaccgttttggtttggcaccattcccccccccccccctcccctcccccttcccaatcgccgtaccttttcaatgcgtcgccccaattcaaattgccttttcaccatcttcacaaatcgctgcactttttctgtcctcgtccgtctcttttcttcagcttcttcctctttccctttctcttcgcaattcactggaaattccttgtgcaaattgtccccgtctttccgtttgaactgctccaactcttcgaccacagcgtttccgtccaaaatgcactctctgagttcgttcaacagaacatcaagttccggttgaaggcaatcgccgtggatggacttttttctgatcgaaagttttggcgagaatttggtgccgacatcggcgactttgctgccgattgatgaggttggcaagtgcaggcaaagtccatctaggcaccgctggtgccgattaaaatggtgattcattgggtgccgttttgcgacaatgcaatttttgattagtccgcttggcattttcggcgcgacctttcttaaaatgtcaaacacaaataaatgctttgtttttatgcttacatataaacaatattattaaaatgttgtttttgaatgtgagaccgggactcattgtcccccccccccccgggcaattccgtcgtccctttccattccattttcattcattgtcagttcacgctttgtgtggaatgaacggaaagcgaacgattgatccatggttatggtgggtggaaagtgctaatctgagaatgaatgggtccgcttcaacggatggacgattttgtaatggaaaagcggacgaaagaggagcaaaaaaacattttgcaatttaatttaaaaaaaaattgacaaaatgatcagtgagtgggttttgcataataatgacagcgcagagaccggcggaatgaaaggcattaaaaaggcggggggggggggggggggacactgaaacggaaacccacccacccgcccttttgtagtgaaaaatacaaacaaacaatgattaattacaattattaattaataaattgtttttcattttaaattcctttaaatccatctgactcatcggtcggattaaaagctccttcaaatttaaacgttaaaatgaacgaaaattatgaggagaggaaaatgaaaaatgattgtggtgataaaagtgaggaacaaatgaattatttgaaaaggacggaatgaatgaattaatgaaaagcgaatttcggtgggggaaatgtcaaataaaaatttatgataacattttaaattgtggggggggggaaaggcagaagaaagtgatcgaacggaggtgaattgggaaaagaagcgatgatgggatggaaccgaggagaaggaaaagcagaaaaagcgggggagggaaaagcaaaaattgtcaagtggggaaaggggggggggcaattagcattttaaatgttttcgcggttgtccccccaatgaa

SEQ ID NO: 26970 - DNA, 959 bp, Heterodera glycines
agtgcttcccatgtcttctgcaaggcacgtttgacgagttgcacggcccgctcgaaaattcctccggcccacggcgtgtgctggggcgtgaatcgccacttaatgcctcgggagtccgcaaaatcgatcggattgtctcccggcatgccgaactcggcgagcgttttgccaaccacagtgaaggttggcgcgttttcactgagaattcgactcggtgctccgcgccgggcgatgaatctcctcagtgctgagatgaagctgttggccgataagtctcgagtcgcgtcgacataaatggccctcgtcgtcaaacaggtgattagcagcacccatgtcttcctttgttgtcccttatcgtcgagagtgactgtcggcccgaggtagtcgagcccgactgattcaaacggcaatcgtcgtctcactcgatccattggcagttgtggcattgtcgggagggggtagggcatccccctgagccgtcggcatcgtttgcattgaccaagtacttgccgaacttgttgtcgtgcactgggacaccaccagctcctcaagaattccgacagagtgccgtccgttcccatgtgatggagtcgcacatgtatgtcgtcgataatgagcgctcctgctcttgatcttttcgggagtatcaccggccgactgagttccgcttcttcgcaccagccgattcgactgatgagccgttgcaccccgttttcgtccagctcggttcgcatgccgtcccggggttggcaattccgttgtgttgcccgtacaattgcccattttgcgtccgtctcttcgtcgtgggttgggagagccacgatttgtccccgaattgccgcttttcgccgtgaggggtcagatccccccattgttccgtgcatatcctcggcttttcttcgtgcgttgttggcaaatcgtcgtgcccaggccatcacgcgcagtgctttcacccatct

SEQ ID NO: 26971 - DNA, 344 bp, Heterodera glycines
gcagaagggcgatcatgttggaactgagtgtggagaatgcgtggaattcctccttgattttctgtggaatgaatgcctttgccctattcgtttctttgcccttcgcttgcctttgtgtcctcctccgaagcaaccggcgattgtcccccgtccaccggcgaactcttcgaagggctttccgtttcggaattcaaattcggagagacggaaaaagttgatggttcgtccgcggttaaacactttgacaaatcatccaaattcttagctgagtaaatttgacgttcgcgccaaaccttcgaaatttgaaaacttattaactaggggccgattatgtgtggaattcc

SEQ ID NO: 26972 - DNA, 1209 bp, Heterodera glycines
  unsure (1)..(1209): unsure at all n locations
tgaggattaaattccataataaatttattaacgaaaaactataaaattttacctaataatttttctttaatttttcatgactaatttttatttatatttccttatttttaatatattaaaattgcttgtcgcgatgtaggaattaattctaaacttaatcattattattaaaatgtattttctttaggttttttaataaaaaaaataaaaattccatttttataaaatattaagtgagttaattggtaaaattaattgaatataaatttcaagaactaatgaagaattttcatgattttttatattttcaactatttattaaattttaaaccattgttaagtagattaccagatataaagattttttttaataatttgtttgtaaatattatgcaattccgttttatgctatttaaaatatattttttatttttataactctaaatttttgctgtttaaattgaagcattattatttaagtgatttaaagattatattttatttaataaataagtttggattcaaagtaaatatttattaatattctgtcaaataattattatttattttgtatttaaatttttaataatttttaaatccttctattgtacactcattattctatagagcttaagaactgattaacattttttaatataatcttttatttaaatttaaatttttgttttagtaagaagcctatcaaatttttataaaaatttttagaagaaaaagaatttctaaaaaagatttaaatttttaaagaaaaatttatataattttattgtacattattcaatctaaatttcgataaaaatacaatatttttcaaaatgtttcatttttaaaggtaagacatgaacacttttctaaatttctttaaatattttttaattttaaatttaatgtggtgtggtccataaattttcgttattttagtaaaaattggagttgattatagaacaattggtaaatggaagaaacaatttggaatgggtaaatagtttcataaagttttaatgattatgtttctattcaaatataaaaattgtttaaaaatgataacaattttttggtattactttacaaattttttatttaaaatattaaattctcataatttaatcactgttctagnaataatttaaatttgtanaaaccattttanaacaanntttaagacagagaanaaggttttatttttgctgg

SEQ ID NO: 26973 - DNA, 1167 bp, Heterodera glycines
actttcaaaggattttcaatccaaacaaatatttaattaatgacccattttataattttgtagtaaggccgagcaccactaaaagcatgcattcctgagaacagtaaaaaaattcttaaaaaattaaaaatgaagcaagacaaccttcatttattcaaataacttatataaaaaggttgaagatctacaatttgtttttaaggcacttataatagcaatagctaaaaatcacaaaattggtttcatatgttaagccgctcactaattcattctacgtcaatcctgtttaaatcttccgccaaattaattgtgacaaaatgcttatcagatacttatattgtcctcgatagagcaatttttgataatgaaaatcgcagccatagccgctacctcggtagtgaatgttataatatcttgaacatggagtgtctatcttcccggaatcgtcggaaaagacgaagcgtacagatcgggcggcaacggcgacagcgaagtggcggacgcacttccgtcgtcggggccgccgcggtgggcgcccgggggaaacagcgaatcggtggtcggcagggacaccagcggctccaccattttgaccagcatttcgccgcagacgaccattgtcggctgtacaacaaatgtcatcattagcgctaattagcggatcgaattgaaacggcggcggtgtcggcggaacagacctcgacaatgaagtcgatgaagccgatttgcgagtctgccacgtgaacggtgtgccggtcgcaaaggggcgaatagggaagacccatggacgccttttgggaaaccgttaattagctaattaccacgggaaaaaatgtgggccgaatgaaacgcacttccaagtcgccttggcggaagaactcctcgagcacaccctcagtcctcaaaatcaaaaggccatttgtcaattgggacaaaagggaagggaatgggcggggggaaagcggacaaaaagtatcactaatttgaacgaaatgccgtattttcccaggcctcgtccgaatttttctgctgattatggggctgcctctgatcaacaaaccaaaaaccgaccagcgatagtgcaattcccatggcttcgatgcgtgtgatctgaaaagggaagggccttcgatcggttctttttccgtcccttttcacatgtcacac

SEQ ID NO: 26974 - DNA, 1013 bp, Heterodera glycines
ctaaattgcttcgttccgtcgcctattttttacgctttgtctcacatcttaaagcaaaatttcgtaaaattgcttataaatcaacatcaatagtgattactgtatccgaactacgctgtgcctttcattttttgttaaaacaagaacaatcttcccaccctcctaatgaacatgaaaaggaagccctaggattattttctgatgattcgggaataatcaaaagcaaaggtcgcataaaatactcaaaattaaataattcagcaattgaaccaatttttttgcctgcaaattcccttctcacccgccttattattaccgaagcgcacctaactaaccaacattccagtccactccatactttatcggccattcgatttaaattttggataccaaagggtcgaaaaattgttggacaaacaatttataaaaattgtatttcttgccgcagatttaaagtacaaccttttaaccttcctccaattccgcagttaccttccgaccgagtttgtctgactccccccttttcgacagttggcttagatttttttgggccattacatgtaaaaacacttatcccatcaaatgtccgaccctctaaaatgtgggtgactctttgggtatgtctttcaacccgaaacatttcgttagatttagtcccaaaccagtcaaccttgtcctttgcccttgccttccgacgaatttcggctaaattcggtatcccaaacactgtatactgcgataatgcaccatcttttattaaatttaaccaattttcctaatcatttacaccaacaatttggaagttccgtacaccttcagccccctggaaaggggggcattatgaacgttttgttggtttggctaaattccatctcagaacagtgttaattggacctcgtcatcggattctcgataacgatcaactttctaccttgctttacgaaatttcaaccacagttaatacgcgcccaattacctttgattcagcaaacccagccgatcctagacccctc

SEQ ID NO: 26975 - DNA, 570 bp, Heterodera glycines
tttaatttgcaccttcttgttcacgcataaggtataagcccaaccatttctcattgtcagtgcttccatttttcttttcaatttatgccaatattttccatggaagcccatttatgtaagtgacagattcgcttttacgttcacttctgtcgattcccattttttgtgtacataaaagaaaatacaacgctacaaaaaccaaattttatatgaatttcgcgccatttaagccagcagaatcatttatacttttttaattgattgtgaaaattttgggctcggtgattgcgagaggcctcccttattgattgttattttaatttaattttccattttcattgaaaacagaaacgcgcgcaatccgtctgaaaattttttttttggaaatgggaaaatattagataatttttttgtggattttttcccaccacctaccccctacctgcaaaaaaagctcaacaagaaaaccttaaaattttaagtcaaactccaattttttttcaagtttcattttagtcgtgggttcgagaataataattatgccaattaaggaattacaatatgtacaat

SEQ ID NO: 26976 - DNA, 1422 bp, Heterodera glycines
  unsure (1)..(1422): unsure at all n locations
ataaaaaaatcatttaataatgggattcaacagaaacggaaatattagcactnttgtggaaaatattttacttacagatttgaaggtttcagacgcggtgtagaatcttaaaaaattaatattatttaaatcttttataagatttacgcgataaaaattaagtaaatagtgaagttcatgtgatcttaatagaaaatggataatgaaaaggtggtttattgaaaaaaatggtgttaattcgagtgcaggatctataaataaattaatattattttaatcattaaaaatattttagttatataaatgataaatcgaaatttattaatgctctgataaaaaaatcatttgataatggattcaacagaaacggaaaaattagcactttgtggaaaatattttacttacagatttgaaggtttcagacgcggtgtagaatcttaaaaaattaatattatttaaatcttttataagatttacgcgatacaaattaaggaatgtcgtggcgacaagaaatttgcgtcgaactctgcggggtgaaggggacgggaaggggatgaaatgggcgaggcgcgcagagtagccgttcgggggaatgtagggggtcgggaccgatcggagagcgatgagtcgtgccggttttcgtccaggcaaatagaccaagttgggcacaattttaataagagtatgtttattgtgtcgacctcaaacttgggtaattaaaccgtcccaatcgggacggtgagggaaacgaaaaatgggggacaaacatgataatgtgaacggggaaaagggggcacaaaaacggtgacagtaaataaatcacaaatggaaaaatgtggcaaaatcaaaaggggtcagaacggcgttgggaaaaggaagggcattcgggcaacggctggtccaaaaggggccacacaatggcaaaggaaagggagggcactcgagtaggcgcggacagggagggcactcgcacagacagagagcagcgaaggccgggtgcagtgaaaggcggtgggcgggtgccgggaaacttcggagggaaccgtttgtctcgaatctgaaatttccggaaaagtccacccctttaaatacgatttttttgcaccaaagtacgctacaatttctcattttaattaaaatatgtttttgtgtgttatccgtttggatttgccattttcccattaattgtttgcttttccgttttcccttaacattccatttctttatatattaattattaataatttgtttacgaacaatcttaacagatttcccattttatattaaataattttcgttcctttcattcctgaagaaaggacttttccttttcaaccaatttccgtttttctttcaaaaagtttttttctttttttgaaattattttttccaaaggttttttttaaaatttattttccaaaa

SEQ ID NO: 26977 - DNA, 1800 bp, Heterodera glycines
agagcagaaaaagagtcaaaacgtgccgaagaaattgagttcgaaaacgcccaaagtgtctgtgccgttgatcacaaaaaaggacaccgacgacaaatcggacaaaagatatgaggcaaaatttgcggtgaaatcggaggaggaaattttcgaaaagatcagagacaaatttaacatcagtgatgagcagttgctggtatgagttgcaacattaaaaaaatttgaaatttataattgagttgttgacagttgtcgctgtctgagcttgtgccgttgaatggccgcggagggagcggcggagttttttacaaaacgaaggacgacaaattcatcttgaagagtctgaacccggatcatgatgagcctgctaaaatagacgaggtgttggacaattattcgaagcatgtgcttggccagcagcccgagaagggcaagcagtccacggacagccgctccatgatgaacaccttcttcatgtacttcgaaatgaatgtttacgccaagctgaaggagggcaagggaaaagagaggaaaaaggtaagaaacatagggaagtttatttatttccttttgcactttacccttcattttaagaaacttcggctgcacatgttacaatttgtggtactgaacaacgtatttgagggaatcgacgagcaaactctgctcaagttcgacatcaaaggcactttcgcgccgggcagtgccgtgcagcacgaccagaagcagaagtggtacacaggagagacgggttggcagaagagtttgtaccgcgagtacgacttcatcggcatctcccgcgaagggagagagatttccgcctttttcccggagggcattcagctgcatcctgaagcgtatagacaattggccgacggagtgaagaacgacacgagcgtaagcattagagtggagaccgcattgacaaactatattaatctcaaatagctaacagaaactcccatttacagtaccttaccgagaacggagtcaatgactacagtctgctgttgggtgtccaattcatggacccatacccagactcaccaaaagacagaaaagacttcgagggaacaaaaaagggcgcaaagtgtgtggaagcaaaatgccataattgcaaacgatggcctgatgcagaatacgaagagaaggcgaccctttgtctgtacatgggaatcattgacattgtgacgccgtccaacgaaaaggcggagaagcatttctttgaaatgatgtatcgaaggaaagacatagcagattttatacactacaaacgcatgagcgagttcatcccctaccacaatgttggcttttctaaatcaaagggtgcccgttgtgacagcttcccgcctcccccccccccactttgcactttgtgcgtctgccatcagctggatgagatttctgtaaagcatcctattcctagaccgccattatttttggaaaagggaacttgtgggaaaaaacctcgttttaactgaagggtttgttaaggaactcttgtaaatccgtaatgcaaattttgtttggaccgaaagtatttataatggcatttttaccttctcaggaaattgtgacgccagtgccgccccaaatgtatggaaaacgctttgttggcactgtgctcggctgcttgttcagccccgagtcttcaacatcggtgggtggagaatcggaacgccaatttcaattgggcatgaggcaaagcatttgtaaaacattcggcgagaaacggggaatcaagacaaaccatggaattgaggtgttcggactgaacatgttcaaggagatgatggagaa

SEQ ID NO: 26978 - DNA, 1594 bp, Heterodera glycines
tttacgcttactgttcagcaattcgcgatgtgcatctttcaaaaaatgcgtaatcacttgaaatgcggaaataaagcaaaagcattgcctgagatttcgggaaataattaacttttttaaatatttgtttgagtctaagcaaaatattttccgattaaccgaggccctaacggaatctctggccctttcttttcccaaaaatgtccaaaactaactatttcttaggatttaacgccaagttttgaaaaatttcaaggaacttttagattcggcgatgctgatttcctttaaaatacaagttacaaaaaacccaaagctaggatatagttaaccctgtaaaaatgtttaaaaaactctctgaaattaggagaaaatatcaacaaatagggctcaaatcgcatccctgataccgaatagtgtggtgtttgggaccaatcgataatggagtgaactttgttcactgatttcccttaggcacaattccttccctcatataagcgctgtctttcctccctccctcgttcattctgtcatttattcctcccattgcaattcccatcgccttgaccattttattattatatttgtgcttcaaataaatatttgttttattcatatctgttgttctcggacacaacaaatagtgcgagggaatggagacggatacaatgcaaatggcacaaattgggtgacaatgtttacctaaaatagtatcaatcatagataaaaagaattttatcggaaaaagagatgtacattatcgttacaacaaactaagatactgtaagaaaatgtctcaattgcacagtaaaaaaaactaatacactgtaatatgttatttattccgtattttttacaaaaataactaagatactgtaatttgatattttcgttattatagggtcatgagacgacattcattttgatgaaaaatggtttggcctaattataattaattcaactttgactaactttgccctttttgtagtaacattcgttgcaagaatttgtcagtttgacaagtccgttggacaatgcccaatctttggcatccaaactttgttccaacaaaatttgcagatcattctcaatgtttgacacacaatattgttgcggttgttcaatgccatccttttcatctcaaatggcacaaattgtggttaataaaaataattgatatttatttaaaagaatttaattgaattaattttgagaattttttattctgaaattttttttgttacgatccaaatgaaataacgtctttttaagaagaataactggtttttagcataagtccataaagcaaagataaattaaaattagaaaaatttaaattaattcttaatacctctattttgatttggtgatccaattgccaattgaattgaaacaagcaaaggcaaaaattttatcaaattatagaaaaaaaattttgccttttcacatgaaaataacacaaaaaattaataataaataaaagataatcaatgaattttactgaaacaaaatatttggctagaaacaaatattattccggcggatacagtgcagaaatagatgccaatgccaaaatattagctgaatttcataa

SEQ ID NO: 26979 - DNA, 195 bp, Heterodera glycines
cgccacccaccacccgcgcgggagagggcaaacagaaggcgggaaacgacattcagaaccccaccaagccagcaccagcaggcccggcacgagcggccgcccggggaacgaaccccgaacgagaaacagagaggacaccggacgcaagaggagccccggggaccgagcgcgaaaacgcaaacagggccagagcgg

SEQ ID NO: 26980 - DNA, 1279 bp, Heterodera glycines
taatgatggggtggcaatccccccccccccaattagagcaattttgaattcgaaaaattaaaaaaaaaacattaatttttcactattcgtactcattaatgatcgtagtgagatgtgatggcaattcttctcaaataaaggaattttttgcgaaaatttaaaaaagattaatttttcaaagaaaatttaaatgatcaaatatttcacatctttttttgtttaatgatctctatgccatcgatttgtagaaattaatttttaaaaattgcaaatctcctaaaccaattaaattaaaagccttttcctcttttctttattatgttctctttttatttttgtttttccccagaattttcccagactttctgattaagatttattgcattttttatcaagagataaaaaatgtttgctaattttggaacatttctgttaatattattttccatcaaagaccttgctgtttctgactgttcttctcaatttcctatttttatgcatttctctatttgcattgcattatcacagtattttttaacattttttattaaataaataataatttttttctgtttttgattaataaatttacaaaataacgaatccttttctttttcaaaaaccctgtaaaaaacgaattcactataagaacagcttattgctcaaccagtgctagatacaattcgttctttattcgaacatctcgtctctatagacttttgcctaaagagacgagattactaaattctaatgagtttgccaaacttcttgaaagatctgatctgaatttgttgatttctttgccaccccagctccaaaagtgaccaattgtttgttttatttgatattgtttcattatttcttatttttcggcgtcacgcttatgcgtataaatgaaatgtaatggtttgtcgtgtcattcgtttcccataagattcccttgcccttttcacatctttatctaattcatcatttgtctgtcttatgctctttatttagcgtttattcgtaaaaagttaaaacttcatcaatcgtttaatgagtggacgcggcggaggcccaagacgtgatggtggtggcggaggagcgcctcgcggaggatacggaggagggggaggcggaggagcgcctcgcggaggatacggaggagggggaggcggaggatatggaggagggggaggtggaggatatggaggagggggaagcggaggagcgcctcgcgcttactagatgaggcggtatgatttgactcattccggtagaaatatgcaatgattat

SEQ ID NO: 26981 - DNA, 959 bp, Heterodera glycines
ctgtggcttcactgttggaattccgtcaaactctccgcgcaaatattcatatgaaatgtccaaatatttgcgatatttttggcattctccccgttcatgtgcttcaaatttctgctcaattttggcacattgccaattctttctcataaaatacacaatgccaagatgtgcctcatatttttcctcactgatttggatttgcggaaggcctttcataaatgcaattagcattttgtcgtcggcctaattaaaaaagaaagtctaatgatgaggcaattaatattcaccagtgtcgttgcatttgaaagtggaattaaaaaacgaaatatatgctaataaaataaatagaaaaagcagaaaaattcatttctccgcaattgagcttttttgaacctaaattaggctaattctactcaaatgcattcaaatttcaaatgaaagatagaatacagttaaatgtataaaaatgaatataaaaaatatatgtagaaattattttattttttactaaatttttttactggcatcgtgctttttggatatttattataggttcgctatctctatttgagtcactgacaactcgtacaaaaggcaagacatatattaaattttacaaaataatgcctaaacttaggcctaagcctacgtataaagctttaggcttagcctctatgtacgagttgcctgttgtacaaatgacttttgtacaatgtccatgacaccctaaatttagagaaaaaataaaaataaaattattttcgaatttcgacctccgggggaggcacgttgtttttgagtaaaattttcgccaaaaaatgtgatcgcggcaaaaaggaaatttttatcgctttttgttaaaaattttgaattgtttaaagggaaaattcgaaaaatgcaaaatatttacaaattttgacaaacccccccaaatattaaaaatattttttttccaaaaa

SEQ ID NO: 26982 - DNA, 825 bp, Heterodera glycines
ataatttttttgaaactttgaagggaaataaagaatacttagggttatcgaataaagtagaaatttcattcaattcaatcatgaattttaacaattcgtccttggccaaaatttaccgtggggttggccacttcatggccaatacaattttccaagtcgtcgtcattggccaaatctgttgggcaacaaaattcgtaaagctctggcagtacagtcatggcaaactgtgaacgtgtgttcaacttttttgccactttttgcagctgaatgctgaatttctttaacacatttttctcatcacttgtccatgtttcgttggcgttgtgccaaaggaaataattcaaatatgccttgcccataaacaaatcaatgtggtgaatttgggcatcggcttgccaatgtgcaaaaaaatcgtccaaatatttgaatttgtctatgccatggtagtgcacgtcacacggatcattatcatcgatgcgatttttatcaactaaaaaagatagccaaaatatttgggatttatggcataaaaaagcccaaaattttgccatgcaatttatcaaaaaaataaataaaataatgctatttggcttttctctgtgattctcgtcaaaaaaagacactcagactgtagtatacttaatttaaatttattgatgcttattgagtgcttaattatctttttcttcaattttttatactttttaaactgcttagttttttttttgattttttgtccataagaccaggtctcaggggtgaggcgcaaccgcgatccgcggcctttttaaattttttataataggaaaatttaattaaatgcgc

SEQ ID NO: 26983 - DNA, 1035 bp, Heterodera glycines
ggccaagaaggaagaagaagctgctagctaatcccattgcaaaaacagaagagaaagtgccattttgaagaaaatatccccagtaaaaaataaaatttgttcaaattcaacgccataaactcatttggcaattttgaaaatttagtgacttaaaatgtcaaaaaacggtacgcttcatatatatctagctcaatactgacggttttggttaatcatttaggtgatttatttatttatttttcctaaactccctgggacctgaaaatgaaagcaaacaaattttttctcaatttaaaaaaaaataatttctaaataaaaaataattttttatttgaaaaagctttccttaaagttgaagccctggtttatcaaattaaaaaacacataaattatttttagcttttttttactaattttaaatttataaaaatccctcccgccgcttttccttttatttctcacccgtacgctgcacgtcatcaccagggcggcgcaaaacggcagcacaacggcggcgagcaggtcaagcaacacaacgctatcagcagaagaggaggaaatggcaacagaaggccaaaatgggggaggagagaagcgcaacggcgcaaaagcgttgtggaagagcaaattctgaaaagcaaagcgaaacaagcaaattaagaactaattaattaattaatgtataactaagccaggggtgcgatctgtccttatttgaaagatttgtccttatttggaggttccaaatcttataaaataaaaatgtccttatttataagatttgtccttatttggaggttccaaatcttataaaataaaaatgtccttatttataagatttgtccttatttcgggctatcgttaacaaatcgcattaaaaaacacaaaatttttcccagcgggcgcctaatcggcgccccccggacgccccctgtccaacccccaaaaaatttttaaaaaaattcccccgcaaaaaaagcgtttttcaaaggaaaaaaaagggcgtccgggctgggtttttaaatttcaaaaatt

SEQ ID NO: 26984 - DNA, 1605 bp, Heterodera glycines
  unsure (1)..(1605): unsure at all n locations
ggtcagtcatagatacgtttccataataaaatgctatgaaatatagcggggataatacaaaaaacaaacgcaattagggaatttgacaaactgcaaatgtgacattgggaacaaatgctaacatcgaaaaatgcatagaacggcgctgctntatctttttaagtgactgtgtgtgacttattcttcttctgccgttggctatgcaattggtgccaacacaatgcctccgtaaccggccaatgtcgttttgcccatcagatagtggtccacttgtcgggcggcctgtcgtccttcgtgaattgcccacaccaccagcgactggcccctgcggcaatcacccgcagcgaacactcgcgcgcaattggtgttgtacttttcgttcggagttttgatattttgacgagggtcatagtccagcctcagttgatcgatgacagtctgcacaaattttaaatgcattttgaatttaaaaaatttatttgaaagtatcagggtttttgttacggagttccgcctaagtccgttttcctagaccaaatgcccggttgcttaaaaattcctggctatttaatgtgtgaataggtgccaggaactgccattttaccttttcaggtccaatgaaacccatggccataatgcacaggtcgcagtcgtacaccttttcggtgccctccaactccaccattttccaagccccattctcgtccttctcccattcgatgttcactgtcttcaagccgaccaacacgtgcactccgttcttctcttcagtgatgaattcctgtaaatcatatggttttgctgcttgtcccgcaccatttctccccacctttgtgctaattgcgtaagtcctcgggtcttttccgtcccgcaccttcgcttcctcgtgtccgtagtccactcggaaaatcagaggccactgaggccaagggttctaaaaaggtcgaaggggtaaacaaccaaagaagctaaaaaccccatttatttacctcgagctttcttatctctgccggctgcggcaaaatttcgaaggcctgcacagttttggcgttaagtctcagcgaagttccgatgcaatcggtggcggtgtcacctccgccgagaataatcacgcgttttcccgccgggtccaacccctcccattggacatcatcgccggcgcgacgtcgttggcttttctccaggaattccattgcgaaacaaatgcctttcgcctccctgcccgggatacgaatgtctcttggtgtcgtacttcccgtgcacaccacaaccacgtcgttctccttcagcaacaattctgccggcacgtgtttgccgatctctgtgttcggaatgaaccggatgccctcctcatccatcagcttcaaccgtcggtccaacacgaacttgtcaagtttcatctgcggaatgccgtagcggagcagcccaccaatcctattcttccgttcgtataccaccaccgcgtggccaactttgttcaattgagcagccaccgccaaccccgcaggcccactgccattgatagcgatgcgtttgccggttcgggcgggtggcttttgcggctcaatcaattgttaaggaaagcgtagtcaataatggcacatt

SEQ ID NO: 26985 - DNA, 976 bp, Heterodera glycines
  unsure (1)..(976): unsure at all n locations
agagtctgtaanttgaaatttatgaattttttttaattgggaaagatatcaaataggtatataggtattgaacactctaataaaaagaaatctttcaaattaaaatgtgaatttccaataataaattaatgagttagtaaattagtaaatttttaaggctacacatttcatatttgctattcatatgaagtaacgaatgaaaaaaaaatgaaaaaagaatgatcgttggattcttaatttgttttcattctcaaacgtcgcccttctctttcccttccttttccactttcccatttccctcgtctctcttctttcttcccttctccgtccactggaaaaaattggctgaccaaagatcagaatgaaaataacaaaactagaggggtcggggtcacttcgccgcggccatctcgccgcgagaaactcgccgcgtggccaactcgccgcggcgctatctcgccgccgcccaactcgccgcgccttgtttttttggctatctcgccgccagatttttttcattgaaaggttacctcattattttgatataaaattaaaaaatgcattaatttatttcaaaagaatcattaaaataacaaacactggtccataacacaatttgaaaccagaaattccgaaccccgaactcaaaatttcgactttattcgaattcaggctggtgttataaataggttgaaatggagtgctcagtagagaccggaaatttcaaatttgcggatcccgctgcgggattggaactcaaaattctttgcgggacgggatcccgcgggattaatcccgcattttaaaaaaaaatgtgggattgcggactgggatcccgcaaaacgcgggatcccgtcccgcgccggactctagtgctcaacgcctcaaatacccaaagaaacttgttaaaaaatcccaaaaaaaattaaaaaaaaaaattcgggacccatgatcaacatgattggtctttaaattt

SEQ ID NO: 26986 - DNA, 1261 bp, Heterodera glycines
  unsure (1)..(1261): unsure at all n locations
ataaaaattggtaaattttttttacactttaaccaactgagtacacattttgagtctgaccaaatataggtattttcgagattcaattttgattccctttttataaatttggcggctcttgcggctatcaataaacctaataattcgagtttaggaattgttaagcctttaagtggagtaagtcttgtttttgcgaacaataaatttatttgatcgtttgtatgtaaataagctgatgtggcataagccaactcagaagcgtcagcgaaaatgtgtaatattgaatgttttaaatattggcttgtgaaaggtgaacgtggtatggctatcatttcggtgtttgaaatattattccattcaataatttcttgatcatctaatttatcgtcccaatctttgttagatcgccatagtttttggaaaaatagtttatatttcagtattactggtgaaatccatcccattggatcgaaatttttggcaatcatcgttaaaatttgtctttttgttgtgtctttactcattagtggaatttttatttggagttcaagttcatctgaatcgacattccattttatacccaacatttttgttacttttggtatctctgatccttccaatttttgaatttctttattactttgttcatgattagacacaaattctctcagattcattgatgcaagtttaaatatttctttgctccaataatgtttgaattttatttccttttcatcgtcgcacatcattacgaaattatcaacatatgcattttgtttaagttctatgcaaagatttttaaattcttcttctttatcatttagacataattccttattaacttgaattgtcttgaatttttcaaacatttcatttatctttgacaagtggagattaactacagcagttaataaaaatggtgaagcgttaactccaaatggtatccgtgtgaatcgtctcaattcgatgtctctcatttcaatttctcgataattttgtcttatttcattcaagtatgatttgtttacccataaaaatcgtgttgtgtctctgtctaattcatttaatccaactcgtaaaaatgctttttccaagtcaccaattaatacgtaatttttgagtctaaatcggagaatcattccacacaaatctggtagtaattttggtccttggtgaatttcatcatttagtgaattatttcctttaagttttgcggacgcatcaaaaactggtcgtaattnttggttgtatttgaactctc

SEQ ID NO: 26987 - DNA, 1075 bp, Heterodera glycines
ccccccccccttttgcctccccccttggttacgggcctgggtgcattatgtttccgtcgtccatatttttgcatcccaccccaaaaatttttcaaaaaaatcttgtccattttttataggaaaatttcaagtaagaaatttcgaaaaaattttctaatttaacagctgggggtgggggggggttggatgacgagctgctccctcatgtttagcgctcaaaaaacaatgaactaattgccctaaggcattgtttcaaattgccttaggcacccaagaagagggttttcaatgttttgaaaacattttgacaggtttctgtccatgccggaaacattatgtgcgcaagactatgcgaagcattgtgggcacaattccagcagtggagagccagcacaaaagtgtgtgtgtgcaaaaaaaaaattaaattttaaattatttttaaatgattgaaatagtgcgccattgccactatagtgctgctggtcgagactgcaaatctctaccgagaattctacttttttttgccctgaccctcaaactgatcagaaaaaatcgatcaaagaattccgtcgatataatattttaatttgataaattttttctgttcagttttgtgatcagagaaaaaaaacccccgaaaattcacaatagaaaatcggccagcttccatcaaaacgcttcacgcatttttaaaatttccgatgctccataaagtcatttgcttttgccaatttaacattttgtcaggtgctgacaggaggcggtggaagaaaggaatcggcgggcagtatggcggcaccaccgcccgtcgtcgagctggtcactggcagcagcagcataaagcagcaaccggcgccgccgcttggaagcagtgctcggctacggaaagtgtccggtgaacggaggccaccgccgagcggagaaagcggcggcggcggattggttttagctgcttcatccccattggcaggcaaaaccgtaggaggaggcggaggaggagggccaattgttggcacaattggagcaacaaaaagcccaatgtttggcgacatgcggccacattatgtgtgatttg

SEQ ID NO: 26988 - DNA, 925 bp, Heterodera glycines
  unsure (1)..(925): unsure at all n locations
ctccgcgcctgcctcggacggcgtcggataaaattcccactccggaggcattgcaaattcgacgaacggatgcacacaatggtcaaattcgacgaccgtacaaatggtggaggcattgaaacggcgaaggaatgcgctgacaaagggaaaaattcggaacagtgatcgaacaaaatgatctggactatatataactcagtcagtatgatctgatccggacactgatcggggaatgccaaagggagacccaaaggatgccgaactcgtcaatcaacaaaaccgagacttaatcgctcatattggaatggttatccagcgactgatcaaacactgctgttcgtccgtaatttgatcattatgccgactattcggagtgtttttaatactgatcagaccagagatccaattattagggaccaaattaggagatgtgtggagcaacaaacactccccggttcgaaccgtgccgaaacatctgaaacatcttcccccccccccccgcccacctgtccaaatcgccttgcaaagtccacagaacgacaatcatcggcacgcatgaacattgttctgcaggcataatacattaaacgtgcgaaatgatttgatcagtgtcccgtcacggcaccacccaccgactgccctctccaacagacaaagcaatccgccgacggcgcctgagatggcacttccggcggcggcaccttttgttgcgtcaaccgcagagggtggagatgaaccagcaatggaatcgtcgggagagcaaatgctaaatgccgaaggaaaatagaaaaggaaaaatggcacaatttgaaaatttgcatttggacgaaagcgcaaaagaattcaaaaaaggcaatcgaaatttaaatatttatgcttgcttnnttacagattttaagacttgtaacagagtcagtccctctca

SEQ ID NO: 26989 - DNA, 1338 bp, Heterodera glycines
  unsure (1)..(1338): unsure at all n locations
tcaaagaagagtgaggacatgatcgaggcttttgatcgggtgttcgacaagtcgaagattatcccgatgaaaatatatagcgacagtggactcgagtttcaggcgggaaaaatgaaaaaatattttgaggaaaaattcatcatcaaaaatgtaatgtatagccccgacctccacgccggagtcgttgaaagggcaaatagaacaataaaggagcgtttgtacagatattttacaaaaacgaacactctacgatgggtcgacgtaatagacaaaataataacaaatattaacaacagtgtgaataggacactgggagtcaaaacatcttcaattaattttgaaaatgcccgtgcgctctgggaaaaattatataaggctagggaatttaaaattttaaaaaagaaaaaatttaaaatcggtgatatcgttcgtattaccaaggaaaagggaaaattttcaaagggatacctcccaaactttaccgaagaattgtttaaaatcgttgttgccaatccgacgacacccgattcatacaggatcgaagatttggaaggaaatttaataaaaggcatattttataaccaggaattagtgaaaacagatggatgatttttacattgtactaccttcgaacacaccggggcaggagaacactacgtcaaaattcacagtacgactccccgagactctggaattgggcacaaattggtcagtagctctctcatcaattatttacccctactcattcaccgctctcggtataaacggtcaagagtttattaaagtatgggaaaacgacagcagtgtcccgactcaagtttatttaccggacatgaattttaaaaccgccgggggcctgggaaataaaattaacgaggcattcagccatcattacaaaatcaaaaaacaacgtggaaggagagaagccaaggctgaagataccaaagactcaaaaattgatgtcgcaaagagggccgcagaacgcgccgggagagacgtagaaagacattttaatcagatcaacaatatctcgaattccatccaaacccaactaaacacactacgagaaacaaatcctcaaattttagaagagcctgatataaaaatttggtttgacaaaatggttgagatgggaaccgaaattcaaacatcacgaaatgaacttaaggcttttcaagaagaagtagataaagccaaaaacataacattggagcatgtggaanagaatgacttgaaaaaagcaaagaaatcagccgacgtcgcaaagggaatcgccagacaggcaaangacaaatatacatcaactctcgagggatataatgataatccgggaaaggg

SEQ ID NO: 26990 - DNA, 1323 bp, Heterodera glycines
tttttaattgttttgtaagaaataatgaattagtttttctttgattcataatcagaattttactcaattttaaaatttttgtagtttaaaaattcaattgattactattttcttttttcaaatttgaaaaaaacattgataatttataactaatttttaacaaatatttgtaataaaaaacgcatttctaataaattaattataattattttatgtacttgtattgttttttttgataattcactgcaattttcgatagaaataatatagaataattagtttgattgaatttgttcatttatcttttcacaccataaattttcaaaaagtcaattttaaattctttacattttattctcatggctcaaagacgaattatttaacattgtattgtttattgcttgatatttcgatttaattaaatttaagtaaattttattaatttattttttaaatttaaatttcatttaaatttatataaaaataatttaattttaaatgcatgtttatatacatacttgatgaatattccgtcctttttaaaattttctgttatataagcaaaattacttggagtttgattttttctattttttatttaattgcaattaataaaagataatttaataatttatttataattttatatttattcatttaatattgttcaacccatcccaaaaggggcatttacttagggtgtaacataagtttccgcactaaattttttctgacaaattcaaaaattcataactccgtaatttctgcagttattttaataattctttttttatttcgttctaaagaaattcttcttttatttcatgccatcgtttcatttttttatttgcttgtcaatttttcagaattttttcccgaccatgccaaagttgaaaattggtccaataatttttctcgaattttttatgatcaatactaaacctgattctgtaaattttagatcagtaaaatccgaatatgcctttaaacctgatctatattaaccctgagcttgtactactccaactcgatacacgaagttggagctgtattatattcttatagtcctaatttttctctatttactcttgttttctctacctctatatctcttttcattttctttaagtcagccatcaaaatacctagctcgaaaatgaccatttttacattatcaactataactaccttaaagacttttctaatgggatttatctcttgcctgataaatagtaaactcattatcaataacggcagatatttcaaatcatgattgtgtttttttaatttatattcaaaaaaattctttaaaaaaagttgtgc

SEQ ID NO: 26991 - DNA, 807 bp, Heterodera glycines
gagttgccgaatcggaaaagttcgtgaattgatcgccctttttccgtcacccagacgggaatgaaggggtttaggctcctcattggtccaagacgtgcgaccagttcttcgtattcatcgtgcttgtcatggacataaggcgggcatatccagaagaacttcacgtgtgcaaaacgacggcacagattcgcgatcatttcgtactgttccatcatcatttcgacagtttctcctctcagaagagagtcgcgtccggcaatgatcagagctgccttcactttgctcgacagtaccactggcttcagagtgcgcactgtttccgccaatgttccgtttttgggcccaatcactgccgtttggtccaggatttccgccaattggtgagcagactgatcaccgattatgacacgagggtgtgccatcagttttgaggccttgtgcacgatttttgccctcaattgttctaacgcccatggcgtttccttggacgcttcttcccactttttcttctctgattcggccaagtggttgagtccagcgggcgccgtcatgccaatcttctcaaatttgctttcctccaaggcgcgtctggccaccaaacactttttgaagaaacattccaaagacttcttttgatcttcctccgttgggtactgtccggtcgccacaaaatctgcctttttggccacaaataagcgaatttcttcttttggctcgccttctattatcgcgttgaccagacttcgcgctgctgtcattgacttgactgtacccgctttcagcaaaaacaccgccaaaagagcctgt

SEQ ID NO: 26992 - DNA, 1102 bp, Heterodera glycines
ttatgagggggggggggggtaaaaacacctgaataaagcgcaatgcgcaacggaatgaaattgagtccgctgacaactatggcaaaggtgacgaacgcactgcactcctggatcgcggtgctcagcccgttcagcgcaatttgcacgttgcacgcgccccggagagtccttttgtgcaaaagccgtgcaaacggaaaaacaaaatgcccaactccccagtgccaaattcccccgtcgccgttccctattcgcccccccccctccgcgccgacttggttttgacagtgacgtgcacaatggtcaaattcagcaccacgccaatcaaacacaccaacgctttgcacccaatcagtgccaccaattcccaggagacgcccgagtctttgaagtgttcataagcctgaaaagtgtcagcagacgttagttagttaccctttccaatcattttgggggcgtttgtcaccgggtcggcctttgtatttgctgccggcaacaaattggaagtgtcgtcggatgaattcattacaaatggcaaattccctcccattggtctttttatttccctttctttcccacaaattcatacgaattaaaggcaattatcattttcatttttaacctttgggaaaaaaggcattctcagaagaaagcgagcgaatacaatttattaattgagtgtaaaaagagaataaaagttaatgaaatggaaatttgcacaaaaaatgaaccaaaagaatcacgcaattaacggtcggggtcgttttcgcgtggccgttttcgcgtggccgttttcgcgtggggacgttttcgcgtgagtacctgtttaggactgaaattggtcggatttgtgcaaaacatccatgtttcgaatcccgaacccgaattcggacaaatttcttgactttttaatttttttatttcttgcggctagtatcttctacaataatttgtcagcttggccggatgtgcatcaaacggtacaaataattataattttatcaaaatataacaaaaaataacaaatttcagaacaaactacagacgcatttcttatttatcgggaaacaccggtgagaaaattgataatgttttcatcattcac

SEQ ID NO: 26993 - DNA, 770 bp, Heterodera glycines
acatttgcggcccggacatttgctgctccagccaaaatcggacatttgcggcacgacttttgcggcccgctatttatgtcctggacatttgcggcccatttcttaaaggccagccatttccggacatttgcggcccaatttttttgttgaattttacggcccaagccaaaatcagacatttacggctcgacatttgcggcttcccatcaataaattaaaataaaaagaaatgagctcactttatgtaattattttctctctatccaattaacacagaaattttttaaattttctaatggcatgctcaaaaccgaaccagcaggtgctgggacgttagtcaaaaatcatcaaatgtaaattttatttttttgatataactttgctcaaaagcaaccaaattttataatcttgacatcattcgatagccgtaagttttttctattattctgcaaaatttcaaaaaaattcattaattttcaaaaaagttataaccaaaaatgttaaaaaaaatttgcgtttttgagctaaattaattttgtgatacaataatgatgacgaacactaacggcaccgccgacccccattttaccattttttttgaaaaataaagatcaaaatggcaaaaatagtattttttggcgaaaaacgactgaaaattttgtaaaatacaccccataattcgggatttcaaaaaccaaaaaaattttgccaaaaaatagtgacccaactttccactaaaaacagattaagactaataatgctcggcatgg

SEQ ID NO: 26994 - DNA, 1260 bp, Heterodera glycines
gttatttttatggatttttgaaccggtttaagtagattagactagaaaaaatgaaaattttgaaatcatgtttccccctcccttttcccaggggtattttttgtaaagtcttttttcaaaataaacttttcaaaccccatttttcgcaccgtgaatgtatttttatgaattctgaaccggtttgagtagattagactagaaaaaattgaaaattttgaaatcatgtttcccactcccttctcccaggggtataattttgtaaagtctttttttcccaaataaactttttaaaccccatttttcgcaccgtgaatgttatttttattgaattctgaaccggtttgagtagattagactagaaaaaattgaaaattttgaaatcatgtttcccactcccttctcccaggggtattattttgtaaagtctttttttccccaataaacttgtcaaaccccatttttcgcaccgtgaatgttatttttattgaattctgaaccgttttgagtagattagactagaaaaaattgaaaattttgaaatcatgtttcccactcccttctcccaggggtattattttgtaaagtctttttttcaaaataaacttttcaaaccccatttttcgcaccgtgaatgttatttttattgaattctgaaccgttttgagtagattagactagaaaaaattgaaaattttgaaatcatgtttcccactcccttctcccaggggtattattttgtaaagtctttttttccccaataaacttttcaaaccccatttttcgcaccgtgaatgttatttttattgaattctgaaccgttttgagtagattagactagaaaaaattgaaaattttgaaatcatgtttcccactcccttctcccaggggtattattttgtaaagtctttttttccccaataaacttttcaaaccccatttttcgcaccgtgaatgttatttttattgaattctgaaccgttttgagtagattagactagaaaaaattgaaaattttgaatcatgtttcccactcccttctcccaggggtattattttgtaaagtcttttttccccaataaacttgtcaaaccccatttttcgcaccgtgaatgttatttttattgaattctgagccgttttgagtagattagactagaaaaaattgaaaattttgaaatcatgtttcccactcccttctcccaggggtattatttgtaaagtctttttttccccataaacttttcatacccatttttcgca

SEQ ID NO: 26995 - DNA, 1288 bp, Heterodera glycines
  unsure (1)..(1288): unsure at all n locations
cttaccnggcgatcccccaggtccgtctgcgcctggcggcctcttggggcccggctctccgggcggtgccttaaatttggcgatttgtaatttgcgcaattaaattagaaattttgtttgttccagcctattgtatcagtctgctacagtatctataaacattttgctacagtacttcgcatgggcactgcggcgggaacagcaaagacggctcgggcccgggcggtgaaggcgggccggggggaccaagctctaaaattttagttggcatttaaacattagatttttcaattttgaaatccctacgtcctggctctccgtctattccacgcaatccgtcacggcccggcggacccgtacgaccgggcggtccgcgttggcatgtgcctaaatgcggaaaaattgaaaaattgtgtgaatttggcactaaaattcagagacaaattgacgggtcattttataaaaattccaatttgatgcattttccttacagcatcccgtcgatggcgtctccacaaattcgtcacgcgcccctcgcgcgtacgccgattgtggcacatcccgcgcggtcttttctttggactaaattttatcatatggagtgaacgcggcgtttccttttcccgctatgccctctttttctctgccctatgtactaccttcgctttggctgatgcccctgcactctccgcgcgcggtgcattctctttgctgctgctgcttccgccgcgtgttgacgaagtgccgccgcttttgcttgcgttcgacgtcgccgccgttttggcgacgccgccagtggtcggcgcctggggcgaggtggcaccaccaccgctgccgccgagtcgtccgccaatgccttccgcccgctcgtccaccgggtcgtcccgcaacgccatgtcgtgcaaacggcgcgaccaatagtcgccgagcgtgtcacgcttctccaactggcgacgctggattgcctggagacggaaattgcatgtttaagggtcaattagggtcgattactgccaattaaaacatcaggtgccgattttgcccctatttagggggaattgcccttatttctgaaattttgccaccgatttaatccccggcactttattttgagggccttttcaattggcactttccaattgtcaaatgcccactttaccatgttggccaatcgcgcggccgccgcttcgccgccctttccgcccgttttaatttcgaacatttcctgcaatttttgaatatttaaatttatttgtttggcgttttgcttttcgccccaccttgaaca

SEQ ID NO: 26996 - DNA, 1014 bp, Heterodera glycines
  unsure (1)..(1014): unsure at all n locations
tttttttttttgttgttgggggggggggcgcgcccccccccccccccccccccccccccgcccctcttatttgggggagagaagggaagatgcaccacaccaataacacacacccccacccccccccccccgcaccccacataggggggggggggggggggggggggggggcgcccgcctcccgcgggggggggggcgccccaccaacccacaaaaaaaaacaaaaaaaaaaaaaattttattttttttttttttgttttttttttcccccccccccccccccccccccccccccccccccacccgagagaggggagaaagaagagaaaaagagagaaggggggggcccccccccccacccccaccccccccccccacccacctttttttttttggtgggtggtggtgtgtttttgttttcttccttcctcatcacaagcgagcgccccacccccccacaaacaaaacaaaaaaaaaaaaaaaaaaaaaaaaaaataataatatttttttttttttttttttttttgtttttttttttttttccccgcccccccccccccccccccccccacacaaaagaagggagggagggggaggggggggggggggggtgttttttttttttttttttttttttttttttttttcgacaccaccacacccccggccccggcggggggggggggggggggggggggggaaaaaaaaaaaaaaaaaaaaaaaataatatatttttttttttttttgtgttttnccccccccccccccccccccccccccccccccgggggggggggggggggggaggaaaaaaaaaaaaaataatctttttttttttttttttttttttttttttttggaaaccccccccccccccccccccccccccgcggggggggggggggggtataaaaaacaacaaccaccccaccccccccccactctcctctctactttaagcgggcaggggggggggggagcggaaaaaaaaaaaaaaaaaaaaaaaaaaaaaaa

SEQ ID NO: 26997 - DNA, 1246 bp, Heterodera glycines
aaattccaaaatatattttttcaactaaataattttccaaattaaatttaatagatagttgctttgatcggcgcgggattttgggatttgcgggggggggggggtcccatttaatttcccgggatcagtgaattacaattttatgtcgggtcccttaattgcggtgcattttgcataaatataaatttaaatttcattattttccccacctttttccgcctttggagacatttttttgtctggctgtcgcattttattggagctgatgacgacgggagaaagaagggatcatcggctgaaaatgggggcaattggtgcgacgacggcgccgcaaaaagacgaaaaggcggcaaaagggggaggagcaaagagaagagggcgaaagtgatgccgacgccgctgaagaagactgaagttcttgttgttgctgcgtgtacaggttgaaaatgttggcacgggagggaagcgaataagagagcaccaaacaaatgccacggcacgtgtgcaacaccttaaatggcactaatgataaaattaaaagtagacaactaatgatgttcgagagaccttatcagtcttgagtattgtaaaattttacagggaaattgccgatggggggggggagggagaacaaggcattacatatggaagaagctcagtatttgaagtttaaaaatttaagaattttttgaaaagtcagcattggcattcccgccatgcaatttaactaaatttttttaagaaatggataaatttaatgacatgtttcgtattcaaaattaaagttttattagcagattatagcaaacctcactgctgggtgtgtttttgatcagagatggcatttaaaaacggatgcgaaaactatgcaaaagtcaccccccccccgggttaaaatgcgagcaaaacaatttgggatcgatcagtaaaattgcagatgaattggtctttggcttattttaaacaaatttttctactgattggaaccatcgggagcagcagatgttcgctttggaaatgagcacaaaatatattagtaattaataaataattaggggaaaaacaacaaaatgatgattaattgttggtcaaattggaatcattttttaattaaaaatttgttgaaattgtttataatgaccccattgatccattgattcggcttttcactcatcaaagtcatcctcttcaaaaaaaagttaaagcaaatcgacaaaaaattaatcggcttcttcccatcaaaagg

SEQ ID NO: 26998 - DNA, 1465 bp, Heterodera glycines
  unsure (1)..(1465): unsure at all n locations
tttaataattgctttccctttctctccgtccgttcgcttttttccncacttttntagggtttttaaatgccttggcactgtgtttaatcattgtttttcctaattacattttatgtccctttgctctgattgctcagtgatcgctgcgtttgttccgccgccaaacgctgtgccgttgcgaaaggaaataatcggagcgtggcaaagaataaataaaatgatgatgaaaatcactagaaaaagcagaagaatggcgagagtgatcggctcgaaaattttcattaatttctttcgcttgcggcggcgatttgagtcttaatttgttttgggttttaaagcccaaattaattagtgccatttacttttcgaccgatttaagagcccatttccgtcccaatcaatttgaattgcttttgaaataaattggagcaatcgctttcttctcgagtaattctttcctccgctttttgtctgatcgttcgcacaattttcacagctaatacattttttgggctaatgattcggaagaattggttatatatttgaaaaaatatatttaattacttggcttattaattggaatgattcttctaaaaagtcctttagactttgttccgtcaaaacaattcgctctttcggatcactcagccgaattcggtaacgtttggccaagaacagaagcacaaaactcagatgctttcgcatcgttttgacaagcagaaaagcgtcaacatcgaaaaaggaaacaaattaataatggtaattaattaaaagtgttatttattcacccggaaataattgcaatttctgtttggcattcattgcagtgacaaataaaccattgagcacttcactcaaagcgggatcattgtggacaagcatttctcttctacttttgataaattcaaattcatcatccatggaaggaggaacaagggcctaattaatggtggtggactcattagttaattaattaattaagcggttaacttactcttggcaatgttccaaaaactgcctcaaatattcgctgcttttggctcaactcgcaaataaactctttcaatttgaagtccgcgctattgagctcaatcttttggaattgctcatgccaaaaggctgtgtctgctaattgggcgggagagaggcggcgattgggcccattttgggcaaaacaattgaaattttgcatttggcaattgaatgatttagcaaaaatcaacagaagacagaaaggaaaagtgagaagcattttgggaagtagtagaaggattgaattagaaattggatctgctaaaggaaagaaaattaaattaaatgaaaataaaataaattaaattaaagttattttttattggcaacagaaactcttctttaaatattttatgaatttcaattataatgaataacaaccaacgaattggttatgccatttgctcgccttttattgtgcgcattttggggg

SEQ ID NO: 26999 - DNA, 2189 bp, Heterodera glycines
  unsure (1)..(2189): unsure at all n locations
tgtacatatgtaatatgtagaaaatcccgaaatatgtacttaaaagtcccaacttttgtccgcaaacacaaaaaagaaagtgttttcccactatttagagcatgttagagcatggagaagccaggaaaaaatatgtatttaaataaaaatgaaagccgtgtttatcgttgacaaaatttcattatggtttactactgtcaattattcttgattgtgagattacacgaataggtggcccattttgccgaggtacgacttgattttggttgggagtttgtttgaacacaaatggaaattccttttgaaatgcctgccgatactccgtactaaactttaaaaataattattaaaacatttttaattaaaatgacacctcgtaaaatataaaatgggtccgtttgacactgcgccaatgttcataggaattgcggccattaaagcgaaaaaccaaagagtgaccggagaagcaattggaattagcagaaagtaagtaattgctgagattaaatagccgccgatattcacagtgataatgcaaaaaagggcacgaaaagtgcgacgattaaacgaatcagcggacggcaagcctatattttttattttaattaccatttattaggttgaatcgcaggatcaaaaaacaccagtaaaaaagcacaaaaattttgataaaaataaaataccggcggtgtatcatatttaatatgttttacctgatgcttttatacgtattgtaatgccaagaaagatataaatggcaaaagtcattatagtaaacaagttacttattgtaacaaacagaggaatgatctgaaaaatataacacagttaaaatatccgacaaaaaagttgccataattttttcctaagcaactaatttaaacaattcttggtattgttcgatagatttgagtgtcctctattaacaaaaacgccaaaattaaaaaaaaaattatattgaatcttttttgaaacctggtctttggttgtttacaaaaaattatgaaaatttttgttaaaaattcgggacctgaaaaaaccgggatttcccgccccggtcccgctcaactctaatcagaacgaaacaatattaattattacccttaagacatctatgtatgaaccagtgaccattagatcgccgtcctgttttgcttcttggtaactcacaacagagaaaaggaatccatatgacaaggaaatgacagtagtcattgccaaatacagtcgcgtttttaaaaagtcgtgactaaaattagtaattaaaaattaaattagtaaaaattttttnttacatttccgaaaaagcaattccgattagtcggtcaatgccagtgaaaaacatagttggagtgattgcacctgaatttatattttaatataatttttgaattattatggttaattttttaaacatatattaccgagtccaatcgtggaaatgaaaagaatttttgctgccagacgattctcaatgaaattctgtccagaaaatgcggtgtacacaaacagaaaatggccactttgatgaagcaattcaaaaagggaacaaagtgccaaaaggtaattaacggtgccacggaatgacctaattaaagtttttcaaaaaatttaaatcattttattcccacgcctttcattaagcacatactttgttaacaaagtcacaagaatgacagaagaattcaaaataatcccaactgtagcgatgagtccgtaaatcaatccacatccaattagtgaccagcttggacggacatctttgaaggccaaataaaactaaattcaaaattatttaaaataatttaattatattaatgataccgtgttgttcgctgaggcattcatttaagcttttttaaaatttaataatgccaatgcaatgatgaattggttgaaaaagtgcatgttcgttcaccttaaaattaaattaatttttttgaatcggaaatgtttatgattttctgtctgtccatcggttctccgaaaattttttagtattccatttaataattaatttttaatttggtggcaaaaagtaatttaatttgaataagaaatgaaatgcagcagctgttagttttatgaaattacaacccttatttcttaaataattaaattgcgctttttggcggtgtttgtttagcttcataaatttgacaaatggtaaaaaaattaaatatcttttt

SEQ ID NO: 27000 - DNA, 1441 bp, Heterodera glycines
atttttgacttcagcccccccccccccgaagccatgggtctggctacgcccttgccgagaatgtaaaatttggttgcttttaagcaaagtataccatgtttggtcgataaaatagctaaagactattcaaaatatgccaaattatttggaaattaattgaattatttttaactttggtatggattaattaataaataatgaatgctttacatattttgttcattaatttgcctttttttgtgaatcattcactttccatccaaacaaatgcttctcgttctgctgcctctgttctgatgattaattgaaaatgatcataattagtgactccatttttaggcacaaaaaatcgcgaaataggcaaataaatttttttttattacgcattactcatcagacacgaaagtgattggacggccattgagaatggctttattgtctgggatcagcttccagtccaccgggagggcataatggaccattaagagttgccttcctaggaccaattgggtcccgttgtctgaccatactcttttgggagtgcctcgccttgcgacaaaacgctggaaagcggctagaaaatcgctggcactgaacgattcgacctcaattgcacttcctttcattcaaatccgatgctaccaataagaaaatgtggctttatttaagggacgactgaagtgattacaaagaaaatagcgaacattaaatacgagtgaatgggaaatgtgatcgatcaattatcgtgggatggggcgatacaataagcaaaagggaaataaatttaattttttgaagtatttcactaaaaaatttttactaaaattttcacctttagaaaaatagcgatttttaaaatttaagtaattgaaaaaaatataacaaaagtttggataaatagtctgtgactaccattgtcaaatgttcccttgacgtattggccttttatttttatgataaaagtcaacaaatgatccgcaagcaattgctgcaaatttggcaaatattgttactttactccgacaatgatcattctcagtttcttggaccgtaactttttttattgctcaatatatacattcttggcgtaaaaagaaggcttaaatctattgaattttttctataagtaaatctgggtaaaattattcttaaataaaattgaaaaaggagaaggagaattattcttttcctcagtgtattcttgttctaatgcagtatttgctagtagttagttacggtgtaccgacatttcgccaacttgacatctcgccaactgacatctcgccaactgacatttcgcccactcagccaaaaacattcatttcgccaactcaacccaaaacattcatttcgcccactcagccaaaaacatccatttcgcctactaagccaaaatctgacatttcgccactgacatttcgccaatagttaaaaaaattaa

SEQ ID NO: 27001 - DNA, 1254 bp, Heterodera glycines
agcttacctattttgcttttttgtttctcgaatatttgataatttcttcgcagttttaaaattttttgtatttagacgaccatttcgaaatttctcttgtccattacttgcctattcttattattttcttattcactataaatacacagataacctttcatgggcgggaattcgagtgtgccggaatcgatggcgaagaaagttgacgaaaaccaaatcaggaaggaagtgagtaagcagcgcagcagcggcttgccgatccctcccccccccctccgaaatttaaatttgaaaaggacaacagttgaatgtgttttgattttaataaaataaaaaaaatttccggtcgccagaaccgtgttaagacttttgcggcctgctgaaaatcggacatttgcggcccgacaaatgcggttggacatttgcgccttggacattttcggtcaatttcttaagggccgtttttgaatatttgcggcccgacatttgcggcctgctgggaatcggacattttcggacaacggaacgccaaattatcactttattccaaaaacgatatttgctgcccgactttttcgaccccaaccaaaatagggttcatttatcgaaaatcccttttcctcttaaaatttacgccgaactttattcaatttttcaaaaattgatgtcaaaaccccaccagagcttgaaagttgctagtcagtctaccaactcttgcagcggccagttgatactgtagagatctgagatttcctaatgatgttcatacatctttctccatcattttgggagttgtttcgttgatattcttttcctcctcttcgttgcttccagttggatgggggttaggattttttttagaagacttgaatcggcttattagaaaaagcatgaaaatcggttaaattggatggaaaataattttccgaggtttatatctttttggggtcgaaaaagttgagccgcaaatgtcgggcggggacaggtagggagcacatagggtggtggggagagagggacagacatagggaagggggtaagggaaggggcacggctcacaaaaatggaaagcagccgtattgcgacatttgcggaccatattttcttgattgaagtttcaaaaaaaaatttatttttttcttaaattggatgatcatccaatttgaattatatgtgatttttcggagttaagcaaattagggcgaatgaaaagataaaaatttataaagtttattcaataaagttcttttttca

SEQ ID NO: 27002 - DNA, 1511 bp, Heterodera glycines
tggcttttaactagagaccgagatttccaaaagtgccggatcggaccggtctgatattttcagaagcaaccggtttccgggcccggcctctcaaaaaccggtgaaaccggattttcaaattgccgggcccggaaccggtttggtaaaaatttaaattctcacatgtatttaaaccccaaaatcgacaaaaatcgtgccaaatgttaattttttttgaaaaactttgcgataattcatcataaaattgaaaaatcgcttaaaatttttgaaatttctgtttgaaatttaaaaaaaatttcgagggaaataacagaagagataaatgaattgcgtcagatagcaccaccggggaaaatttttatttgaggtgaattttatcagattttgacaaaaaaaaatgctttttagttttttgattaaatcttttaccggaattgtgtggatttttgggacacatttcggttctattgcagtttacactaccataaaaaaagacacgaccataaaataattttttgaaactttaatacactataactttttctagaagcatccaaattaagcattattggtatcatttgatagccctgagggtcctctatttgcctttaaaattaaaaaaatttggttatgtttcaaaaaagttgtggcttgtaaatttcaaaaattgatttggtaaacctttttgaccacaacttctttgaaactcaacgaaattttttgaaattttacagaaaaatagaggacactataagctatcaaaagttactaagaatgtttaatttgggtgcttctataaaaagttatggtgtatgaaatttacgcacttttgtcactcgacacagcaccataatttgtcttggttagtcttttaatttttaatttagcgcgtttgatggatggtattttggtggtagactaagaaaatgggagacattaggcgaggcaaaaataaatattttagcctaactaaattatgttttttttccgttcgagagcggcacccatcaaattggcaatgcttgaaatttcgtcaaaatgcttttacagagatttcggggccccgacaaaaatggataaatcgagggatcagtcaaagccttcgaagtcgcatttgatcaagctttagctttacacttttacaccttcttcctgctattttccatgtgccttccattcccatttccgtctgtttttttagtttacttttgttgtcccttcacaattcccattttatttaaaatcaatttgtaaaaggcttattttgtcccccccctcctgaatgtccaccttttcgtgcaatcttccaaatgaaaaataaaagaaatgttcacgggtcttttaatatttggatacggtaagggacttggtaaggatgagactattaaaaagtttcccgttcctgcccctttttggcataaccgcaatatgggtccctaaaattgcaaaagccatgcaatactttctaccctttttttgtttttttaggtcaaaaaagtcaaacagttgtg

SEQ ID NO: 27003 - DNA, 1185 bp, Heterodera glycines
aaaagtgatcaaatcgaacggaaatccgtgccattttcgcgccgttctcttctcctcgagtcgatgtcatgcaaatcgaaggcatcgccagggacaggttgcagctgaaccgagggcgcaccccgcaccaatttgatgttttctaacacttctgctttgatggcagccaaatactaaaaagaaactgcgaattaattgttttataatttacattcagaacattactaagatagtaatctttgtgtttaagtattgtgaataaaatggctgtaatttaaaacagacgctaattgacccaaaattagttacaaatccctcttttaatacattcctcccccttccacccattatcaaaaagggaaatgtccaattagcagaacgttttttacatttccaacataaatccctcacttctttgctattggcattttctatgcgtttgggcagttcgggacgaagagtgaattcgggtgcaaaatactccaagtattccgaattgtccgggatttcgttgctgatctccgagtctctttccacgagaatggcggtctcgttggcccagcatcttcacaccaaattaccccacttttaatattgtgctcctcttttttcctttgtgtatttttacctcgccacgttgcgcagtgtgtagccgcccccgccgaggataagcaggggaaggccgagggacttgacgaaacggacgcattccctgagggaatgaatttggaagagtattccaaggcaaattgcccaaatggtttggccatagactttttctcaaccactctctcctttctctctctctctcccccttttgtgccattctaaacatacccgtggccgtcaaagctgaggttaaaacagccaagccgatcggagcccaacgaatcagcgccacattggagaacaatcaccgaaggattgaaattgtccacgacggcctgtatgacgggcttaaaaactgaaaatgccaaattttagaaattgccaattttgataaataaatttgcaattaccgctgtggtaactttcgtcgtccatcccttccctcagcggaacgttcacagagaaattagcgccatggcccatgccaacgtcgtacatgtccccagggccttggaaaaccagggaaaggcctgactttccacatttttcccataaaaattgggtcaaacccgggaa

SEQ ID NO: 27004 - DNA, 822 bp, Heterodera glycines
aaatagtacgccaaaattagagatgtatttttctctgcattctctctttcttggcacatgtctcgtttttgagtcggtgtgtttataaatgtcactcaatgtccatatttcggttaacattgcaaatttaagccgaagcttttgccacaagtgcccagtgttcaaatcaagaacaaaaacaggccgaagaaagttccattgcgcaaatcgatttcgcccggaaccgttctgatcattttggctggccgtcaccgtgggaagcgcgttatctttataaagcaattgccaaaatcgggtcttcttcttgtcacaggttcaggcaaagaaaaatgagttccagggccaacagacccacaaaaacacctcttgcacatctatgttcgagaagcgttgtttcaagattaagtcgcgagatatgtcattaggagattacgtagttttgagacgtcatttcgagattaagttgagccggattttgcttcaacataggcgggataagtgaatgctcgaacgaaaacgaaaggttgtcttttagagaggagacaaccggttatatgcttaagacagtaaacaaacaaaaaaagttaatattgttgaaattaggataggccgggtatttgggcaaaaatcgggtctgggtccatgattttcaaccggatccgggcatcgggtccaaccgggccctgaaaaaatccgaaaaatcaatttctcaaaattttttttttatgaaaatagttatatttttaaaaaaacatgaaaaatataataaatatgtttacagtagggtaggtctggacccggaatctcgggcaaaaccgggac

SEQ ID NO: 27005 - DNA, 1245 bp, Heterodera glycines
atcagtaaaatgctggtaaaaattttttctgaattaaccaagaaaaatccgaaaatgcctaattatttgaatgaaacatatatatacaaattcccgaaaattcctcccctggccccctccctcatatacagccaccccggcccattcgcggcagacctccatttgttccgtcaggcccatctggtcaagtgagtcgtccaccacttcgtccgccaatttcttacaccgccttccgccggacggaggtttgtaggttttatctgacaaatgaggaaacaaaaaataaatttttttatatttttttgatggttttttgagtaacgacccggcaccatcaatatttgattaaaaatagacatttgtgttgccgacaaaacccatttgcaccattcaaaagcagatttaaactttttttttgcatttctttgacgtaccctttttcctcttaggtgatggggacggagactcgcttgacggtgatgacaaaaaaaaacagcgatgttcatcgaccaattgctccactgattttgtgccatttttgtgtgccaaaacttggagccatgccaacagagcccagagaacgtctgtttcactgtgaaaagaaaaaatactagttaaatgctacatgttcaacggattgacactgatcttgggtgtatcaaaaattttgaaaattttttggaaaaaaaatttcgaaaaagcaaaattttttaaataggagatgtaattttgtcctgttcctctgaggggaggggaggtataaaaagtgaaccaatttcgacatcggcttttcatttagccaaaaaaatgaataaaatcgaactgaatgtggtccaatccggtgccgaatgactcttcaccgcgcaatggcaattgacggccccgcaccttggcagcacggtcaaaatacggacggctccgcaccttggcaacacggtcaaccgcacacgcagttggcattgaacgggcatcgcctgacaaaatgtgaaaagttaaaatggcattaaaattgcaaaaaaaaaaattattttaaatttgaaagaaatttctttaattttggattgtaaatttaatttaaaaatgaaattttaaataggcaccaattttccaacaaattttctatttataaaaaatggggggggtgggacgagttattacgtacaaaagatcgttttaaatgaaattgtactatgtcgaaacaggaaaaagtaaaacaaacaaaccgactgcgcagcggtggtgtgc

SEQ ID NO: 27006 - DNA, 992 bp, Heterodera glycines
tatgggcccgggtcaccgcgccatcctttcagtcccggcactcccgcatttcctggcattcctgaaacaaaagcattttactgaaattgaatgaccctctttaccaggcagcccagggttgcctggctcgcccttggccccttttacgccctccgaatttacgccgccgtctcccggtggcccgggccttcccgagcggcccggctctccgtcagggccccgtgggcctggcaatcccggcacaccaggggtgccggggacacccttaaggcgtgaaaaagatttttatccacctcttttcggtccttacgtccgttccattgcatccgggcgggcccatatcgccgggcaaacccggcaatccgtccaagccgggaatgccctctcggcctggtgcccctggtagtcctcggtctccacgtggtccttttgggcccatatcgccgaaatcgccttctgcgccaaccatgccgggagcgcctggctgtccttcgggtccgtcagtgcccggcgtgccggcaaagccgcgagggcccgaaaagccgagttctccctgtgacaagggaaaacatcaaattgagagaacgaacgaaagtgaatgtgtcggacacaattgagtcattagtggtcattaactgtgttcttcattggcatttctcttaatatttgtctcgttgacttaccctttcgcccttttcgcctgggcatacgcatgggcggcgtgcatcctttgcatgcaaatgattcgacctgccgcaccggcagaagcagcaaaagtacgccgaccattggcactgtccaaaagtgccgccgccgttggcactttcccggtgcgttgtctttccctctgctgtttttgccgttccctttgattgtcgtgccaattccgttggtacctccgctctgtcaagcaattcgttgtcattgttgtcgttgttgtgctgatgaccattctgacaatattcgctttgtcatcgtttttgttgggctga

SEQ ID NO: 27007 - DNA, 1274 bp, Heterodera glycines
  unsure (1)..(1274): unsure at all n locations
ggtaaatttgttaagaggttgaaaaaagaaaagatnttatgtcaaaaattttaaatttaaatttattatttgtggaaaaaactgagttttcaattaaacagcaactcaatctacgggtgacgagaagccattcaattttgaggagcttgaacctttgggagggcaatgcaaaacggggcaaaggcaatcaccaattaatattcgtaaagaatgggtaaatttaagtaataactaattacataattagtgagtaagaacatatttcatttttacttttgttagcgttccagttcttattttcgagtgttgggcagaattttacaatttatcaatattctaaaatttgctaagccagcacttttaccctgaagatccaaaaaggctgtcgacatcaaatttttatgaaaatttttggttttggtaatgaaatctcttagaatagaatttaagcaattttttttaactaattctagaaaaattcttgatatttctatgttttgaactattttttagtttactgaaaacaaaactccgccaattcgattcgtaaattatgaaaaacaaaacaatgtgacattgcacaaccatgggcattcaggtgaaacagaatgaatacaaaggtttcatcgaaaattccataaaataagcatttttttaaaacgagattatattgagcgtttttggttaaaatttttaaaaatttaatccaaaaatagacctttttaaagagtttttaaaaacaaactcaaaagatttggcacgacagtgccgacaagtgccgctttttgtagttttcataaaaaattaaagaaataagcacgccaagaaagaaaaagcacaaatgtgcggcctctgattctctgattaaataatttttttatatttatttgctaataaaaactaaatttgccaagtggaagtaagcggctttgacacttggcccgagcgacctttcatcaccgacggtggcctgggaagcaaatatttgttgatcgaattccattttcactggtcccaaaagaagaacggaagtgaacatacggtagacggacagcactttgacgcggaggtactgtagacgaaaacaaaagcgagagtgaaagcgagacgacagtgagagagggcaagaaggagacaaacatagagagagagagagagagagagaaagtggagagaaagagagggggggggaggcgcgagaaagagagagagagagggaggaaagataagagagcgagagagagagagagtgagaaagagagagagggaaagag

SEQ ID NO: 27008 - DNA, 1260 bp, Heterodera glycines
  unsure (1)..(1260): unsure at all n locations
atatgcgcataaatatgcaaaaaaaaaaacttgaaaataaagggtgcaaattaatttaaaaattttattcctcataaattttatcggttgttgttgtaattgcaaatcaaaaattcacaaggttttcgacagtgaagctcaatgttgacccactcgcggatccattcaaatttggatttaattttaggcataatcaaaattttttcctaagagatattcaaatcggaaaatatttgaccaaacatggaaaatatacaaaaatctaaaatttgtacaaagaatggcaaaatagcatgaaatatgcagaaaacccaaaatatgcaaacaaaagtcccgatttttatacgcaaacacaaaaaaaagaaagtgtttttcctactatttagagcatggagaagccaggaaaaaatatgaatttgcatatttttgcaactctgcttattaggtagtttgatggcacaacgatttctaagaattctgtccaataatcagaataaaattgttgtctacgcattttccttcggtgcctatcggacatcaccagacccaagaacccattattttcttataaattagttcaaaatcacaaaaagatgaacagttttaggataaattctgttaacaaaatacatttcaaattttcaaaattttcccggcggcgcctattggcaccgccggcttccccctagtttttaaaagcttcgctgcaaaaaaaaatcttaaaaaaaatctgattttttgattccgattctcaaaattttaaaaacgatcatctgaggcgaaaatataaaatggtattaattaattaaattataaaaaaactatttaaagctatgttgttaaatgttctatgatctaaaatctgattttttgggcatgatattcgaattttataaaaacctatagttccaatccttatttttctcaatctaattgatcattataaatattagataagcattgaacaaaacttggcgcaatgaaaaaaattgagttttatcaaatcccgataatcccgcgggatcccgaaaaaaaattctgatcatcttttgaaaagtcgagacgcctataggaaattctgtagcaaattttaggcgtggcagctcaaaaattacaaaaaatttcaaactcaaacgaaagttgattaagtttatgataataagatattaattaaaattaacttcgaatattctgtgctactatttcatgaagaatcatgttccnaattaatgtaacttatttttctacaaatttattttc

SEQ ID NO: 27009 - DNA, 876 bp, Heterodera glycines
tgttgtgtcgtcgacttccggtggtgctgttgtgccgtcgacttccggtggtgctgttgtgccgtcgacttccggtggtgctgttgtgccgtcgacttccggtggtgctgatgtgccgtcgacttccggtggtgctgttgtgcctcgtcaagggggtgacgcgggaaatgccaataggaacttattatcagccaggtgtgctagggcggtagggcatttcttagtgttatttatcaggaaccacagctgcccggtgtatttcgatgtggcatgtggttggtgattgtcccaactagtggttggtcgcaatgtgttttattatggagagtacttgaacagtttaccattttgttattccatcactgcgcattttctatttattcatcacattgtttttttcacgattttattttatttattatttgttacgattttctttttttttattttggtcttttttgttatgatttggtaaatgcttttatatttgtctctttttgcctctaatagtttgccagaattttttgcattcaaaagagctctggttaatagtgccaataatattccctttttcgaaattttttgttaactttctctaaataacagggtgaccaagttttttttgttgaaaactcaaattccaaatttccagcttgtctgtaattaattatacgtatgatttttttttttcttaggtgctgagaacgatagaaaagcttaaaattgggcgcggaaaagcatttaaaccggtttaaaactcgaaaatttggatgaaaaagagggctcctgaccttttaaaacgctcaaattcggacaaatttggtatcattcgaaagctcttgatgagctaagtctaaaaaacaaggtataaactcg

SEQ ID NO: 27010 - DNA, 49 bp, Heterodera glycines
ccgtggcgcagcatgcgcaatatgcgtaatcgcatggctcacggctatt

SEQ ID NO: 27011 - DNA, 872 bp, Heterodera glycines
ttgttggtgttgctgctgctgctgacgaggggctgttgttgcggcgctctgtctgagagccggaggaggcacttgctgcacaggccgttgatggtgaacgccgccctcgccggcaacaacattatcgtgcccatccaaatccacggcaccgctccgctcccaattcggtttcccacgtctaaacaacggtggcgaataacagcctaaggattcgaatttgtcgctttatttgttcttttgggtaataggtagttaaacacagattgaaccttccctctttttcgaataaaaatgcaactttcaaagtcctctcaaatatgtttgctgctggggcttctgctcacgaatatgatcaggttagaaaatcattgatttgaaaatgacattttcgaaaattttgatcaaaatgtctattaggctaaaaatgagacgacgttaacagtgagatgatcatcgaacaatcacaccaaacacaaacaatcaacatttattaaccaggcccgtgaagaactgataatagacgagcctctcatagacttcactgttttccaaccgttataaaataggaatatttgatcatattgatcagaatttcaaaaatctctgatttccaaaatcaatgatagcaagtctgatatcatattcgtgatcagaagccccgaaaacctccgagttgtcttttataacagaaaaagtcattctccagttgtaccccgtttcctgaggatttctgctttttacagcgaagcaaggttttaacctttttgagctgttgtagaatatcgacatcaacaccctcatcaaggaatgcttctctcacttgaactatcacatcattgattacgcctcgataagtgtcgtctttttattag

SEQ ID NO: 27012 - DNA, 2077 bp, Heterodera glycines
  unsure (1)..(2077): unsure at all n locations
catgtttcactgagtgtttcactataaataaattgaacttttcatagaattatttaagaatttttattattattttttgcggcgattatgttctgaacgacgttttggggtgtatcctccaaaattaatatatatatatttttactgaccaatatacgtcaccaccaatgttgtaaatgcgggcacctaacacataagaaaaataattaattttaatgtagagtaaataaaatgattacctttcccaatgcatttacgtgcgtccaacacagcaccagtccgattaatattcggcaattggccttaatagaaaaaaaaatcatttaatttatttttttaaaatttacagaccaagacaaaaacggtcctcagcagtaggtgaagtatagctaaattttttaaatagaaatttaaaatttgttccctggttaaatggggtcatacttttatatgagttaaaatggccgaatggtttcgcagattaaccaagttaagcattagttttttttcaaaatcaaaaaatacgtttttttaatgagccaattattccctttaaaaatacaataagtgcattaattttccatttaaattggtgagttcagcatcacacacccgtcaataataagcgatggtttggaggcgtggaacacttcgccgacccgctggtttagctcatagtatgtgaccttgcaccagaacattggctcctcatattgaatgacggaaatgccattgggcagcgacagggacggaggtgtgctgcaaaaaaggttgtcagaaaaaatgattaaaatagaattctgcaaaatgccgatcattctgcctaatttgtgatgacggaatcagccaaaaaattcacttttattaatttttcgcacaaaaaatgtcgacttcactccctttatctgaacggcccattttccatattaaaatgttttggaaataaataaaccaaattagcaatcggatcgattgaattcgatcacaccaacgggaaaaaaacattgtatccaatcaaccaccaccaccaccaccaccataaccgcactgacttcggaacattttgttgttgttgctgctgttgccgtctttgtaccccacaatcggccaaatccttcataatgctgtcaaaacgggccgcttcataaatcatctggtaaaataaaattataaaaaatatataaaaatgatttatttatttgtcataaagaccgattgcgggtcagacgacttgtttaacacatcattggacgttgactgtctgttggagttgaatatgaactgatgcttaaatttaagattttaatttagtatttgcaacagatgtttcccactcccactgtatccatattttatattagaaaattgttgaattttacaaaattaaaatattgcaagccggatttcgcaataatttatcatttcaattagcaaccaagcaagcgccacctgttggacaaacagcggactggattggccacaaacatccgagcatggactcatctgttggtcaaaatcgtcggacaaatagccctgaggcgatcctgaagagcattcatttggcataatcaacaagtaagtaggggaaattgaataccaattacaatttttaagattcgtgcttatcattattgcttacccgagtgccagttggtaagattagcataaataaaataaaaataacatttctgcaaaataaatttctcaaatttcgattttgtccttaaagatcatcaaaacgagtcaatcattttgtgattaaatctagagctggtcgggaccgggaattttgacaaaaaaccgggacccgaaaagccgggaccaagtttttcgaccgggaccgggatcgagagaaaagccgagaccgggaccaaccgggaattttcccaagagaaaattttttgaaaaaaatttggaaatttgagtgaactttgttatgaaaattgcctatattcaaaaatgtacccataaaattttatattttcgttttgggggacgaattcgaggaanatttgtanaaatttcttcaggngggtgngaatcttgtaattntctgagtcccaaattctgatttttt

SEQ ID NO: 27013 - DNA, 247 bp, Heterodera glycines
ggtgtcatctatgttactagatcggggatcgatccccgttctggcgctcgagcaggacctgcagaagctagcttgatggttatcagattgtcgtttcccgccttcagtttaaactatcaggagtggttcgtaccgtgggacgtgggtgttggaagaagaacagggtgtggggagtatgagtatgatgttcaatatggataaaaagaaagagtaattaccacttttttttcctttcaaaagtgtagat

SEQ ID NO: 27014 - DNA, 1814 bp, Heterodera glycines
  unsure (1)..(1814): unsure at all n locations
ttgtaatttggttttttgaatgttaaaatataaaagcttatttaaaatcgaaatatatttctgcaaaaactccccatccataattttattttacaatgtttggacaatggctagagaccacccaaaaaggcaccactttcttttgttnggcaatgatgaaaagagttnagagcatgagaatgaacaataagcttcttttntgaatcacatcacagaaatgccattttttcatatctgaccgattaatgacagtcaacaaattcaaacaatttaatttcatatttaaataagtcattaacagggctgtcaaaaatatgcaaatttttttttctggctttcccatgctctttatcagggttacccttgaaaatttcccgaaataagaacatcgttggtcaaaaataagattttagggtcaaaaatgaggacattttttaaaacacgcttccaaaactttaaatcgcatttttattcaacaaaatcaagcattactcaccgccaactattttctgacaaatgagcaatttcggcttaaaatgagaaatttatacatttccgaaaatcaattttaagattttaacaattttgtcgaaacataagcaattggtaaatttcagtgcatttaaaatttaaaaaaacatatttttaacaattttttcggcgcatttttccgaaaaatttttgggtatgggtgagggaagagagtccggcggtgtcgataggcgccgcggggaaatttttaagaatttttaatgaattttgttaggaattagccaaatttttcagaaatttcctcttttaaatgaaaataagacactaccccaaatcagaacatttcttagaaataagaacagatacagacagctctaataggcgccgccggaaaaatttttgtaatttttaatgcgatttcttaacgattttgttcaaaaaaagacaaaattacgattttgagctaatttttttaagagaataagaaaccgccgagagaaaaatttgaatatttaactgaatcttgtcaagattttgcatattaattcgcttcaaaaaacatttctttcaaaaattatcattaaaaatctaaatttctccctgaatccaaaaaataagatgaaaataaggacaaagagcttaaataaggacaaatcttacaaataaggacaaagggtaaccctgtcattaatttgtcttcaaatatagcagtagaaaaaagcccctggggattcaagagcagaatggatggagggcggtaaataaaaattttaattatttttcgcattaatttaaaagtgtcatttaaattttacgcaaatgccccttccccttattgacagaacaagagtaaagcattgagagcgaattcctgtgggtttcaggagagaggggcaatctaaaaatttgacatttaaaatttttttttaaatttttaattgtctttttaatttgcacaaataccgccctccccctccaaccccacaaacatggcaatagaagaagaaaaaaaggaattaaagcagcgaacccccaggggattcatggcggcgcaaaataaaaattgccatttttcttttttctttcttttcctctgcaatgcgatgagttgccaatgcttaaattggttctagactttccaaaaatgccaaaattcggaaattggcgtggtaccccgaccacaaaaaaaattcttggaattataacttggagtgccgacctcgtgccccttaaaaatgtaactgacctttcgacccaaaatgcagggatcaggaatcggggcaaggcttccccgaccccccaaaatgccgggattcggaaat

SEQ ID NO: 27015 - DNA, 1078 bp, Heterodera glycines
  unsure (1)..(1078): unsure at all n locations
taatcaaaaagttaaaatttatattttttattttatgatttaataagctccaaaaataaaattaaaatattttattatcaaaaaacttaatttcatttcatattnaatgattaaattatgtcaaaaatttttattaatctcaaatatttaaaataaccatttaaaaaaaaatttatttagatttacatttaaactccaaaaatacgctcattggaaattttattgcctaatttgaatttttttttgataatttgttttttttcaccctttccattgcaattgccactgattttcgccgttgctgttccctcaattgtgccaatctaaatttattcatttttttaaataccaattttcatacattatttttctcactttatgcgtgcattttttgacattgccgatttacgcaccaccgcctccaaatggcgctatttaaaaaaaaaaaattagctgtaaattctaaaatttccttaccgtactgctggaggggctgcctgatgttggcgagccattagcggcatgatgatttcccattaaaaaatttaaaatctaaaaatttattcattcaacaagagagcagagtacaattagaggaaatgtttagtgggaggggggactaaagccaatccatccatacccaactcactcatccccaattcatcaatgcccaattcatcaatgcccaactcactcatccccaattcatcaatgcaaaaatgtcaccgacgcgggtcgcgcaatgcaaaaaaaaaagaaatgccacgacgacgacccacttcatgctgtggatgaattggtattgatgaatttagtttggatgaatgggggggggcatggtccttgttgttaaggtaattccttgtttaaaaaagagaattccaaaatagaaaatccttttttgtccctccccacacatagataaaaatgttaatttgttggccattgaaaatgtgaaagatgaagcagcagctttttgcccgcgggcggaggggaggggggggggcaaacttattgaagcattggcgaaacatgtatacgacanaaatgtttgggggagcgggggggaatccaagct

SEQ ID NO: 27016 - DNA, 1372 bp, Heterodera glycines
ggaagaaaagaaaatttctagaaatggccaattctaatgaagccaattagggcaaacttaatggattatatcccagacaaaaagtggctgattgtgagtctttcggtttctataaatccctcataattgaaagatatgaggttcgcaagtgctaatttgatgctgccgctaggaatttttggcacagatgcaaaaaaacaaaatgaaaacagacccttttggatgatcagcttagtccccaaagccgattataaattggaacttcgatattagcttaacaaagattttttatactaaaagatttccttaaaaaatgattattcattttttagcatgtcaatggcaatgaaaaactgcaaagaaatgccgatgaaaaatgcatgccaaagggtcgtggaccgaagaaggagggggcagtacccgccaagaaatggtcatccgctttacgtgtggtcgctgcgatgacacgcttcaaaaacatcccaagggtgggcagcatggaaatcactttttgtgtgaaattaattaagtttaaattatgaaattaatgaatttgaaattatcaaattatttaaattatgcaattaattacataactttaaatcttcaacaaatttttttttattacatttggacatgtggaaaaaaattttaaattttaattgtttcatatgcttttataattataatttacgaatatgatttaattaatttcagcaaatggtcggatttccttattttttggtctcttttcccatttattaaaatatcaatttatttttggcattattcatttaattgtttatcctgcccacttaattagctgatgttttggtggtgttttccaaatgtttttgcgccacgctatgcgccgtgtttggataattgccgcaaatgccgcaaaaggcacacgcacgcaaattggcatcacaatgccaaattacactttttttttattctaacgtttgttgacgtaaaaaaacgatattttagttttttttagtttttttctcttttatgtgcgaaaattacgaaagtgacatttgctaattacatttaggaaaattttctaatagattaattccttttttatactattaaccactcaatttctcattttatttaattgttttctccttccatcagttttcttttcacgcctcctcttttttctttttactcatttttaattaattttttagctattttttaatttaaatttccattcccttccgtaatttatccgtccgttgtcctcctcattttggccttcctccaattttacttttctgcgatagcctttggagttccggccacatttcgtggccattggaagaatttgtcgtcccattccgcccctgtcgcccccttt

SEQ ID NO: 27017 - DNA, 1689 bp, Heterodera glycines
tttttcgaattttgttaaaatatggttagagttcgattggattaaatggatgtcagactcgtgatcggagaccgaaaatttgacattataaaaattttttttgcaaaacaaaagggtccccccccgcctactttttcgaggggggggggataaactgcacaattgccgtaatagatagaaaaaggcggaaaatgcaaaacccacttattttagtgacatataatttgaccatattggccccaatgtcgtccatcatttccaccatcaatttgaactcgtcttcattgctcagaaggattcggtcgccggagaaatcttaaatgaaagatttctcgttgatacaataaaataccaaatgagaaaatagaaaaattagtctggtttgtaccccccatttttggaaaaaaattacaaaaattttttttgctataataataggtgctgatcatgaatatggcatccttttgggccaattccgaatcccggacccgaactcgaacaaaaagtcgaaaatccaaattttcgaatttcgcatttttggttcaaaacaaaaatcggtttagatatttttattggaaggtttgtggttttcaaatgtttccatgtgtttacaccgggaaaaacccaactcgaactaggccaactcataatgccccaactcgtactgtttttgacaaaaaatcgtcataacttttgtaaagtcgaccaaagtaaacattcgtggtattttcgactttttgttcgagttcggatccgggatttctgaattgcccgaaatggatgccggattcgtgatcagcgacctcgaaaagcccaggaaggggaacaaaacacagtattaccaaaagttcaaatgtttgatttttgcacttttcgtcggtcgcccaattttgcaatttccggcacagtagaaaaaggatcatggatctgatttcgcatttttgcaaaatcattgactttaatattttcatcaagttaattttcacattgcggaaacaactcgtagccaagcggattgaatcactgactaccgcctctggcctttacaaatacatacataagtaatcaatagttaattaaattccaaaaaccctaaaaattcagcttcttcattcatttatgtatgaatagggctctaatttttagtttttttatctacagattataaatttttagaacaaatttatttatatacacaaaaaatagaacatttctcataaatcaaaaatattggtaatagttcagtttgtccccccccccttttttcgaaaaaagcgatatgtttttttctcaaagaatgttaaaattgatattgggaggcctgaaatataacagatacatttttaaacaaataaattgtaactaatattttttgacccaaaaatctgatttcgaaatttttcgatgattcttctaatcatacccaaaataaaagctattaaatttatcatttatttttcagtttttgatgaacgtgctcagcgcctcaaaacacccctagaaacgtgttataagaattttcagaaaaaattagagaaaaaattttcgggaccaataatctagatgattgccccaaattggacaaatttggcatcatttgaaagctcttgaagaaggagaagctttttctaattttgtttttgaataactcatgaaaaagtgtataaaacataaaatgactggattact

SEQ ID NO: 27018 - DNA, 1341 bp, Heterodera glycines
ccttttccctctctctcttttcatttatatttcttaatttcggacttttgtccctctccatccgtcactcctcaaattgtattaatcacttccatttgccattttcccattcagccaatgtttttgaagctgtcccccctctctttgcttctcttcctttcgctccttttgctcatttctttcgccattggctacagccccgtgggcaatgccaaaagtcacccgctgaaattgcgcaaacggatcagttacagtgacggcggagtgatggcactgaacagcgcggcgcggaagacgcgaatgccgacgcgcaaaatggtggagaagccgcggatgcgctttaagggaggtgagagaatctggggaaagccggaaatgccgtaatcagccgaaggaaaaactgatttaaatcaccattcggtccattgaatgatcacctttttctctcaggaagcaaattggcacccaaacacagcgcagtgacgacacaacgccaatgagccaatgtttgaattcggaaggacaacggcacgcacagagagagaaagaaaaatcagtcaatggcaaaacattggccaattcctttgcattttgtatttatattcagagaaaattaataataaaaaattaatatttgaattcaattggaaaaaatcaaaaattttattaaaagtgattttattacatataatacaaaaaaagaaagaaaaaaatgggactaacgaatgctaacaaagaattggtcggacgggagcatcacaaagaaatgaattgtgagcaaaataccctttaagctgtggattggtaaataaagtcgagatctcctttatcccttttatctcctttatcccctttcctcctctccctctctctctctcttcaatatttcttttcaccctctctctcttccgccgtcttcttctcatctttcttcccattttcattgctttcctttgctttttcgcgcactgtgccaatggattcgattgtggcaattgtctgacatgaggagacggagcaagtcgatgggccacgtgcccaactttggacatcggctgaaccccacctgaacggggcgcggagtttggcattgtcattcattttcacccaccaactgaacacaaccacgggaatgagggcgattacggtggagacgtagaagacaatgttccactcagtttgggtgccattctaagtgggaattaaaatcagatcatttgctgattgtgatcagggaatgatcagacaataatcactgctccgattagtctctgataaggcaattccgaaatcaccgtctattctgatcagattcatatctgatcagtttctcattttgat

SEQ ID NO: 27019 - DNA, 951 bp, Heterodera glycines
aaaccaggttcagaattcaataaaaataacattcacgttgcgaaaaatggggtatgaaaagtttattggggaaaaaaagactttacaaaataatacccctgggagaagggagtgggaaacatgatttcaaaattttcaattttttctagtctaatctactcaaaccggctcagaattcaataaaaataacattcacggtgcgaaaaatggggtttgaaaagtttattttgaaaaaaagactttacaaaataatacccctgggagaagggagtgggaaacatgatttcaaaattttcaattttttctagtctaatctactcaaaacggttcagaattcgataaaaataacattcacggtgcgaaaaatggggtttgaaaagtttattggggaaaaaaagactacaaaataatacccctgggagaagggagtgggaaacatgatttcaaaattttcaattttttctagtctaatctactcaaaacggttcagaattcaataaaaataacattcacggtgcgaaaaatggggtttgaaaagtttattggggaaaaaaagactttacaaaataatacccctgggagaagggagtgggaaacatgatttcaaaattttcaattttttctagtctaatctactcaaaacggctcagaattcaataaaaaataacattcacggtgcgaaaaaatggggtttgacaagtttattggggaaaaaagactttacaaaataatacccctgcgagaagggagtgggaaacatgaattcaaaattttcaattttttctagtctaatctactcaaaacgggtccgaaattcaataaaaataacattcaccggtgcgaaaaaatggggtttgacaagtttattgggggaaaaaagacttttccaaaataatacccccctgagaaaaagggagggggaaacatgattttcaaatttttaattttttt

SEQ ID NO: 27020 - DNA, 1797 bp, Heterodera glycines
aatctactcaaaccggttcagaattcaataaaaataacattcacggtgcgaaaaatggggtttgacaagtttattggggaaaaaaagacttcacaaaataatacccctgggagaagggagtgggaaacatgatttcaaaatttttgttgaaatatttgtcgtgctctgaagggcgtgggaggggggggggcggagggcccccccacggaggccggaagaggccgagtgagtaccttcggtgcaggaaaattattaaattttaaaattttttaattgctttttaaatatgccaaaaaatgtaggcttaacttttttagtgaaaattcgatcactcatattttttgctaattgagcagaagcgtaccaaactatgcagggatactccccggtaaaggactaacttacactgaaatgagcgccgagctagctggctcaaaaaaaattttcgaaaatctgagtctttcgtttttatttattttttgcaaaattaattcataaatattttttcagaaagggttctgaaacgcaccaaattttatttacaagttaataaggctctctgatgctttttctatcaataatggaggtgaataaaattttaaaaattttttaattgctttttaaatatgccaaaaaatttaggcttaactttttagtgaaagtttgatcactcatattttttgctaattgagcagaagcataccaaactttgcagggatactccccggtaaaggactaacttacactgaaatgagcgccgagctagcttgctctaaaaaatttttcgaaaatctgagtctttcgtttttatttattttttgcaaaattaattcttaaatattttttcagaaagggttctgaaacgcaccaaattttatttacatgttagtttaggcactctgatgctttttctatcaaaaagggagatgaataaaatttttaaaaatttttaattcctttttaaacaggccaaaaagtttaggcttaacttttttttcagaaactgatcagaagcgcaccaaactttgcagggatactgaaaggaagagaaataacctattttaaatattatctagtcagttcatttaaataatttttatccaaaaaatttttttttgggttttcggggcagtccccctgaaccgatgcgcccagatttatggggagaccgaatccttcgggaatagcttccctatagcctgtactttaattctgcgttggatttttgctccccataattgtttgagtaccccaaacggacacctgaaaaaatcgattttttttgttttcggggcagtccccccgaaccgatgcgcccagatttatggggagaccgaatccttcgggaatagcttccctatagcctgtactttaattctgcgttggatttttgctccccataaatgtttgagtaccccaaacggacacttgaaaaaatcgatttttttgtttcataaatatttttttcagaaagtgctctaaagcgcaccaaattttatttacaacttaatttagcactctgatgctttagtatcaaaaaggaagatggagaaaaaattttttaaaaaatttttccttatattttggttatatcgttttgcttttggtggggtgcttggaacagtggaatcatgcgcacccgtccgatctggcaagttaagcaacgattgctgactagccaaaaggttcggtgccgtgatgaaacgaaccagcactgcttaccccgcggcacccggcacggtcccccgaaggaatggatttaattaaattctctccttcggggatttttttccatta

SEQ ID NO: 27021 - DNA, 1686 bp, Heterodera glycines
  unsure (1)..(1686): unsure at all n locations
gaagcaatgtatgtgccagcatcattagtaaatggggatacngaaatatgaanggaggttaagaagcgagagcagaggcgaaatgcnaacacaaatgtaatgccaaaattgtaattttaatttttttattaaatttaaatcctttcaggatttggccaactgttgggcaaaagagaacagcagatgaactgatgaacactttttttcccattttcaaccttgtatttcctagggattattggatttggaaactttcatatgtttattctcctaaattgtttattttttttgttgaaaattctcttttacaaaaattttttgtattctaaaaaatgttttggctgaacacagaagccctggggggcttataatcgagtaaataaggtatattatttaaatttactgggactgcccgaagcacaaacagcgcgaaaaatgaattatgaaattgtcgattgcgacagatcgccacaatttgcaaacagtaaattaccaaagaaggaatactgatgcaaaatgagaaatagatgaacacattggtgtattggagaatggattcaatcatcggattattttcagataatttatttcactaaattactttttaattgcattttttttcatttcaacatttaataaagcttggattgccatataaaataaaagttgtagcaagacttcataaatgtgcaattatcagatatttaaagaaaccagcacaaatttggtattcgaaatggaagaaggatttcaaaatgctttgtatgaccaatactgaattgcagcaccctctcatttctgcgttgtctctctcccaaatgatatttcccgccaaaagaaattttaaaaaattaccgaaattttaaaattagcgttcatttatacgttgttggcaaaatgcacattgttaataattaaataacaagttaaaggttgatctccgatgaaaaaatttttttcataagaaaaagttgttttgcctttctctagtccctatgcataaaataataatttaaaactaatatttgaaaatcaaagtaccatactcgcagaatttgaacctccggggggttctatttttcaagccccctcaaaaaggggttctaattcagtaaatacggtatatatgtcggtcagggtcgttttcgtaccgccgttttcgtcccgccgttttcgtacggggacgttttcataccgcaggggggtcgttttcgtacgggggacattattttcgtacgagttcttgtacaagcgtcagattcaaatagaaaaacttaagaactaataaaaccaaaatttatcattttttgtttcccattcataaaattttgtagaaaattcataactttaaataataacaaaatccgggacaaactaggtcgcatctcataatttcggaaaataccagcgagaaaattgttaaggttttcgggattgacattggcattggcataattgtgatcattttgagggacaatattgttattgatatcgttatagcgttggacgagacgaagaatccgtgcgtcggcatcgcgatacttctttttctgtgcaccatcatgcaccaatttatcattatttagttttgttttaattacttgctgctggttcattttgtagttaataaaagcttaactgtcaaaacattaaaagtaatttaaaaaatattaacaaattatttga

SEQ ID NO: 27022 - DNA, 859 bp, Heterodera glycines
ttaatggggctaattattttcttttttaggacccgagcattttcactgtgctcaccgtccctggccttcgtaagggcgtcgcactcgccgattttgtcattttcccgccgcgttggtccgtcgccgagggcactttccgtcctccttatttccaccgttcgttttttgggcctttctatccgataataagcaaatccaggaaattgtatgagcgaatttatgggtctgatcgttggccgatacgaagcgaaggagggtgggttcagcgcaggaggcgcgtctctccattcgatgatgacgccgcacgggccggacgcggcgtgcttcgaaaaggcgtcgacggacaaattgaacgccggaaggattggggacgggacaatggtggactaatgagggaaataacgagcaaggagcgacctaattaaggcttttatgttcgaaagttcgctcagtttggttgtgaccgattgggccaacgaagaatctgtggatgagcgataccacgaggattggcaaccattgaaaagtcattttgagaggagcaaatgaaagaggacaagccaaggagagagacaggaagagtgagagagagagaaaaagagaaagaggggagagagagaaaaaagaggagagagagagtgagcaagagagagagagaaagaaagagagaggagagagcgagagaaaaagagggagagagagagagagcgagaacgggggttaattagcgacagttggtttattatgattaatgtacgaacgaattaataaatgcaaattgccatgtcttgatactccgcattggctgagaatgacttcattttgccttttatttcggccatttttctccccccccccc

SEQ ID NO: 27023 - DNA, 989 bp, Heterodera glycines
  unsure (1)..(989): unsure at all n locations
tctgacataaaattgacaaaaaaggacataantcgtttcaaaattaacggctgaatatgaaagcgcttaaaaaaataaagaaataaatttaaccgtaataatttttcgcgaaaaaaggaactaaaaagcaaaaatttcccacttttttttttgcttatttttcgtaaaatttgttagtttttaagaaaatttcaatttaaatttcgaaaaactgtttttttttgaagattttcggatttttttgggtaaacaggccaattgataatgggaatttagatatatgtagaactacatccttgaataagctaaacatgcttttcgtgcgtctcatggctcccagagcccgcaaaaaatagtgaattctataaaattattttacgcccaactcataaaataaataaataatttctgagacatttttgaaattttattttcctaaattgttgaggacagcagctttttgacggatagtgccgatgaaaaaagcagttttataagcagcgcagaaagtttgctgatgaaatcatttgaggcgcttcggaagagtttttgtctgcccgaattgggagagaaaggggagggaagtgaaaatagaacagaaaatggagaggaaaatgaggaggaagagaaagagacggaagaggagaaacaaatcatacagaaatattgtgagcagttgaaaaatggagacgaaactgcggaaaatgcccacattttgttcaaaatcaacataataccactgcaaagagatggggtaaaaagccaataaaagaaaaagacactttaaaaaaatttaattttaaagaaatttcataaaaatttttgcaaaaaaatttagggaattttatgcaatttcttttttttaaatcttatttttataaaatttgtattaaagtagaagtgtacggnaccgggactggtactgaaaaaacgggtacaactgagtacccagtcccccgtttgaccattttgaccgggaccgggaaatt

SEQ ID NO: 27024 - DNA, 1551 bp, Heterodera glycines
aactttttgtgagaattacgaattgaaactgtacaatcatttgaggctgaattatggagcacatttggacaacaatcatcacaaggaaaagttccagggaatatttgttgaaatggcacttcaaaatgccaactacgcatttcggcacaattttgacacatttttggcggaaatgctcaaaagagcggaggaagggtcactatacttcccaattctgataaccgataatgacggttcattgatgattgaacagatggcgtttgaatcgtactttttggtaatttcttattgaagcgaatattttcagaccggagagcgcctatttgtagaatttgttagaggtcagccctattttgaacaattttgctgcgatttggaaagagatggtaaattgagggattttgtcatggcccaagaagccactctcgaagaaaagcaaaattatttggcaaaacaatatgagacttacttcggcattttgtatttgatgcgacacaattggcattgtgacaaaaaaggggaggaaattggggaagaaaaaaggcggacaaaatgcgaaagatttcgcaaatacacagacattgtgtacgaatatttgttcaaagtctatgcaaaaagtaaggaaggaattacggtagaatataatgttgtttggcatactgtaggtttaaaattaaattattatttttaggaaattaattaattttttcaaatttaaagctgaagagcctttgttgggtcagcaattccccgtatttaaaccaacgtttaatgtctcaacattaataaatgaagtattgctttatctgcacaaatgttcagtgttattttttgacgaggaactcagaaatcaaaattattatatttttaaaatacaattgcaaaatgggcacaaattgcgcaattataaggctaattttggcactttggaagaatcgctgcgcaaaaaatttgacaaaaaactgaaaacgatgcttaaaaaggcgagagaaaacgaaaggaggacgagagaatggagtgccaattacaatgacagcagcaatttgctgagggaatcgcccttttttcacagagttttgcgggttcgtttcaatttgcgatgcgcgggacagactttttttcgaggcccgggaaagagacattttccaaaaacattccgtaaaacttaaagccttgcaaacacttttcgggaatgcacccggcacggatttcatgattagaatcatattttagggtcctgatccgggtgcatttctcaaaaactacctgggtcaagatcagggttcccaggaaaaccctgacaagatcctaacctgtcaacttcctgttcacccggtcggtactagggttgtgcgagagtctcggttcttggttcacgactcgggaaatttctcgggtttttcgcttaccggtctcggttcccggtctcgagtttttagtctcggaaactgagaaatttttacactgttaaggatgaccctttcggggagtgggggtcgccaggaaggggaaagagagaaaaaattattaaattttgaacatattttttaa

SEQ ID NO: 27025 - DNA, 1371 bp, Heterodera glycines
  unsure (1)..(1371): unsure at all n locations
gacaatgggcttacaaaggtattgcaaaactgaacctgtgatcatgtttttgataaagtcgcgatggccaggagcgtcaataatggtgacatagtacttgcttgtctcgaatttccacaaagcgatgtcgatagtgataccacgctcgcgttcggctttcagcttgtcaagcacctagaaaagtatattttaacgtgaacatgattggattacgacttacccaagcgtacttaaatgatcccttgcccatttcctgagcctccttctcgaatttctcgatagtacgtttgtcaattccaccacatttgtagatgagatgaccagtggtagtcgattttccggagtcaacgtgaccgatcacaacaatattgatatggatcttttcctttcccatttcttttgcgggtttgaccgtgtgaaagacgaacgaataacaagacaaattttcttagcttaaaaaacaaaaaataattgcaagtgcatgtacattcatttacgaaaattctttacacaaatttttcggcagaactcggcagaactcaacatcctaaagtaacaataacaattttggtttttcgaaaaaaaggatggactaatgaaaagataaaatctccctcctatccaattcgtttcactagtccaacgccgaaaacgaacacgccctctccgcagtgaatatccccaacttgccacattttcatttttttaacagaaatacagttttaaatcaataatcgagaaaatgtattaaagcgaatgaaaatcattttataattcaatttttaaaaattctaataatagatcctttgagaatttgaaccgaaccggaacgtgatcggaattacgcagagattttcccggaatcccggcaaaagcgggattttaaccccagtaatcctacccgactttttcaaatttccgggctctacataggatagagtaggaccgggaattttntaaaaacccgggaccggggccaggatcttcaacatggattgtgactcctttttgtcccggtcactttttttttgtttacttatgagttaactgacaaaatatattttcaataaatttaagcatatttatttatttaaaatgtcttcgcataatacttcagttattgatgaaaatcgacgatggagtgacttacgctgtttaacagatagggcgtctacatttgccaattcaggattcgtccctggaatcaaggtaaaattttgtgtaatagtttagatggtaaccatcctttttcaaaaaaaaaaacatttttttctcgagattgttgacttttagtttgtttccctatatataagccattttaagaccaaaaatgcgaaattcgaaaattgaatctccgactttttgctcgaa

SEQ ID NO: 27026 - DNA, 825 bp, Heterodera glycines
gaaagtgaactccgcttcgcttttcaaaaccgacgtggcggtagatggcaaagaaatcaaattcgtactcgacagcggggctgaaataattgtgatcgatgaactatcacatgaagtcatcggcagcccccgactccgcaaatgcaccgaaagtggatgcatgttcgatggaacacaagtcaaattcatcggaaagggagtcgccaatttcaaattccgcgatatttgcatcaaaagcgaatattatgtggcaaaaaggggatcgctaaatttgctaagtgtgcaaatgatggacgcttttggactcctgaacgaactcaaggccaaaattaatgcgccagtaaatctgtgccgagttggagacgagacaagaggttttacaaaagctccaaaaccgtcacaaaatttgacagtcaaagcgcacatcgaccatctcaaagcgacatttcccgacattttcaaaaacgaattgggccgatgtatgaagttcaaggcgcatctgactttaaaagcagacgccgcaccggtctacagaaaggctcgcccagtcccatacaacgcacaagaagcgattgatggagaattggagcgatgggagaaaatgggtgtgattgggaaagttgaatacaccgaatgggcagctccgattttggcggtgaaaaaggccgacggaagtgcacgttttcgcaaatcgacctcagggatgcatatctccaaatcgaattggatgatgaatcgagaaaactatgctcgatttcaacccatcatggcaattacgaaagtaagagacttccttttggcgtgaaaatcagcgcagccatcttc

SEQ ID NO: 27027 - DNA, 1253 bp, Heterodera glycines
  unsure (1)..(1253): unsure at all n locations
ctgttagttcaaaagttataggtagggcgtgtaattatatcgtatataaaatcgcgaaatatggccataaaatatggaccaaaaatcgcaaaatatggacataaatggaaaaaatgtcaaaatatggacataaatttctcaaaattgaatgtaaaatttcttcaaatttattggttgaaattgcatatgagatacatttccaaattttttgactcggtaaggcgctttgacaaagacggctttcgttttgcaattagtcggtcaacattcggaaattggtctcgaattttttcggcaattacgtgcaatcattttaaaagaaaaaaaaacataaaagctaaaatttattaattttttttagcgcaaaatcaacaacaaaagcgaaattttcgcttttctgcttatttttgacataatttattaatttttaagaaaatttaaatttattcaatattctcgagaaattttggcgaaaaaatgattttttgaaaaatttttcgggttttgggctcaaaaaggctaatttagctgctgggggccgttctaatagaggtttttttgaaaaatgccaaaatatggacataaaatatggacaaaatgccaaaatatggaaaaatatggaaatatggacataaatcgcgaaatatggaaaaatatggaaaatatggatatagaaatccttcctagaagcttcaaaccaagctaaaaacatgtttttcgtgcgtttcaggcctccaataatccaggaaaaaaatatggatttccatataattacacgccctagttataggacaaacatacaaatatatttcttttcctctcattttggtgtatcattttcatgtctctaacacataaaaaacatgaattcgctaattctaataattttcgttgcaagggtacaaaatcactttagacttttagaatcaatagaaaaattattagtttttatttagcggtccatgacctgagttataactagggttataagttgtatgatttgcatattttttctgcgcatatgctatgaagaaaggggctcaaaaatagcattcctgcgttaaatttttttgatttggtaaaggtttttagtaaagccccgaattttgaaagtaccgggaccgggcttatttgaccgggagggccgcccgttcaaaaaagcccatntttaccgggcgtcccgggcccgcttttttccaaaaaaaacgggcccgggcagcccggtaaaagcccgccgggcccccgggcccgtc

SEQ ID NO: 27028 - DNA, 838 bp, Heterodera glycines
ttttagttcggcgcagccgatagctgcgctgaagaaattttgaaaatttgagggaatttgttgatagattttgttgaaaaaattaaaataaaaaataaagtttttgggtctttttcttctcaattttccatgttttttccaacaatgttctaactttttttttatgaaaactttaaaaattcatcctcttttatgacttaaaatattttaattaaatttttcaaccatgtttttataattatttcgaataattaattggctacttttttaaatccaattttatatttttgtcagtggcagcactcacgttcaattcgaaaacatctattgcactttccgctgaggagcaacaaagtgccggtgccacgctttccggggatcagttcgagcgccagttaaaagcaatggttgaacagtatctccgagcaacagacattggcacgctcaagcgtgtaactgattgtgcgtttttttgctaattattattattattattaacactctaggcccgagatttgaacatcgcctctctcaggaacggtcccaggatttcggcttggggggggcggtacctcccctcgggcgacgaccttttattttgcggcggtttttccaaaaaacattttatggagtcctttcatttataatgcgatttgttaatgaattttgtccagaaaatgacaaattttgcgattttgatccattttagcagattttcatcaaaaaattgtggatttgttgaaaaaattagagaaattttttggaaaatttgggtgaggataagtctggggggggggggtaccagcaaggaaaatctaaaattttcagcaaactatta

SEQ ID NO: 27029 - DNA, 1054 bp, Heterodera glycines
tcgagcgcctttttaacgtataaaatttttcaaaaataagagatagtcattttttctgggatataggataaatttaaaaattctttgggaaaataaatggcgattgcgcacccccctccctttcacgctcgagagcttttgtaacgtataaaatttctcaaaataagagatagtcattttcttggatataagataaatttaaaaattctctgtgaaattaaatggcgattgcgcaccgcacttcctatcatgctcgagagcatttgtaacgtataaaatttctcaaaataagagatagtcatttttcttggatataagataaatttaaaaattctctgagaaattaaatggcgattgcgcaccgccctccctatcacgctcgagagcttttgtaacgtataaaatttctcaaaataagagatagtcatttttcttggatataagataaatttaaaaattctctgagaaattaaatggcgattgcgcaccgccctccctctcacgctcgagcgcttttgtaacgtataaaatttctcaaaataagagatagtcatttttcttggatataagataaatttaaaaattctctgagaaattaaatggcgattgcgcaccgccctccctctcacgctcgagcgcttttgtaacgtataaaatttctcaaaataagagatagtcatttttcttggatataagataaatttaaaaattctctgtgaaattaaatggcgattgcgcaccgcacttcctatcatgctcgagagcatttgtaacgtataaaatttctcaaaataagagatagtcatttttcttggatataagataaatttaaaaattctctgtgaaattaaatggcgattgcgcaccgcacttcctatcatgctcgagagcatttgtaacgtataaaatttctcaaaataagagatagtcatttttcttggatataagataaatttaaaaattctctgagaaattaaatggcgattgcgcaccgccctccctctcacgctcgagagcatttgtaacgtataaaatttctcaaaataagagatag

SEQ ID NO: 27030 - DNA, 290 bp, Heterodera glycines
cgctgcggacatctacatttttgaattgaaaaaaactttgtaattactctttctttttctccatattgaccatcatactcatactccccccacccttttcttcttccgccacccacctcccccgctacgcgccgctcccctccccttcgtgctccaaccctctcctccctctcttgatagtttaaactgaaggcgggaaacgacaatctgatccccttcaagctagcttctgcaggtcctgcacgagcggccgcccggggatcgacccccgatctagtaacatagatgac

SEQ ID NO: 27031 - DNA, 1690 bp, Heterodera glycines
  unsure (1)..(1690): unsure at all n locations
ataaagcatttatttattaatttntggcgaaaattgaataaaaatcgaaaaatttccattttttaacttatttttgacataaattaacaaatttttaagaaaatttaaattcaatcattattttgacaaaattttgctaaaaaatgtctttttcggaaattttttcggtctttaagagtcaaaaatgccaatttacctcatgggggccgttttaataggggttttttggaaaaatgcccaaatatgcacataaaatatgcatgaaatgccaaaatatgcacaaatatgcaaaatatgcatatggaaagtcatcctaaaagcttcaaaacaagctaaaaacatgtttttcgtgcgttttaggcctcccacagtccaggaaaaaaatggatttccatataattggactccctactaattaggtttgacctttggcgtcgttcgtatcaatttcaattactctcgcataattccacaacggctcgccaaaaattttcatctcaatctgtttactccttaaagaataattaattatgataagtagggatgcgatttttaggcacaaaaaatcgcgaaataggcacctaaaaaggcagaaaaaaatcgcaaaataggcattaaataggcaaataaaaatttaacgtttttaggtagcaaatcacgtaaaaacttaatcaaacaacttaaatttgcttcaattggtttaaagtttttttcgaataaggacaaatttttagtcaaaaatttttatcataaataatattaaattggtggtcaattttttgaaaattttttcaattcttaggggtgtattttctgaattttttttgatcatttcatagggatgtgtttttcgtttttatcgcatttttgttaaggattttttcaaaaattctaaaatcggcacattaggcacaaaaactccaaaaaatttccatttgagggggtggtttttgacaaacgtcccagcaccgttataatagatgggaatacggtgttacaattaataaacatttacagtagtacccttctgccggcgtattgttatcaccaatgaatggttgtttataatcaaaatattgtttactgtgcgggtctctaccacattgcttttcactcttgtaagtaaattgtctaaactcatgatgcacaaatcgcaagcgtttttccaactctcgtccaaaactgatcagtgcacagtccatgtccgcgttgctcacttttctattgttgttgttaatttttatgcagattaattggattaggtcagggccgataccggggcgatataatcactgtctgttttcaggtccccgtacggaatctatcggtcagcaccgttatcggtttaggtgaaatttcttgggttttagggtagctgtctcgactctcggtcatttaagtctcgactaaacgacgaaattttgaaaatattaatctacaaacaaacaaaaaaattgctaaaaagtatcggcggcgcttaacatatgacttggccttccgcgatgcgagatccgcgacgtgtgatttttctgtccgcgctccacccctggtaaccccatccccatcaattaccctgctgatgatattcttgatgacaaaagtgcaattaatccgtgatcatcgcttttatttttctgaattaatgcgttgtcttcgcttctgtttttcagagttgcgttcataattccct

SEQ ID NO: 27032 - DNA, 1729 bp, Heterodera glycines
tgtcaaattccctcctcaactgtcgtgtttccgtctgtgcccctgtccgtctcctgctgtgcctctgctagctgttcctgcagttgctccgctctccgccgcgcctctctcatttcgccgcccattcgctccttttccacttccaattgtttcacttccttcgacaacatttgatgccttaaaagggaagtggagatgcgttggcatttcattttgtctttgctgtgccaaatgctctcacttcagtgcctccctttccgcctccaattgcctttcgcgttccatccgatgggcgagttcccgcgacttggccttttcctcctcgcatttttctgcccacctgaaacaaagaaatcggttgaaaaaacattacgaaatgtgagaatatcttgcctttgttcggtggcatgcaaatgctcctcaagcaaatggactctctcctgcaaaacggcgttgtctgtcctcagcctaagcaatgaaatgggaatttagaatcaaattaaaagaacattctgcggaccgtgacttttcttcactgatcatcattttctcctcctgcaattcggttaacttttgtgccaaaattgacatctgaaaataaatgatcaagaaaatgaatccatttgaattaatttcatttgcttttgacctgattggtggcatttccgaagtccgtactgatggagtcatggtcattgaactgcatcaattcgggctctgagctgaacgaatttcggcgcgaattcagccgaccgttcagataaagtcgagaagccacggaggaggaggaagacggcaaagtgccgttggagagagagggggaaggctcagcctgaaatgggaggagacccagaattaattcagctgccacaatcaaattaagaattcaaactaagtttttgttgataataaattttccgaattggtaaatcttggaatcggaatccaacgaaattcacaatagtatttttgattttgatttttaagtatgcgaagaagtccaagcacctctaagtagtccattggccgcatacgcctcaattggtgctgtcgttgtaattcacgcactttgttcgcaattttgagactttcctcacagaaaatcacaattgaataacggaagggaatcttgaatttggcgagttatgtattcatttgtacaacacattcatttaaggagttgcaaaaaacggggcagaaatgcattcagaggcaaaatgttcccaatcagtgggaaattgtcgcctcttttggtaattgtacatttaaaaaacatcaatttagagggaaaaaaagaagagaaactgcgcagaaaccatcaaccgaactacaaaaagttggagtaccaagagcgaatgcatgacgaaagaggaaaatcaatgaggggaatggagagatttaatcgatcagcgtggatttgtgggaaatggtcggagaatccggatttggatgagtgggaaaaaaaggtgcgcgagaaaaactcacagacgagaagctgattgaaggacggataaaagaatattggcactatttacaaagagcactattttgaaaattttttcaacttttttttggtcaaatttttttttgtttaaaaagtcctgaaaccaagtacccgggtgttttaaaggtcgctgatcacgaatatgacaattatttgggcctattaagcaaacttggcgctagttataaagtgatagattttgaattttatcaaaaaccatagggg

SEQ ID NO: 27033 - DNA, 994 bp, Heterodera glycines
accctgttgagcttgactctagtctgactttgtgaagaatcatgagaggtgtagcataagtgggagccgcaaggcgccagtgaaataccactactttcatcgattccttacttaatcggtaaaacgggagtgcgcccgaaagggtgtccattttggtgttaagtcgggccacccggtggcccggcgacccgcgccgatgacagtgtcaggcggggagtttgactggggcggtacatctgtcaaagcgtaacgcaggtgtcctaaggcgagctcagagaggacggaaacctctcgtagagcaaaaaggcaaatgcttacttgatcctgattttcagtacgaatacggaccgcgaaagcgtggcttatcgatccttttgaatgtgtaaagtttccagcaagaggtgtcagaaaagttaccacagggataactggcttgtggcggccaagcgtccatagcgacgtcgctttttgatccttcgatgtcggctcttcctatcattgcgaagcagaattcgccaagcgttggattgttcacccaccaatagggaacgtgagctgggtttagaccgtcgtgagacaggttagttttaccctactaaagacctgttgctatgatagtaatcctgcttagtacgagaggaaccgcaggttcagacatttggttcatgtgcttggtcgatagaccaatggtgcgaagctaccatctgagggattatgactgaacgcctctaagtcagaatcccgcctaggcaagatagcaatattcttgctccccggtgtcgggaggcactacttatgcgccgcttgcggtgcagcacaaatgccccagcatctggcccgatgtgcgtgcttaattgctcgcacattgccaaagccgtagcactcgtgtgccatggtggaacgtcggggcgcaaatcacttgtatacgacttgctactggtcagggggtgttagcagtagagcagcttttacactgcgatctgttgagacttag

SEQ ID NO: 27034 - DNA, 781 bp, Heterodera glycines
ttaattagtgggtttttttcccattcaggttcaggccgtgatgaatcgtactatatctttatttattatcaattttattacataccgacttccactttgtaataaatcccgattgcttttttatcctgactagagaaccgaccttataggcgttattttttatatttaaaatagaaaaaaattttatcatacattgttgaatttattgtatttatagattgtcaaggataataataaaaagtctcattttaaataattttatatttttattaaccactcaaagggtcatttttcgagaaaaaaataatatcacaagaatattaaaagaaatgctcacgaattcaagtatgcaatattaaaattaatgaataaatataaaaagaccgattcgtcagcttatataaaatatgcaagtgcccaataaaatagcaaaaaataaaaggtttgaaaattaaaaaataaagaaacaaaataggcattatatctccattctagggtaatgcaagaaatatgtgcccgatgtttacaagagataatcataaaaaaggaagcagagtgataaaaccaaaaaaataataataatttaacaaagattaataggcaaaagaaattcctatttaatcaaaaatgtgtgacaatgattttggaagcttatttaaataaacagaattattatctttctttaattcgatttgtccattattttaaaaagttatattaaacggctcccggacatttcgaaaatgaccgtttcgcaaatgaccgtttctacaataccttt

SEQ ID NO: 27035 - DNA, 874 bp, Heterodera glycines
ttgttttcacgtaatttctgcataaaatgagattatttaaaattttttattttgggtaattttcacattcttgtacaacaagtaattgcttaaaattctttgcttgtcttataattaaatattgattatcatcttaattcatatcaaagtaaatgcaatttttattaaatttaaagataacaaaaaaaacagaaaatttaaatgaacagtttttgttaaatcattttataagttattaggatgaaataattattaatttgattgctgatatctcaaaacaaatttaaaaggttgtcttaaaaaatttctttaaaattttaatgcttatgttatcaatttttgttatatcatttgaattcatttaaggttatttgaataaaataattttttaaattttgtatattttgaatatctaaatttttaaatcttttatgtatgttattacaattctcgtcattttgaaaacatttttgggaagttcctattacgcatacagaacacataatgaattatataaacaaaaattttttatgttttttattttttggaaaaatctttttctgcgaaatattttcttacatttaaatattttctgtcgaattttttccacttatttatttatataaactcgcaattttagatcatttttaaatatttttgatgataacaattttattactcttaaaacttatgatatttttttgattttcacatttattttattaaaattatattttcccatctattttattataattaattttttatcattttaccagttgaaaaattattaaagcggattgacgattcatataaatcgtaaaaagttcacattgaaaatttttttaacattttataaaaaaacatattaatt

SEQ ID NO: 27036 - DNA, 812 bp, Heterodera glycines
tttgctcctaaattagccaaaatgcatttttatggcctaatttaaggtgctgaactcgaaaatatactttatttttggtttcagactttttggtaagtgtttaaaattttttgaaaaatcttcaaaatttgagccccggaaaatccagtgaaattttgaaaattcataactctcttcgtttttggtcaaatttagtggaataaaatttgaaaaatagcaaaaaattaggagaattttatgagatttatttggaatttctatcttccaaaataaaaaagttattccagaatttctggaaaaattcgatttttcagaaaaaaattcttaactcccttctgaaaaagtattttataaaaaaaatatactcaaaaaatccgcaattttttgctctattttataaattttattttagctttttatcacttttttgaaaaaagttatagaaataaaagtgattttggaatttgggaccacaggggtgtgaccatgatttttgagaggaaaattttttcaccaaaaatcttccaaaaacatgtctttaggggttatttgggccgctgatcacgaatacgtgatcagattttacttttgacatagtcaacacctcagaatccctgtgtgattggggattctgaggggtggggcggcatgttcggacccaggccgtgtttattatttattaaaaaacgggcgcaaagcgcccgtcctgaggccgcgaagcggccgaatgtccccaaaataattaaaagacgggcgcgaagcgcccgtcctgaggccgcgaagcggccgaatttccccaaaaaaattaaaaa

SEQ ID NO: 27037 - DNA, 704 bp, Heterodera glycines
  unsure (1)..(704): unsure at all n locations
ctatcaattcgttgccgtacaaaggaaatgagcgacaaaaaaccattcttgtctcgaggtataacatttnggggtgacattaaattacactgccagaaacttacaattagcaaaactaaaactattttgggtcccacgccggcaccgtctccgatttggtcaaaagagcctttgccaatgattcggctgccttcgtcgttgaaccggctggtggcgcgggatacaaaacacttcggttaatccgacaaagcgccggtcggtcggtcccttccctttcgttttcctgccttagatttcggcaattgtgaagatcattggtcccaaaattttttaatttaattttttttttatcttaaaattttttagcacttttccaggggtgttttcaggagctgagcacgaatccggcctccatttcgaccaattccgaatccctaacccgaactcgaacatttttcgagaattaaatttaaaattttttaaaaatttcttttaaaacatggttcttaatgttttcggagttgctgatcacgaatctgccattcattttgaccaatttcgaataccggacccgaactcgaacaaaaaatcgaaaattcaaaattatcaaaattcatttttatgttcgtatctttacagaatgaccattttttggatttgaaatggtttttatctgaaattaacagcaccgaaaacactaacaa

SEQ ID NO: 27038 - DNA, 1094 bp, Heterodera glycines
ctcggtaagggaaaaagagaggcggtaccccccccccccccccacaagaccaaccagcgccccagagagaaaaagcaatgccaaatttaaattaacgccaaattatcataacgaaagcaacatattaattttaaattccaacgctaaattacaaagaaacattttgctggcggccaggggcggagcaaaagccgtcaaaatagctaaatttcaaaatccattgtgtaaacgatggaaaaatggtaatttatcgtttcaaatacacccctattttcccagcgtcgctggtatgagcaaaaaaaaaaaaaggtcgttcgggcgaaagtttttcaaaaatacacccctaagaattgacttttttgtcaacctattctaaaattggttttttgaacttttgtttcaaaaatgcgttggtttttcggtggtgccgatggtccaccaagaaatatttttaatgcaattttttttattggctatagccctggcgacccccttgcccttctcacccaccccctggcgctcatccgttcgtaatttggcttgacgcacttttttgcacataaatgaaatgataggtaaggaaaacacaaataaaagacgaaagtaacgccgaaatgaatcggaaaaaccgagaacataaatgaattataggctctatgggaatcactgatcgatataatctatttttgaattttgccattcttttgcgactgactgatcagtgagtgatcagagatccaacagaatggtcagcgggtcttccaccgcctgtttgattttgcgcagaaaagtgaccgcctctctgccgtcgatcaggcgatggtcgtaagtgagtgcgatgtacatcatcggacgaatttcgacctaaatcaatgcgttatttttgctacaaaacaaactgaattgtccgatcttttctcgacttgcctttccatccaccgccacaggccgatcgaaaatgccgtgcatgccgagaatggccgactgcggtgggttgatgatcggagtgccgaacaacgagccgaacacaccgccgttgcttatggtgaaagtgccgccctccatgtcttcaatcgccaatttgttgtcacgtg

SEQ ID NO: 27039 - DNA, 1527 bp, Heterodera glycines
acgcgaaaatggccacacgaaaacggcatggccagcactcgccctgcttctgtaatgccaggataccgcagggaaattttgaaaatttaggggtgtctgtaatcagcggtacagtaattttgacgtgttgcaacgagtgactgtgaacgggcaggacgagtggaggccaacaacaatttccacggcgtgctgctgcgattgcaaagcaatttctttttaattttgttttttgaaatgccgttttcggcacggaatgccaaaggctcagaacatcgtgcgcctgtgaaccaaaaattgaagattttgggaacatcccagctgaacggcaaacgctgagagtgtggccaaacactcaagtgcttgagaacgataatgaaacaatgggatattatggtattgaagataaccatcattatcttgtcaagaacatttgagaatttttattaggtatttaggtttcattgaattattttatttttttaagtgtccaaaaactattaataataaataagatatttatgttattctaatgaaattaaatttattgaagatcactcttaaattcaatttaaattaaaataatatttgaatgcgtcaacaaataagggtgttggataatccgactgatgatagcaatcaacatttttaaataataacattattatttagatattaaatgagtaagagatttggataattctactgaaggtgccatcagaaagtgaatgaatgtgtttttattgcgtcattttttaatataaaataataaatggaccttaaataaatagggaattggggtaattctactgatggtcactattatagattgaatcataatatttgtatcatttttaattaagtctaagaaaaaataataaatatgattaaataaataagagaaattaaacaacttaaaaaacaaaaaatcgaaataaaccgaaatttttatgaagatccttcgttgacatttgagcagctttatccatttgtaaacaaatgctttagttggacgatgaaaatattaattattcatacgaaattaaaaattttatttgctaatgaatttcatattatagaatataattgagcaggaattaaaaatcttcgggattgatcgggttggtcgggatccatattttgaatttcaatgttttggaattcatctcggaaattatgcaacgctttttattggtgaaatttttgaaattttgtttaggctaatacaaaacgttaatgaccattcgagcaatacacggagactttgcaaagaggcttatccaaattctattcattattgttggaatgaattgaaattttgcaggaaaatacttgggattgagcaggaacaaaaaatcaagaataactcaaggcttaatcgataggccggaattatttaacaattataattcactataatatgccaaataaagtgatcattcaattgccaattcactataattctgtcaaattaaagtgatcacttaagtgccaattcaataattcactataacactgccaaattaaagt

SEQ ID NO: 27040 - DNA, 757 bp, Heterodera glycines
gggaaccccgctcccgtcaactttacattccacaattttggggagttttgattaaaaaggcaataaaaatgcgacatgcatctcccccaagcctcaatcaagaaggacaatacacatttttagaaaccatttaacccacacataagttttgagcaacatttttaatgaatttattcaaaataacaacacaacattttgccaacaaaatagaataatgaatgcacaaataaactctcgtgttaaaaactcaatgaaatttcaaaatttgcatgttatagtcaggcctatagccagggggtggaagaggatgagaaattccccccccccccgcgaattgaaaaatgaaagttttcatgaaaaatggacaatttttgaaattttacactatttcttatcataatttactaaaattttgaagaaaaaaaaaatttcccaatgactcccatcggcaccgccggggaccctcatttaccatagtttttgaaattctacccgaaatctggcaaaaatgttatcattttgtttttggcgcaaaacctctacaaaaaaaaatgtccatatttacgcctccgaatttctatttttttttctgactacgggcttgtgattacagtggtaaaatgggttcataattgaaaagagtatagcgatattcaaccacgaagaaacgcacatacccatataccaactgggcttacactgacccatttcacccataagtgttctcttacaaacatcatatgcataaccaataccc

SEQ ID NO: 27041 - DNA, 2299 bp, Heterodera glycines
  unsure (1)..(2299): unsure at all n locations
aatcaataaaataagctatattatagaactaattcgtaataagtcgcattaataaataagtaattttaattttaccttaataatacttataatatatataattaatacttttttattatattttaaatttttaaatattttcagttaattattaaatgatatttaaacaatcgaacgcaaacttgccgaggcaaaaacatgaaaaaaaggattaaaaaaatttattttttagtaacaaaataataattgcgcacaaaatggccaataaaaatttcactaatgagccaataaagaattgcgaatataataaaaacaatataagatcacttatgccgattgagttattaagcattttcaaaaaaataaataaaaaatagtataaagtaaaaaccaaatatttactgttcaaatctcgcactcttaatacgcaatataaaaaataaataattaagtcttaaaaaatacacattaaaaaaatatgaataatgaagtattgttaaatgaaaaatcatccaccaaaaggtactgcatacattctatcgtacaaatgaatatacataaaaattgatttttcgatatttagtattcgttgaattactactgaattaaatcacaaatttcattcattaacagaaatttaaaaaaaaaaaattatttttatatattaaattaaaataatctaaggcaaactttccgcggcttagtcatataccttttagatgaggatgtttcgaggcatatttaaaaaaataaattaataacaaatataaaaaaaaaagttttataaaaatataaataaattattttcaaaaaaacatcaacaaaagtttttaaatattttcatattttttaacataaatttattatctaagaattaaaatgacttacataatacaatgataaaacatgcttaattgatgatcgatttaaattctagagagtgaaatttattttaatttcactgacaaaattataattgtttaaaatcgactatttacaaaataaaaaatatgaaagaaattgctaagtaaatttgatttctataataatataagaaattttcacgcatgcgaaacgaataactagaaatttgcggaagagcgcgcataaaacatgaataatacatataaaaaatattctttaaaaatacgattatttaaaaagtaaaatttttaaattatacatttatatatattccaagttccacaaataaaacaaagctttaaaagattcttaaaattccaaaatcagcaagcattaccgtgtgcaaatttgagatcggtgcgacagttaatttgatggaataattgaaaaatgcaaatataaattaaaatactgaaatgaattgtagactaaaatatatcatacttggcttagataattgcttagacatggtggatgaattaagtttatatatttatatttagtaatataaaaaatcaaattataaaaaaaataaaaagtataataaatagtaaaaaaaattatagaaataaagtaaatagaataatacataaagtttgaatatattttaaaacttattatcacatttttttaccataaacgttagaaaatataacgcgagccatccaaaaatcttttccaccaaaatttatgcgtgagatcgcttttaaaagaaaatatttgctctacgtaacaggttgacttggaagcggatttaggacaagtataaaaactaatcaaaaaatcttgccttaaatataattgaaaaaacaaaatataagtaattaaatggcagtgtaaaaattattaaattattatttttttgattaaaattttatgatagcatttattttataatatacaaaaaataatcacaatcatttaaatagctcaagattagaatgcccaagagcaatggaatccgcgcgacttgatgactcataaattcgtaaaattaaaaatgcaaacttacagttttcgtttattccaataataaaaaataaaattaaatcaatttaaaactcataatttaagtccacgaaacatatattttttaaataaactttgagacaaaaagaacttaaaaacacttatggacataaattttcaaaatcgagggtatatttcatcaaaatttgtagtgtaaaactttcaaaaatggctaaatatgatattgaaataccattttagaagaaaaaaaacatgtacaactaaaatttactcatttttagcctggcttttttgtttatttttgacantaatttaccaatttaaaaaaaaaaaaattaaatttaatcaatattttcggcaaaatttagataaaaaaaatgacttt

SEQ ID NO: 27042 - DNA, 1451 bp, Heterodera glycines
  unsure (1)..(1451): unsure at all n locations
catggaagattgtgacagaggagggaatgagtacatccatagtttggcaaccataaaggctgcagtccaattttatatttgtatttttgaatgctccaatttctcaatttcccaacggcacctattacactgtctatcaacggttaatatattgtaattgtatattttaaataaaaacatttacggattaataaaatgaacatgatattccaataaaaacatatttacgatggattgaaatgtataaatttcaatatgggatgccactaggactcgcatttgatatgcaatgtatatagtacttttgttctaaaaatttttatatcatcaacacaggttgtgtctgtggactcggaggcggtggggccatcccatcaatttgttgttggacagccgaagccaagacaccgccagggacgagagccgattgctgcacctgaaaatcctctcattaacaaaataagaaatgttttatgacctgcgccacagtcgcattcttgagcaaattgttgtaccgttccatccgagcattgctaatcggtgtaatttggagaatatccgaaattatcgcgatcctaaatggcaaaaaaaggtttttttatgttgaccaagataaattacccctccgtttttgggacaatggcaaactgtcgggtgaaaaatttcatgttcaaaaagttggtagacccatccgacacttctttcccatcgcgaaaaattccttgcagcgataagacgatcaaattgtcctgaaaagcaataaattcctaagcagaaaatttgagtgaatggacaaacaacaatttaattaataacccacagaagtgaaattgaagtcgagtagaaatgattgtttgatgtgctcagtcggaggtaatttgctcagagcgactgctatatccataggtccacgataaatgattttgtcacgataggattgccatttgtgttgttggatgatgttgtgagaagaacggatgtacaggccgatcaactctctgaacagagacagaaaatgaattggaaccaaaattagaagggaacaggggggaggggggatcaacctgaagtatttgcgaagggttccggaggggtagaataattaagtaacccactgcttatgggtgttggtactccattagcacttactgatggtcacttctgtctctgtttccggtcggatgggtatccgccagaaaacacatcgaataggtaaacgtcgccttaaaagcgaattttactcaaatttaacattgcccattttgcgtacatttgcgtcgtatgcatttaacaattgttgtcgcgtctgttcaccatttggaccgtcgtaaaagttgaaaaattccaagagaaaattttcagccatcgtgcgatatgattcttcggtgcaaaaaccgtgcttanaggcgcaaaaagcttacagttagcacgacatgataattttactctga

SEQ ID NO: 27043 - DNA, 1931 bp, Heterodera glycines
  unsure (1)..(1931): unsure at all n locations
attaaaggctgtattttttgctgcttggtacttaaattntcgttttattggcaatattatttatttattttgaattatatntaaatttctntagtcccatgttttataattcttatttgttgtattatgaacataaaaaaatacaaaatgatcttttgtaaaaattttcatggtgtgtcccccttgtattttttagcaaagaatcaaaccatcctcatcattaaaattagagatttggaattattgtatttttttttataacaatcaaagttttatattttgctaagtttttgttttaatttttactttagcatgtgaaaatctatttttggccattaattttgcgataatatttacatcgcctgacactcacaatcagctgatgaagactggttaaagaagattaaatcattttttcatattatttaataatgttttaccaatattgtttgcttatttattttatttattattttttgcaaataatgtattattatatttctgtttgtatatttatttatttgttctttaaattattaaaaaattcaaattttatttttattcctaataaatatgtattttaatttctacaacaattgtgttttttggggatatatcttttttgaataattatctgtatatttttgtgttgcctatctctttttttgtttatttttttgaatgaatagagttcctatttttgaattgattttttatttttatttaaaccattttattttattttttaatcattatttaatttatcaaaacttatagtaaatttttcctgaaaatttttttaaaagttcattaaattataatttttgactacaaccaatgaatgtatttaaattataatttacactctataatatgaatttttatatttaatttattcctttattacgtttatttttgaacaattttgaaattgtagagttgtgttacgtcacatattatttttttttgtttggtttaaaagcaaattttaaaaaatttaaaataaaaatttcataataattatttatttactcacgatgaaatctgcaatttctccatccagaaggcatagtatatttattagttgtttgatttttatgaacgtaagttatattaattatgttggtagtttttgattttttgttttaatttatgctcgtattaagaattttgtccaaatatatttgtcgcttatgtgttttattcttaaattcttaaaaattcttataatagttaagacatttgttctggtttatatcttatcatatatcagccatttttctcaatttaaaaagcgatattaaaactcaaattaattgaaaagcatttaaattaatatattatttttatatttcatatattatttttaaaattttaatattttttagtttaatttacgaatttcctcttgattcttattgttttattaaatgaatgatgtgatcatcgttcggaccctttttatcatttttttaattttacacaaggaaaaacataagattctatatagtaagttgtattactttttcattaattttttttattattctttaatatttcctttatcattttaatctccatattatttttctaatttttttttttttttgctttttgcactttaaccaagcgtttgttttttaacaattatgtttttaaatagaattatttatgtattcattaatatttaattgttaatttaatgactttttctttttaataaacactctcggatatgtaaactatactgcctctaggaccagttcaaaatccaaantcttgcgttgaaaatttattcgctgcatttgccgaattttaagagagaaattattttttaattaagtattacactgtttacttatttattgttttaaaatctttattgatttaataagatgcaaatttactcagttgaactaatattaacatgg

SEQ ID NO: 27044 - DNA, 126 bp, Heterodera glycines
tctagagtctgtatctgttaggcttatgttttgtgtttaagaaggccgtaatgtgactgcgcggaaggcggaggaggcagccctcgcggcttcggcgtcagcctttgaacaatgggtttgattaaa

SEQ ID NO: 27045 - DNA, 61 bp, Heterodera glycines
ttaaacagttaatctttatgatttgctgcttcttcttaacgaagctttgttattttagtta

SEQ ID NO: 27046 - DNA, 1747 bp, Heterodera glycines
tagagtcaaaagtcaatcagtgaaaaactttatttaagcaaattacccgcatttaaaatgggaatgaaaaattaaagccaaaaaattgccaagtataatcagctattaagctaattaacaataataattaactcaacctttctcattagcatttaatcactaaactatggctgcgattaatcgtacaaaagtgttaattatgaagtaattgcctttcgttttcttcccatattttcaattttttttttggctgtccgattaaatgtgacgaggtcattcagtcattcattcattcattcacccattcgatcatccgttcatttgttccatcaaattcattctcatttccattatttatcagcaacagtcggctatcaaatcgcgtgcaataatttccaatttgaaaatacattttgacgattaacaaataataatactaataatataaattttgtcacatttcacccccccccccgggcgtcgttttggtcagataacaaaaaaagtgctggttttttgtgagccgaagacgacaacgagacgacacgccttttgttcaaatgacaacaaccctttcagtccaacggatcggaacggtgaaaagaatcgccagccgagcgacagcgaaattggcgataaaaaggcctatcagtttagcagcagcaatgaagtaattggttaattattgtaattaattagttaattagggacaagagaagcggaacggaatttattaatacattctcaaatggagtgatgcaaatgaaccaaccaaaaagcaacctcccattagagatccaatcaattccatctcatatcctgtgggcaatctgttaattgacaaatgccaggcaaaatgctggagaaaaataaaaatgcaaataaaattctcctcttttcgttaatttccaattcaacgaaagcattttttgttgtttaattgtagaccgaaagatctctcaagacaaagagctaaggaaaaaaatcattcactgaataattatttattttatgcttaagaaaaagcatatttgcaggaatatctatctaccgattcttaattacccataatttcttgagcaaattgaagcaaataatggtagcggttgccggggactcttcaaaaatttaattattatttttttaaatacgcaatttaatccgttttaaattgaaaaataaataattattattaaacagaaattaatttcatttttagaatgattaatttaacctctgacaattggtcgggcgcccacccgaaaatcagcgaggcgctgctgcgccattgcgacggcggtgccaccgcttatggcgccagcgttttggacagaaaaattgagcggactttcaacgaagtttttgagcgagacgtggcggtgttttttgttggcactggtgcgcaaaaaatatcaaaaaagagctaaaagagattatgtgaattggtttttacgattgtttgccccaggcaccgctgccaatgcgttgtcaatggcttatgtgaatcgcgcgggtggcatcattttcgcgcatcggcatgcccatctgattgaggacgagtgcggcgcgcccgaatattttacgggcggcgccaggttggtcggcgtaagcggcgccgagggacgcattgagccggaagtaattactggctaattaggggataataaatctgttagtgactctatttattggataattaagtacaagtgatcagtggccctaattaggggatacccaatataagtaa

SEQ ID NO: 27047 - DNA, 1082 bp, Heterodera glycines
tcatcatttatttccaaataatcaatttctaattctttttcttctgcatcgggctcagtagatggtgccaaaaacaactggttcatatttgctttgatgagtaaaatttgttgtgccatttctccgctcaggcttaaattccttggttttacagaaatcagaaatcgaaaataccgatttcttaatgagttgccataaatgagccccgctttcgagaacagcctttccgatgacacagatgtggcgggaattaaatgaacaatccgggccagtaaaaacaaatcagggaattgggccccaacttctttccaccacacgaaaatatcagtctcaatagtggttcttccaagtgccttgtaagaagctaattgaagttgaatttgtgattgatatgacgaatgtgaagtgccagaaacaattgagggcaccgaaacactccctggagacttgggcttccaaatatcgacttaaagtattataaaataaaaaaaaagaattattcaaatacatttaatgctgtcgtcgcttgctggtcccgtgtcttcgaccaaagaattcaaaggtgcagccattgctttttccacatttgtgccacattcggctccctgaaaatgcgacaccagaaaatgcgacaccaagaaaatccgacaccagaaaatccgacaccggcggaaaatgcgacaccgtaaatttttttttaaaaaacagaaaatgcgacacccggaaaatacgacaccaaaattaaatttttaaaaattatttttaattttaaaaatgaaaaataaatcaattattattcctaaagaggttcttagttacgttttaaaaactataaaaatgaaaaatcattgatttttgtcctaaagaggttctgccattcggtgggaaattgcgcgcaaatattgcagaggatggcgattgtttcgcgtgacgtataactcattaagatttatgtcttggtccacataagtttgcttgcgtttcattcccttgccacgtattccatttgctgggttgtttgcaaagtcttcaacttgctgacaaacaatggctttcttcttgccgaactttccgaagaaaaa

SEQ ID NO: 27048 - DNA, 963 bp, Heterodera glycines
tttcagaaagggttctgaaacgcaccaaattttatttacaagttaataaggctctctgatgctttttctatcaataatggaggtgaataaaattttaaaaattttttaattgctttttaaatatgccaaaaaatttaggcttaactttttagtgaaagtttgatcactcatattttttgctaattgagcagaagcataccaaactttgcagggatactccccggtaaaggactaacttacactgaaatgagcgccgagctagcttgctctaaaaaatttttcgaaaatctgagtctttcgtttttatttattttttgcaaaattaattcttaaatattttttcagaaagggttctgaaacgcaccaaattttatttacatgttagtttaggcactctgatgctttttctatcaaaaagggagatgaataaaatttttaaaaatttttaattcctttttaaacaggccaaaaagtttaggcttaacttttttttcagaaactgatcagaagcgcaccaaactttgcagggatactgaaaggaagagaaataacctattttaaatattatctagtcagttcatttaaataatttttatccaaaaaatttttttttgggttttcggggcagtccccctgaaccgatgcgcccagatttatggggagaccgaatccttccggaatagcttcactatagcctgtactttaattctgcgttggatttttgctccccataattgtttgagtaccccaaacggacacttgaaaaaatcgatttatttttgttttcggggcagtccccccgaaccgatgcgcccagatttatggggagaccgaatccttcgggaatagcttccctatagcctgtactttaattctgcgttggatttttgctccccataattgtttgagtaccccaaccgacacttgaaaaatcgatttttttgttttccgggcagtcccccc

SEQ ID NO: 27049 - DNA, 1039 bp, Heterodera glycines
tttctatttgcattttccttaccatttccacgaactgaagtctttctcttgtctccacgagatcgtttcaagccttttgtcgcccgcagccgctgaattgtggcggcctgtccttgaaggcgcgcacaaatggactgatacatccggtcatttttcgccttcaatgctccaactttcgcatccagctcaagctgggtccaaccacgcttcaaatcctgcacgtctgcagcggtaatgacaccaccctttaaaacaccggtcattgttttaacgaaacgaatcacattcccaagtaaacctaatatggtaaccatccacataccaacagctatgtggatggtgactatccacatagctgttggtatgtggatggtaaccatattaggtttacttgggaatgtgattcgtttcgttacagcaatcaccgatgttctaaagggcggtgtcattctcgctgcacacgtgcactatttgaaccgtggtcgcttccagcttgagctgcatccgaaagctctatcacggacgctgaaaaatgagcgcatgtctcactcccttagtggctgcattgcaagcacagctctccacacttcagcgtttgcgggagccacaaggcttgctccgctgccgtcgacacacgacaaagccttcagctcgtcgaaatggtaagcaacatccacatagaaagtggtatgtgaaaattgagcatccacatagccgttggtatgtggatgctctatttttcaattttcaaaatttaggtgttgcaggaaagaagaaaggcctgagaaaggatcagaagactgcaggccgccgcagagttgtcattgacgattcatctaacggaggtgggtctagaggactgtaaacctgtagttttttcgtccagacgatacagcacctcgacccaagcgaacgagaaagagaaaaacggcgccgcctacggaagaagtggtgaaagtgctgcaaaacgttttggcggccccggggggttcgactacaacgggtgttgcacaaaatcttctgaacgaaattagggaga

SEQ ID NO: 27050 - DNA, 1472 bp, Heterodera glycines
aaaaatgtaattttgttttagcatatgataaaagttaaaaaattcgaattgcattttgaaaatcaaaattttttgcattgtctaaaaaagctccttagctactgttttgatatttttaaagtaaattctgtatttttacacaatttttgtcatttttttgatggttaaaagccattttaagtaatttttaaggcatattttagtgcatattttagcctttttctggtttttagtgcatattttatgcgcttataaatagggtcgcgtaagtgacgaaaaatctcgaaatagttaactaaaatagtgagtaaaaatgccaaaatagtgccataatggtggaaaaaagtccgaattagtaacaaatagtgacataattttcagccaaaaattgagcaaaaataatttttattcactgaggactgggatttataagagcaaataaccaaaatagttgcgtaaagataatcagataagttcaatgttcttgacacattacttttttaagcaaaaaaaaaatcatatatttttcaaaaaaacaatgtatcaggtgagggttgcctgtcgcaaagagacctccttcccgctggtgtgaggcgtcagtacttatttgggcaatgctctagtaacgaagttaagagtcttttctttaattcattcgcttgtatatcttgtttatcacatgtatcggtatatgctactgcacgaacatccagacacgcatctgcgcctgagctgttactgcactaacaaccgcaacggtgcacaccttacgcatctacgcctcgaagggctaggctcggctttctataaagcgcagccctctactgcgcccggctagttttttgtttaaaatacaaacagtttggccctggaaatgatggcactgctcaaccgcgagatggagcagtacgaccgggcgctggtccgaaagccagtggtgttgctgctgaacaaagtggacgaggtggacggagagcaggcgagaaaggttagggaaagatgatcagaagccgggcgaggggggggggtgggggttgaaaaggatgataacattgaccagaagccggacaggataggagagattagggatgatcagaagcagggtaaggggttgggccagaatgatcagaagcggaggaagagctttgggcaagatgatcaaaagacgtggttaggggagcgaggacagagtgatcagaagcagggagagggtgattggttgtcaagaatgatcagtttgatctgaaagcggccagaatgaagggattagggatgagatgatcagatatagggagagtgattgggaggatgatgactcgaagtcagaagccggacagaatggcggtactagtgatgcactgaagccgggcgaatgtagagggactagggttgataagaagccccgagggagatggtggggattatgatgatcaaaagccggggagaggggtgacgatgatgatgatcaaaat

SEQ ID NO: 27051 - DNA, 1113 bp, Heterodera glycines
attgtccgatcggaattttcttcccaactctcccaatgatcgcctacttcccccccccctcccttttcttccctcgctcccgccccaatctcttcggactgtccgtcgatgcctttgccaccctctcccatcgatccccccccccttttcctatgcaaatccctcccccccccaatcgctttgtttgttttcccgcgcgttgatctcattcaaatggccaatttgtcagctcgtccctaggcgcaaacaacctcaaagacaaagtgagcaaaaaccatcaacattatcactttccctctcctctcttttcttccctctgtctctctctctctctctctctctgtgtgtttctttctttcctcttttttctctttttctcttcccctcttttgtctctgttccccccgtccatttccccttttttgtcgctttttcgctgaccatccattcacccggcaaacagaatatttaaatatatattttatgcattcatataaaaaagaattgaagcgcccggaattttacaatcggaacagaggcaaatattcttgaaataaaaaaagttggtcggtcatctcgggtcttccggttcggttattttacaaaaacggaaccgggagtcccggtaagatcccactgggtcccggtcaacagtcaattgagttataagtaagggatagacgatccgatcgtcttttcagtatttctcattcatcagtcaaggttagctaattagtgttatggtcaatttgcaaccactctcttccccttttcgtctctcattgtctcctattctctccctctctttttaccccttccattctctccccttttccttttcctcttccatgtctctactcctttcttcctcatccccccttctctccttccttcttcagtgggatgatcaccaaaactgacactgtgtgaatattattccgatgtttaaatggtccaattcagaaaaaaacgatgaatgggagagatctgaggaaaggatgagaaaatatgagtggaggacggacggtccgaccgaagagattgtcccccacccccgctcgtttccttttctaacggctcacgccccggcactctatggaagtgcaaattggg

SEQ ID NO: 27052 - DNA, 914 bp, Heterodera glycines
cgaaataattatgacaaatgcacaaagacagtcgcagggattcgcttctcctcaggtgaaaacaacggctaatgaggtccgtaattatgtcagcgtggggagggaaggagccacgtgcctgcccctcccaaataaacaaaaatgaatttttaatatttaaaagagagaatttttgaaaatttcgaacatatttgtcctgataaaaaatctttttcaaattcgaaaaatttaacgcttcttttttaaataggcgaaaaagggtgaaaactaaaaactaaaaatcaggcccaaaaattatgaattaccaaagaaaattaattttctcttcagaaacaagtaaactttcatattttgtccgaaaatgactatttaagtctattctttgtcaagaaaaattaacttaatttaaaattattatgaattttcttaataaaaatttgattctgggattgtggggttagtttcccgcaaaatccggccggtggatcggtctcgcgccgatctctaatcccaataacttagtatgtttttttttatttattcaaaaatttgaaaaccctggatacaggctggactaaatcaagaataaaatgcaatataaattttagcaaataaaatggctagcgcgggtgcatgagcttgaatcgacgattgagtcggccaaattggtcattagaattgcgctgccgcccaatttaattgagaaatgggttaataatgaaaattgggctgtgttgaaagaaaatctgaaaaacatcgacatggaagattttatggcctatcaggacgaaaggcgttggtttgggtgcaatttctcgaccactgtttgcgataattggggatgtgagtggggcaaatgggggtaattaaattttaaatgggagaaactcattagcacccaaattaagaccgat

SEQ ID NO: 27053 - DNA, 1604 bp, Heterodera glycines
tttaaagccatccattgcctgccggttctcggcaccgcaaagcactaatacggtgtttgactcacttcaaaaaataattcattacccaaaagttttttacaaccacttattgccaatctaatttcttgcagatttaaagctatccattgcctgccggttctcggcacagcaaagcactaatacggtgtttgactcacttcaaaaaataattccatacccaaaagttttttacaaccacatattgccaatctaatttcttgcagattgaaagccatccattgcctgccggttctcggcacagcaaagcactaatagggtgtttgactcacttaaaataataattcattacccaaaagttttttacaaccacttattgccaatctaatttcttgcagattgaaagccatccattgcctgccggttctcggcacagcaaagcactaatagggtgtttgactcacttcaaaaaataattccatacccaaaagttttttacaaccacataagtagtatatgaccccgaaagcgcacggttccgagcgggtgtttaccgcacaaacccaaacctacgggaggggtgttttcttttgaaatgtgccgcccgcttacaaacccatgcctattggactacctctgaagctgccgccaagaaccaaaccctatgggaggggcgcaaccctttgaagttgccgccccatcaaaacccaggaggggaggggtgtgtgttccaaaccaaacctaatgtactccctatgaagttgacgcccgtggacatttaccgccaagaaccaaagcctatgggaggggtgcatccctttgatgttgccgccttgtggattttaatttacccaaatccgtgcgggtgtttttttcacccggccgcgcagcgccgcgggaaggtcatcaatcatccacctgtcaccaaaagtgacaggtgaaggaaattcaattttttcttttgcaaatttaaatctttttgatcccaaaccttttgggcggttttattttctcaaatcctgagattttttatgatgggtttttcggatcctgaaattgaaaattctttttgaaaattagccaaaaccgtgccgtgcggttttttatcacctctcccctccctccccgcccgtccggcgatgcgatgccgccgccgcgaaaagtaatcgataatggaattttgaagaactgcaaattagttgatattgacagcaaataatttcgattatgacttggacaatagaattactatttaaatccaatgtaaaagtaaatcgaagaatgaataaatacattaaaaactttttcaaaaggagtcccctgtcaactaaaaattgtttgatgggttttttattttttcttccattatttctcaatccgcacgtgactttttgttcaaattattttcgaatatcccccccaaattaagtcactgcaaataaaatgggatggatggtttctaatgaaatggccccctaatttttattttccggtcccaactatttcgcaaaagggcccgaaattttccaacccgtcaaaaaaaaaaggatttatgattttcaaaaaaagaatatcaaaacaattttttgcagggtttttgaaaaaaa

SEQ ID NO: 27054 - DNA, 855 bp, Heterodera glycines
attcggtctctccatatatctgggcgcatcggttcgcggggactgcaccgagaacacaaataaatcgattttttcaagtgtccgtttggggtactcaagcaattatggggagcaaaaatccaacgcagaattaaagtacaggctatagggaagctattccggaaggattcggtctccccataaatctgggcgcatcggttcggggggactgccccgaaaacaaaaaaatcgattttttcaagtgtccgtttggggtactcaaacaattatggggagcaaaaatccaacgcagaattaaagtacaggctatagggaagctattccggaaggattcggtctccccataaatctgggcgcatcggttcggggggactgccccgaaaacaaaaaaatcgattttttcaagtgtccgtttggggtactcaaacaattatggggagcaaaaatccaacgcagaattaaagtacaggctatagggaagctattccggaaggattcggtctccccataaatctgggcgcatcggttcggggggactgccccgaaaacaaaaaaatcgattttttcaagtgtccgtttggggtactcaaacaattatggggagcaaaaatccaacgcagaattaaagtacaggctatagggaagctattcccgaaggattcggtctccccataaatctgggcgcatcggttcggggggactgcccctaaaacaaaaaaatcgattttttcaagtgtccgtttggggtactcaaacatttatggggagcaaaaatccaacgcagaattaaagtacaggctatagggaagctactcccgaaggattcggtctcccccataaatctgggcgcatcgg

SEQ ID NO: 27055 - DNA, 1479 bp, Heterodera glycines
acatgcaaaacacgacggacgttgaaattgctgcgctcgacgcggacaaagcggtgcaaattgagatcaaatatgacgacaagttggacgagaaggaggccgcctatttccaagtgaatcattcattcaatcaccccaccaattttgcatttttcactcccaaatttcaattttattttaatttttacattttattctggttactggttgcaggaatggtccaatactaatttgacctagatgggtttttagaagtgagaggagggatgtcatggatgagggataaaacaaaagaaaattcgaaattttaaacaaaaattcttacttttcccttagaaattttcagagggttatcttagcctcccctcctcttttcctggatgaagggattttttctaaaacattttcattaaactatacaaatttagtgtttctttttttcagttggccgtgctgttcaccagttgcggaggccaacgacggctccgtgtgcacaatgtaaaaatggaaatttgtaaaaaacaaatttacaaataatgcaatcctccggcacagctctcactgccgatcagctccgattatgcgcaactgtaccggctgattgacgaggactgcttggccacccacttgttcaagcagggcaagcaaaaaataaaaaaaacatttcaccaaaatattatttttgaaatttcagcggaacaaacgctgcgcgaaaaggcgcccaaagaaattcgggacgagctgacactacgctgtgcccaaatgttggccgcctaccgcgagaagtgcagcgagcaggccccgcttggccaactgattttgcccgagtgcgccaaactgttgccgctgcatgtcaactgcattgagcgccacgacgcgctcaacggaggtcagtagagcgaacatttaggaaatttcatgatgatacatgtgattcgggaactgtatcggaccggatttggtgtgaaaatcctgtaattttgattggacattgatccgattccattttttaaatcccgtgaaaagcccggcaacacccaggataaatgatgtcattgtggacatggttgctgtagtgttcagcttcatactgtatttacattcgagcgcattgttatttgcacttcattcctccgtcctcattttttctttcgttttttaaataaaaattcgaattttcctataaatttatacttgattttctcggttgactgtatgtttaaaaacagaaaatttctgattgtcggttttttaaatttcttagggctgtttctgttcaacaggtcccgttcaagatttaatgacatttaaatctgcgctaaactcgcgggcataacccttttccatgacggaaccaattcaagttttcatgccgtcctgataaatttcaatgctcggcattccttcctgtatttaatattattattcatgccccatccccctcccattttgaaggtgccgaactcacggtggacgacc

SEQ ID NO: 27056 - DNA, 1024 bp, Heterodera glycines
ttgtattaaatggcatttttgaataataaattttattatttaaaaatttattttgtttttgtttagcaaaatgtggttaatcattcaaattttgtatatccagcacaatccgtctacttaaacaacaatctgcttatttgtacaaaatctcaccgattattggttaaaagattattaattctatcaagcaaaattactaaaagataaattattaattattattatttatttaaattattagggaatataattaattatatggacataaattttcacgaagtatgaagaagttgattttcttattcagttcgtgtttttgtcagaatcacttgaaatttgcaggaaaataaattctaagggcaacagaatctgcaaaattcataaaattttattcttctaaatttttttttacaaaaatccgtttattagtaaaaattaaaagttcacataaaaatttttagttgattttttcaatttttataaaaatacggatttaaaataaaattgtacgtgagtgcaaaattttggacttttgtactaaattttattgcatattattagttaatatacaaatgtgtaatacaaaaaataaaagcagttgattcaaaaaaaaaaaaaattaacaattggcattatgaccaacaaaagtctgtgagagattttttgggcttaaacaattttcaaaaaataggcaaaacgtaaagcataaaagaaagaattgcactcacatgaaagttgcacaggtaaaccacgaaaagtgcatttttcttctctgttagtcgattttcacattttaaaaaaccttaattcgctgttcgaattttttgcaagtttctgatagcaacgcgaatatttgctaataaattattgcgttcgcctcagaggcgtaaatttgaaaaatgttgtgtattgccaacctttagagtttcctagattttgtccagaaaatacacatatcaaggtcctggcttttttcaaaatgtcaatgtctgatggagagctagttataaataacattgataat

SEQ ID NO: 27057 - DNA, 1045 bp, Heterodera glycines
  unsure (1)..(1045): unsure at all n locations
tatattctctggtgctttgaatttttttggagttatgcatgtatagttttacactaatttttattggtgtttaaacttattatttgcatttttatgttatgggtatcaggttttatttaatatttttctcttaggctttgttaactttaattttatgatatattcattaaccaaatatatattttaattataattttttctcaagcttttaagagtataaatatgaataagtaattttaatatacctaactatttttcacaaatatggggtcaacagttataacggccatttttcagagaaccgatcataactcaatggatattattaactgattagaaaacaactaaaattgtaaagatagttcaaaaatatttaactgaatactgaatcctgtaaattaataattgaaaatagggaaataaaatttattatgaaatgcaaaacatctgcaacaaaaattaatctaaaatatgataattggtcaattttttattatttagacaatattagaaactaatttaatctcacgatttttaagcagaatgtaacataaatacctaaatgttagatcttatcaagttaaagaaatatgttaactcgaataaataaaaaattaacaaatcgttcatgagtctaatctcttttttaagtatttatctaaacaaaaagcgatgaacaagccatagaaattttcttcataaataaaattcaaatattaataaaaaagatattagaaaataatacctgttctataatgaaataataaatcattaaaactgaatatttaaaaaatatttcatgttttaatgcttcttaataatcttataaaatatgagatattaattagtttcctaataanattaacttgttatagtaccttaatataataatgaacgttccagaatttttatataaaaaatctaaaagcgtaaattcgcaaacgaattatgcaaaaangtctaaattgcttgttttttattatgattaagaataaattttttcgtaccaaattagtgaacattataatcgtttatagatggaaaa

SEQ ID NO: 27058 - DNA, 992 bp, Heterodera glycines
  unsure (1)..(992): unsure at all n locations
ttttccaagaaaatccaaaaaattttcaggcggccccaattttggcattgcgggatgtaggggtagtacaataggggggggagtatatttaaaattgtaaaatgatgataataaggcgatcgctgtcccttatcagcagccgtgctcctccaactcgttgccgccgaactcgcgcgattgcatcaggaaagcatataaaaagatagctcccgaactgttggagcggacccgtgccgaactgaagcgtccgggaacagccagttcgatcagcagatgtgggtcgtcgtcgtccacggtctcttcaccagcgaggcgatccgatagggagaagcggaagctcgaaatgatccgtcacgtggggcaaaaatgtgaccccaattgccagacgtgtgatcagctcttgaaatgatctctcgtccccattccaatacccacactcatcacaccattcctattatcgacagtctttctatccgatcaaacaccaaccaatgtactcttaattaccccccccccttttttattaacaattaattatgccatttcctttgcttttccaccataaaaaatcatacacatctaatgcgttttacaaccctcccctacggcacacccttccccacgggttcgcgcccctccccactcccaacgctcgcgtcctccctcccacagagtatcaccacgaaaattcaaatttgaatttagcgccaaaaggggcgacaatcgtacaggagtcactactgcaattttttcaaaaaactaggaacagaggggcccgccgatatgcaccatccggagaaatattttgaaaattaatgtgatttgttaacagattttttctaataatgaccaaatgtcgcactttttgactcaatttttacatgattaataagtaaaagccgattcaggcggtgtcgaaggcgccgccgggaaaatttttgaaaatctagatgaaatttgtgataaaaaaatggatttaattngagtgaaat

SEQ ID NO: 27059 - DNA, 1715 bp, Heterodera glycines
ggggggggtggccccggggggagagattagtgaaaatggaatggggaatttagcaacaattggattcccaaaactccgtcagaactcgggacacgttgtgaacagttcggacgaatcaaagatgttttgcgggagaaaatcacagaaattgaagtgagtttgtgcaagtcaatgccatggcatttttattcgcatttcagcaaattttcgccaacagtgagcaggggggcagccgcggcactggcggaggcggcggagggggcggcggacgcggcggcgctgtgcaatttatgtcggcgtacggcgggggcggcgctggcgggcaagaattttggaacgtaattcctggggaattgttaattacctattcttatactaaatttaatttgatttgcagtcgggcgatgagtcactgacaattcccgggtaatttggggggcgcgaatcaaacccaactaagggataattgacattcgctaattaggagggccaagcggcaaattggaggcaagcgaagtgatcaaacacaaaacgaaagagtaagtgcgaacaatgggaacaatgccattgtaaaatgccattgtcggaatgccaacatttcattttcatttttaaatttagtcaaaaatcgcggccgacttcgctttgtgcaagtcggagccgaacattcagcacaaactgaagcaggcgctggataaaacgcagcagcgcataacgcaactgaagggaatggagcgaaaaatatcagtgtcactttttatggcgcgacttttttaatttaaaatattagaaaaaatgtaaattataaaaataaatgattaaataaaagtgtaaaaattaataaatcagacaataaataatctttatgcaaaaatacagtaaattcactaataaacaaaatgaacattcattgaatgaaattcgtttgcttcttttctccctaaagcattaaaattctctctcctttctctcccccctatccctctctcatttctcgctactccctcctccactctctctctctctttctccctatttctctctcatcaatctctcattgttccacttctttctcccttcctttgccactcatttcgtctttctcccattttttactcccatttttggcattgcttttcctccttttggcacagtctttgctctcttaaccgtttgatcactttaaaccatttcataatgtggtgattcctcacatttgtcttcctcctcaccgcgtcttttgtcattgtcggtggattcggcacattttcccccggggcgttctttttgccaatggctccgtatttttcgctgagtttcttaacctcccgaatgtcaactttcactgcttcggggggggggatgggttaattaccagtttaattagttttaattgctttccttacttttgacgcactgttcgtaaattggcatttgtgccaattttccctctctctgaagcttttccaatctgccgatctcccctttgatccttcgccattcttccaatcgtcggctgttcatttctgtcccctcccattgcacctcttttggctcatttggccattctccgaatcgcccccttttctcttttttatttggccattcgaattgtgcgactgtttcttttcgtgccaaatttggctgttcttttcgttctttctttggcactgaccgaattaattaattacataattattgcgtatcccatcccc

SEQ ID NO: 27060 - DNA, 1126 bp, Heterodera glycines
gaaaagcgaaatttggcgaaactgaaaaatggggaaatgaaaaaaaaagcgaaatgcgaaaagccaaaatatgcgaaaatgcgaaaagcgaaatgcgaaaagcgaaattttttctacaactttttaatagttaaaatcataaagcaaaaatcattatttaaaattttattccaaatttaaaaatcaataaaacgcttttttgaggcgcgctttttcactagaatttagtagggcgaaagctgatggatggcaaaaacaaggcggaatagtggaaaattcgaaaagcactactaaaacattccataagcatgacttttatttttagcgacgtcctatgcttttgatgggagaaaatcattgtttgagaatttggctaaaaaaaatttgaaaataatttaagctttcctattttaccgcctattcgaatttcattttgaattggtggaaatatggaaaaagtgtttttataaggtgctgtgacgaagttacaaaactataaatgataataattgaaagggatagtagctctagattcaacatcttctactatcttatatatttttaaaaaatctagcaaaataaataataaaaatttttatttatggtttctaaggaattaaaaaacccgggcatgtgtaaaaacagtcaaaaatgcgatttagagaaaatctataaaacaaaaatcaagtaaaaattatagagtctggtaatattttaaatcagtgactttttgaagaaaacccgtaaaattcgtttcttagtgatgcaattttattttttattacaatttggtcacaattctgctggagacgacattttatccttgaaaagcatgacaagacttggcaacaatatgaaaaacaatcattgaatggatagaggagcataatttttctagtcattttttgctgtcggccacaaatgtcgaaaaataaatattaatttaatcagcttttgattcaattacatttattttggacgttcaacttggacccaacagaatttgccttacaatttcgaagcacagcaacaaaaaaaaaacagatatttccaattcaagtaaaaatactaattttgagcactcaaaggtggagggctttcattaatcactgttgcccttttagaa

SEQ ID NO: 27061 - DNA, 970 bp, Heterodera glycines
attcaaaatagtcacaattaaaaaaggcatcaaacataacaattttattttccgaaattcgtcgatcaatacgaagttcttaaaaaacaaacaaacgaaaatttactagaaaaatcctttatgaaggctagaaacctaaaaattttttttcattttttgcgaaaaaaaaaattttggagtcaaggggggggggggggtgggaacgagctgctccgcttttagcaatatcaccagagattgaaacaatatctctggatcagacatgtattatcctaatccaggacaggaagaactcatttcaattgctaaaaattttttcgctcacaacactttaaattttggaaatttttttgggtgaatggccgtgttttgggtgctcgcctcgctccctacggagttgttttcttgttaatgattcaatagtaatcaaaattaattctgcggatcagctcaatttatgaatgatttctgataaattattgtctctttttgtaatttcgatcaattccaaattctcccacattttgcagctgatcgtttcccttgttgaccttttcggcaccgccgacgacctttggcctaaatccgcttccaccctgaccatccttctcacaatcatttcgctgattttggccattgcagctgcaatgcttcttgtttcgggtgtccaattccgatctccgtatttgctagtgccacacatcttaatgcaggtgtggcttgatcggacggcacccgtcagttgggccccacacatttgggccccagcatgttttccactatagcttttttctttgtcatccatatccaacaatttttgcatcagtctaaacgctttcacatgctctattacacttacaaaaagcgaatagatattcaacgctgtaaaaaatttatcatcagaaaattcacattattctgagttttttgcaattttcatgtataagtttattttttgactttgtctaat

SEQ ID NO: 27062 - DNA, 1435 bp, Heterodera glycines
aaaatttttcccgacggcgcctatcggcaccgccggacccccttctttcccaaaagttttttggaaaaaacgtatcgaaaaagtgatgtatttactacattaaaaaaaaattttaattcccggtttcaaaactggtacccaacccggtacccggcttttcaatacccggtaatacccgggcccggtttttgcccaaatacccgggcccatgtaactctagcaaatataatggatctttttttgaaaattatttaatcccaagcaatttgttgttcttgtaacacccggctaataaaaattggcgggctaattgaaaaatattttgccttatttcgataattagtgccagattgggttctgtttttaaacttcccttgaggggagggcgggggtaattatagggtggtgcactaattacagaaatattgttttattttactattttagaaatctgcgcggcacttgtgccactcttttggccatcggctcagccgttgactttctctttttgctctcattttcggtcccttttgccctttcgttggttggccagaacatgatcagcaattttggctgctttttcctccagtttttgccaaactttggcctgttctcctccgtttggatcgttttctttgttggcgttgatcgactgatttctgtccttctcccattaaggtaatgtacgagaaaaaccctgccgatatttagagattattttagtggaattttacgaatttaatcatagaatatttcactaaaataatttgttttaaaaatataaatctataaataaatctttggacttcagatatggtctctttgagcagcaccttttcatttatattttaccaatgcttacggttacatttggctacagtatctatgtgcttgtagaagctgcaaaatggccactttttgtataccccgactggtaaataaagctcatttttgaaaatttaaaatttcattcgttttttaaatattaattttaggccagttttatgcacaaattctgacatgttcagttttggcatgaccacaatgctcctgagaaatggtctggtcattaatggggtgtcaatcatttgttatttgtttgttggactgtcactgttttggtcatggcaaaaaagttagttggactaaaatttaattatttttaatttctttctgtgccctgcctcggcctttcaaaggggctaaagattttacatgggaatacaattaaaaaacataaagctaaaatttttcattaaaatatgacaaataaaatgtgttgtgcgtgggcatagttattttcaatttaatcttttttttatttaataaaaataaataaattctggcctaaaaataaaaattttttaccgcaaatgacttgcagggattaaactgattgtcctcttttaagcatctttaaatcttcagattttgc

SEQ ID NO: 27063 - DNA, 1093 bp, Heterodera glycines
cgatttgtctgcacaattgtcgattatgattagggctcaaaatgttagtgaagaaaaacttgcacaaatcgccaagcgcaattttctaactcagctcattgttttcagaagagtttgaaattttgcattaaaatactttggtataaggtctaggcaccttgccaaattttagaattttttatgcactcagagatttttaagaaaatccgctttttccagcctgaacgccaactttgtggtcaagttttgaaaacaggtggttttttgtaaaaaagttttaacaatatgaaaaattctgaaattttgcagggtgctaggtctcatgccaaagtattttcatgcaaaatttcaagctattctgataactctgaaccgaattacaaaaatcaacttgagcaaaatttaaacttttattcactaaaattcacagccctaattatgattgatcagcttacttttcgcagcatttggaaaattcatggatggaacttaccatttttgtacatttcccatccataaatacttttaaaaaatcttctttagtctgatcggtatagcaattattttttattattcacattttaattccaaccagttttccattaatctctttttctttcctcgttcagttactgttccttttgctgccttcccactgcttctgatcgctttgctcattgttaacgccatgtcgtagcatgggcgttgccgttgatctttttgggaattgtgttgctattaattgttacattcgtgctgtcgcgttttataaatccgccaaaatggaaagtcgcgttttataaaaccgccagtcgcgttttataaatccgccaatgtaaacaaaatattgtacatatgcgtgattatcaatttttatataatttaaatatagtaaaaataatcgagtaaaatgcaaacttttattgctctttaaaactttctccaaaaatatgaactgacaagcataacaaatcctaaacataataaatattaaaaaatataaaacactggcaaactttttgtaaaaacaatcagtagttttataagaacaattgcaaaaagtaaaatcaaaatcggaacgtttttggcattt

SEQ ID NO: 27064 - DNA, 997 bp, Heterodera glycines
tttcgatgtgcacaaagtatcccccccttttgttgccgagtcaaagcaatataaaatctaaattattttatttgcgggtggttaggcccgggtcagtaggtccacctcattgttttcagtgccaaccattttcagttcacttgcgccgctttggaattgcccgacttttcggacttcgcccgactccgtccgttaattgacgcactcattgctgaattggtaggccttttttacctcactacttacggaaattaaaaaaaaaactcgaaaatctagttttttttagtttgttttttgccaggaatgggggggggggtagggcaagaggatgcaaaatcaagaatccggcattcatttcgaccaattccaaaccccgggcccgatttcgaataaagactcaaatatttgaatttcgcatttgatttggcattggatgccaaaaatacacaaagaacaaacagcaaacaaatgttgtgtctctcccattttaggatctcaacgatttcctcggctgcaccgcggcgctcgaaatgctggcggagacggccgccacggcgccaaagtgtgtgcccttttttggccaaattggcctcctggacaaagtgtacgcgctgttcatccgaaccaaggaggagccggacatgggcatcattcacattggtatcaattcccaacctaatttggatacacttcttcgggatttcggaccatcgcaaaattaagttaaattttctttgaaatgaatctgtcgggaaaggcatgtcctttcaacttcagccaccaagaaaactactcttggcacttgttttcaagcgattttaacatttaaaaactatttcgaagggttatttataaaatttgcgattttttttcgctttttgtcactttatttttctccaaaaatttcttggaaaatgaagggaccaatggtaccttgagtttacaattgggaagcattattttttttcatcctaaaaattaaaaaaatttttttttt

SEQ ID NO: 27065 - DNA, 408 bp, Heterodera glycines
atccaattacacataaagatttaaacaaaaaataaataaaaccggataattttcctaaaattctatttttcccagaacgattttatccaaatatttattatttcccctaaagaatttacgcatttttcaaaaatacctttaacaacttcaggttgccggttgtcaacttgcaaatcaatagaattgagatttttttgctttttaaacctatttttttgcggcggtttttcaaaaaaactttttgggaacttgaggagggagggatggtccggcggtgccaatagacgccgccgagaaaactttggaaatttgattgtgatttgttaacagattttcccaaaaaagacaaaaatttttgcgattttgtgtcaatttgttaggaaaaaatgtgagcgggggggggggggg

SEQ ID NO: 27066 - DNA, 914 bp, Heterodera glycines
attgcaaaaatttgtcttttgtgtttaaaaaatcagaacgaaattacaaaaaaaaaaaaaaaaaattccggcggcgcctatcggcatcgccaagccctctccctcgcccatttcccaaaagtttcttggaaaaatgcgccgctaaaaaaattgttaaaaatctgattttttgattccgaatgcactaaattgtacgatttgctcaattttctcccctaaaattgttaaaaatgatcttgggaggcgaaaaatacgaaatttgatatcatttaaattgattaaattgttacacaagcgatttcaattttgcaaaatgttctgattttttggcccgatgttctgattttgaaaaattttcgatccgcgcccagaattaagaggcactccattgacttcttataaatagtaaatcttggttatttatttaaaaatgaataaaatatatttaactcaaattgattttagcttaaaaaggaccagtgatcactttctattatttttgattagagattttttacctcaattggcacttggcttgtttccattatccgatcgtaaattgcttttcgcatcattccaagcaaaacgattcccaaactgctgcacaaatcggcaaaaccgagcagtgtcaacaactaaaaaggagattgggttgttaattattatagaaattaataaaattttgttaattaaaaaattgatatttaaatgcatattcaaatgacttttatcaaaaaatattctcagtaaaatttgctttattatgatggaagaaattccttctgctgaagaacactatcaaagttgcgatgcaaaaaaacgaagagacaacggggacctttgttcaaataagcataattaaaatactccttaaggatcgttaattaattaatggacaaagcatttaatttgat

SEQ ID NO: 27067 - DNA, 898 bp, Heterodera glycines
aagacattgggatttaggacaaagggcaccggggcggggcgggggtgggaggtccaatgccgtcccaccaattccgtcccagccaagtttaagaagatttaatatcgctttaagtatttagaagatgtatgcaagctatttgtggcgcattaagtgatctaaaaaactcaaagcattaaaaatacataaaacaattgatttttatttcttttatttataattgttttacccctttgtgaatcattgttgtgagcattgttgagctaaaaagcttgtgtaaaatcttttgaataatggcgcaagtttattgaatttggtcaaaaaaataacttttgctgctctaaacttggctgggactgagttggcgggcacagaatcgccacgaaattggcagggaaggagttggcggggacggaattgtgggactgagttggctcgcgccatgggagggggcgggggattaagtcacaacagaaatgaaagcagaaaaataagaagaagaagcatttaacaaaggcacggcttggcttcttcatccatcccccaaatccccattcttttcatcgctggaggggcgggggcgggggaaggccgaaaatgcggggcataagtgcttttccgtctcgactgtgctggaattatgtgttatatggatgaatgaggttggggtggcgcaatgcaaaaaaaatatgtgaggagaatggacgaaggacaattctgtatttttccaaaaaaaaattatcgacaaaaatcatcataaaaattaaaagctcattaaatttgtcccacttacaaaaaattaaaggccagaaaataaaaaatgtcggttttggaattttctggcaatcactttttttgtacttggacccaaattttttgaaattttgcgtgctgataa

SEQ ID NO: 27068 - DNA, 1225 bp, Heterodera glycines
aaagacaagtaacaaacaacaaaaaagaccatgcgaatcaattgtgcgctggcttttaacgcaatattcagaattcaagtaattttttaattctttactattgaattttttcccagtgcctcggtttgactttattctttgttttatacttagctcgtcaaaagctttcgaatgatataccaaattggtctgagtttgacttgttttataaggttaggagtgcccattttgtcagttttcagcatttttatccggttcaaaactggtacaaatacaaatgcccgcaacttttttcgttcccaatcgttttcagcgccgaagaaaaaggttttgggtgttattggcttttggatataagggtcatattttcccaaattttaaaattgaaacttacatttcgtcaaatgattcatccttggcccaacagcgaatatccgtttgcgatgaacgcacagtaacaaacccttctctacacatgcatagagtgccgttgcaatatgagccaaataggcactcccttccgtccaaacaactttgtcctgaaatttaaatttgtgaatttttacttatggccagtatttcaattaaatatatgcaataatttgcattgcctggtagtgccatatttagtacttcctccacttttgcgcagaatacgtcaatttgttctttggacaatttcgtgttgtttggagcagtgaattggctgatgaacacatcacatttggcatctgaaaattgccaataaaatacatgaaaaggagatatttcatccatcattcacccatgtcggtttgtttaagtggatagattcgtccgggtttgttgcactcagtcctgttacacgaagaacagccattaaaatccatccaaccgctttttgcaaatagccaatggcacaaaatgctttttccatagcagccgacttgttggagcaacgagcctgaaaaaattatagaagaaaatgctgatgggtgtcaagccaggcaccagactccgtcgtgtattccagtataaagcagtccattttacatggcaccattttcagtccctcgcgtgggtaaatgaatctctttcggttcatcttcaaaatgaacccatccaaacatttatttctgaatttggtggctttatttttaaattcggtttgacaaaactctaccgtttgaaggtatttgcattgtagcaacagcattatgattcttgctgagcaattgaacacccc

SEQ ID NO: 27069 - DNA, 391 bp, Heterodera glycines
ttaattgaatccattattaataaaatattacttaatttttgaaagtttaaaattttgcatttgcaccaatatttttttctctttttcatttaatttattttcaatttaatatgattataatactgttattttaattatattttgtgtgtattttttaacgcataaaattaattttacttttaaattaaataatttttttgcgtaaaatttaaatttaaaaatgacattttatttattttttacacattttctcacatattcaaaacaaaaatacaattgtatttcaaattaatttgcataaaattttgcgtgaattgtttatgtaaatgcaccaaaaatttcgggcaaattttttgccctcaggcgaaacgttttggaatttcctcccccc

SEQ ID NO: 27070 - DNA, 2211 bp, Heterodera glycines
atttaaattaattacccccccccccgttggcagtgcccccattaattcacttgtatttgttgtccgcacaaccgcccatcccccctttggccaacaaatagggctttttcggcgttatgcaccgggccaacagcacgttgttttggcaaacaatttccacaccaatcggcacgtcgagaatcttaaaaaaatggcaataaattaaacaaaaagaaaaaattttttcccgaaacgccattttgcaccgacaaatttcgccacatcctacacaggcattccaacaaaccacccaaaaataaattaaaataagtaatggaaaaggtaatagaaaattgacatcatttagaaaaaggctggccctgtaatcctggaaaaaaaaatcaggaaaactcaggttgtcggaaaaatgccggggcctagagaaactgcagggcaaacacatgcccggtccgggtcaatcgcatggcactttttccaagttcaaccgaggttcattagtaattaatttattttttattttttcaaataatttcccaatcaatttccaaaaaaaaatccgtatcaaggcttttttttaatttcaaactagacatactagtaatttacttcttatatttcattgaaacttcaaaaaaaattctgcagctcctataggaacccattattcattgaaaatttgacccaaaattacaaaaaaaaaaaaaatttaaaaaaataaataaaaacaaaattttttttttaattttcggccaaaaaatggcggagggcaataattgtgccggtttctgcgctcaccctgtccctgccatggcgcccggccaacttcgtctgccgcgcgttttcgccgtcctccgccgccaccgttcgtgccctcctccgctgctcttcctcgttcacttggccatcctcatcctcctcatcgtcgtcgtctttcttccaagccgcattggcggcacggtcggatgtaaatccgccacagaagcggtcaaagctcagcttggcactcggccgggcgtacacaaagccaccgcaaccgccgatgccgttgtaccttttttgggagcaattttcaatttttatgtattttttaggcgcaaagaatggttgaaaaatgcagaaattttcagtcgccgccccctcgaattttttttcaaaattttcattaaaaaatccaaaaaaaaattttttaatgaaaaattgaaacgattattgtgcgtatttccccttgatttaaaaaaaataattcaaatttgggccaaaaatgtataaggcatgcaaaaattgggaagattttttttaaaaggctcaaaagggggggggggataaaaaaaaaagaaaggcacaaaacggagcgagccaaatatatttttaaatttcctgtaattagtgccgtaaatttcggcaccgtattcccacgaaaaaaaaattttgaaaacttgaaaattcagtcgcaactgttttttttaaatcgttcgactaatgccgtaaatttcgacatgccctgccctccccccaccattcactaatcattctctgtcaaacatggcttctctcacctcgccagtcctctgccgcccgcgcccgagcgcacataaatttggaagaaatcgttgcgcactacggtgctttttttgccccggacggcgccgccgcctttccgccattggccgttgccgccctgcttgcccaccctcggctgctgctgttgctggttgtgttgctcgtacttctgatactgctccctctccgttttccattcatcatcactgacgcgtttttggccaccgtcgcgtgttgcaaatggtcgaacgcattgaccaccaccgacggcaacggaagaagaacggaggcaccaaccagcggacagaagaaggcgtcgaactgcttcaacttgttgtagttgccaatggtataagagcattgttctggcataaaaattttggatttaaaaaaaaatttataattttttttatgtaaagttaaaagcggtgcattttgaaaatttgcaaggcccctctctccattcaaagtgagcgtttcagttttaatacatataattttttgtgaattttagaaccaaaaaaggcaaaaccccgaaaattttgtaaaaacgatttttttttttgccagaaaaaataaaaagggtcaccgtttaatttttaaataaacaaagaattcggaatgattgataaatataatgttcatgatcat

SEQ ID NO: 27071 - DNA, 1079 bp, Heterodera glycines
taacaaatagcactcaaatttccaaaatttttcccggcggcgcctatcggcaccgccggacctccgttttcccactatttttacatggtttttgccttaaaacggccaaaattgggtcatttttagtgaaaagtgcagtttttacccagcagcggaaaaaaagggtttttttttgggtaaatagcaaaaaaaaggtatccagttggagcaaaaaaaaaaagaaaaagatcttcaggtcgggccccccccccgaaaaatgtttctagatagcctctgtgtcttctaactttataaatttacaggtgccggttattccaaaattggttggcatccgcaagatgaggaggaatgggagtacttccgctattgctaccgctgtttggcattcaaagcgccacgcgttcaccactgttcgaagtgtaaccgttgcgttttggtaaataattgtgccataggttcttctcatcattgcgttttcttttgctttagttgatggaccatcactgcccgtggattaacaattgtgtcggacaacgcaatcagatttatttcatcaaatttctggttgtttccatcgttgggagtgtccatgccgccgtcgttctcacgagttgtctctatcaagtcattttctttgtgggtttcatttattttcttgattttctctaaaaaattaccaaattttcagtttatgctccaaaatcctgactctgtacagcaaaaccctctccaaagtccgtccgatttgtccatctcttccttttaccttttcattgcctccattttcgctgtcggtctttcctacggtgtgataattgcggttggaattctgctaattgttcagctgagaagcatttatttggaccggacaggcatcgaatcgctaaaagacaaatgacttaaaaatgacccgcgctgacattgtgccatttgatgttcctttgcaacacttagtcttttcattttttgctcatggattaattgcttaattttataataatgattcatctcctcctaaattcttccctttttatgtgagtttattgtatttgcctataaacacttaaatccgctctgat

SEQ ID NO: 27072 - DNA, 254 bp, Heterodera glycines
tttttttttttttttttgggggggggggggggggggggggggggggggggggagaaaaaaaaaaaaaaaaaaaaaaaaaaaaaaaaatttttttttttttttttttaaaaaaaaaataaatttttgtggggggggggcggggggggcgggggggcccgcccccccccccccccccccttttttttttttaaaataaaaaaaaaagaaaataaaacaccccccccccccccccccaccccccccccccccccccc

SEQ ID NO: 27073 - DNA, 1603 bp, Heterodera glycines
gtcgggacaccaattccgaaggattacctggatgaaaaatggaaaagaaatgcaatgattgtacggaaaccagggaaaattcattggctttacattatcgcccgttgatcagtttgcccaccccctgacgccttgggacggacggacattcactttcccagcaaaaagcataccccccccccccccacttttttacacaatcgaacagaaaatggcgaacaatttgctttttctttcttcataaaaacagaaatgaacaaattgaaaagattgcaacatttgaaaatgcatttgacatttaaaaagaatattataaaaaatgaaattacaaaagcaaattcatcttcatcaaaatttaattaatgagaaatttagttgattttacaacaaaaaaagcaataggtgaaatgcaaatattaatatacatgtacagtaattcaacggtattagaaaaatcatcacaagaatgcttaattatactgaaagaaaaatgtaaatttaattgtttattatttcttttgcgtctttgagtttctggaattccgctcatcatttaatatgacgatcatttttttgtaatttctgctgagataagcaatcaaatcaaatatggtatacattgtcatactgtaattgttgcaaatatttttataaaatatgaaattattatgcaaattcttcggtggaataaactttacggctctatgtgacccaacaaccacctgctgctgctggcgtagtgcctctggtcatccgcaaatcaattgatatgggcgggcaattaattgcatcactaattcatttatttcatttaacaataatacataaattaataattatgacgtttagtagttttctcattaattagaaaatattacatttattcattaatattttaatgattccatttaaaaagaattactcaaaaatggcacccaaaaaattcatgccaatggagttaatcgtggaaattgtcactttcctccaatttcgtcggcgatgggccaatgttcgcgtgtcgagagcatttgatcactttctgcttgaacaaattggcttatttttgacgaaaacgaactcatcggtttgtaacatcaaagcaatcactttttaaagaatttgatcaatttaatggtttttttcaaatttttcaatttttctaagaattttaaatttggtttttcatgcatttttccattaacccgttggacagttaaaacatgtaaaaaaaaagccccaatttgtactatgccccgattcactgttttcgataaaaaattcattaaaaaaacaaacagaaaagattatttgctttttagagatgagaattgaacttttgagtgaaaattggaccaaataaatgggcataagccactacgaaaaaaagaggaaatgcccaccaagcttcatcctgaacctccaccaaagcgcaaaataaacttattttggaattaacaattttaggaataatattttttaataaatatttttaaatttcaggctaaacaatgcttaacagagtttggagaaatgataaagaatttgccatcaaaacacaagagaaatgtttttaatgaaagcgcgcgtaacgaaggcgtgaaat

SEQ ID NO: 27074 - DNA, 1252 bp, Heterodera glycines
tgctgtatattgcccagaagaagacgcagaaaagaagaaaacggcatgcaaaagacacaaaatggaaatttataagtaataaaatttaattggttgaatcattaaatttaatttatttagccaatcggcgcgagttcaaagccaaggcaaagtgacaacaattgacggagttgaattggagatgaaaatagtggaggacagaatggaggtggaaaagcggaaatatgcgtaattaagagcataaaacaaaggaagccattttagtacgatggaattgttgccgaaaatgccaaactgatgcttctcgacggcacaaatttcaaactgttcaacccaatgctcgattccggcgcacccggcggaccaaaaatggacggagtgttctcattggcattgggagataaggtaattaggaggaagcgtcaattgaaaaattcattttctaaggaatcgcccaacgggatggaacaattattagagaagaaagctgaaaaaattgcaacggtttacatgcagccatttgggtaattagttattaataagcttagaaatcggctgggcaaattagccgctctttagagacctcgacttctacagcgaaacgacagcaaagattaacattggcgaggtgaaccgatcaaattgcgattttggtgaacagcccgaatggctgaacattgtcaatgacggaccgagaaaatggtgaatgatccgacagatcatcaaatagaaaatattttaaataaatattttaattaattaagatctaattttttgacgtaaagtccgctcataattattaaattgataaaaacaaatttaaaaattaaccaaatcaggaaaattgggatgcatgtgaatgtgaagaatgaaaaagacaacgttatggaaatgccgaaacagcaagtgctcatctcaacaatggactcgttcatttttgcgccagagtctgtcactaaacctttgatgaaagatttaaagttggtgcaggacaaccaagtctttaaggctggacgaagtcttggcaagacggggctggtatggagcggaggggggggagggggcagatttattggcattggcaaaattcacagaacccaaaagatgtattgataaaatgcccatagcaggaagagatggactaactgccgactttcgaattcaaattcggcaggcaaacattcactttaacgccaaaaaatacattttgaagggttttatttcactaatcatttaattttctcccataaaa

SEQ ID NO: 27075 - DNA, 1157 bp, Heterodera glycines
agcaaaatgctgataaatcagcagagttgggagccctctgatcataatgaattatgtcgaaaaataaaaactcttagaaatataagcatatttggaagtttaaattaaaaatgagaagctaaactaatctcttatttcagagaagagacccctttcaaatctcacaatcaaggcaattaaaacttttatcaaatttatttatttgtttttggctagcagtttattaatgaattttttgttgttgtttttagccacttttttaaaaaatttctcagtgacgaactgaaaacagtgaataaacaatcagtgacgaaatgatcggtcacctaaattacattctatgataataaattataaaatgatttattttgatataaatttgaaaaattaatttcgtttgtaagaattaattggaattcaaaaaaaaaaagaaaatgaaattaaattaatttttgatttataatttgttattgatttccagataattaaattctgtgataatgaatgaaaagcaaaaatgtgctttgataaacaattatttgcagcaaagcgacagagaacggaccaaaaaatagatcaataattctttagtgtttttgcttgggcgagaaacgcaacactcaccaaaaacgggcaattaatgtgttagagaatggagagcaaattgaacacgagagaggaacgaaattaatggaaaatgatgcctttttgcactaaactccccgccccccccccgaaatttagtgaactaaatttcacaaaatataagcctaaaaataggcataattaaaaattgcataaaaaatttcaaatagaaacttttcacagtataaggattagagtatattattagcatttttagcttgttgagaaatttttaggactatttccatatgcatatttgtgcataatttatgtgctattttggtatttggtgcatattttatgtgcattttgggttttttttaaatcctctattaaaagggcagcaatatcggaccgggtcagttagatacggccggtttagtacggccgttttagtacggccgttttagtacgggcggtttagtacgaggggtcggttcaatacgagggtcagtttagtacggtgagctgattttggcgacaatagagtctactgattttttccgaaaaaa

SEQ ID NO: 27076 - DNA, 1116 bp, Heterodera glycines
  unsure (1)..(1116): unsure at all n locations
attatgcaaaaataaataaaaatttctaaaaattgatcgtccataaatatttgtaaaatgatcaggggctcaccaaattttgcagggatacgtatcggaacactacaaatgcttactaattttcctagatttttaaacccggtgaaattttttgcagacaccanccactnttgcacttaaaaaaatttcaaaaaactttaaaaattcatagaaaatttaaattcataggtactactgctaaatcaacgcagagacgcctttccttgacctttttaggcccctgcaaaatctggtgcgcttctgatcactactcgaaaaatgagtgattgaattttcactaaaaagttaagcctaaactttttggcctgtttaaaaaggaattaaaaatttttaaaaattttattcatctccctttttgatagaaaaagcatcagagtgcctaaactagcatgtaaataaaatttggtgcgtttcagagcattttctgaaaaaaatatttatgaattaattatgcaaaaataaataaaaatttctaaaaatttgatcgtccataaataatttgtaattgatcaggggctcaccaaattttgcagggatacgtatcggaacactacaaatgcttactaattttcctagattttttaaacccggtgaaaattttttgcagacaccaccattttgcacttaaaaaaatttcaaaaaactttaaaaattcatagaaaatttaaattcataggtactactgctaaatcaacgcagagacgcctttccttgacctttttaggcccctgcaaaatctggtgcgcttctgatcactactcgaaaaatgagtgattgaattttcactaaaaagttaagcctaaactttttggcctgtttaaaaaggaattaaaaatttttaaaaattttattcatctcccaatttgatagaaaaagcatcagagtgcctaaactaacatgtaaataaaatttggtgcgtttcagaaccctttctgaaaaaaatatttataaattaattatgcaaaaaacaaataaataatgaactctcttccttaataattttcctgcaccgaaggaactcactccggccgcttcgcggcctcgtggtgggccttc

SEQ ID NO: 27077 - DNA, 1494 bp, Heterodera glycines
gtagtctttatcgagtctgcatacactcctctttcgtggtagatacatgtatttttttttaattctagattaaaaattttataaaaaaaatataaatttgtattatttttgttttttaaataatgtaccctctaaatttagagattttctatgttatattaataggtacaattactttctatgcattttccggatttttcttttaaaataaaaatacttttaaattggaaaaaagaaaaaaataatatttaaaaaataataatcattaaacaataaaaatatttttctatcaactttgataaccttaacccaccgagcaagaaaaaagtggttggaatgcaaatttattgtatgaaaagtaaaatcaaatctttattagtcataataaacagaagtaataaccatgcctgcgggcacttcaaaattttctggaaagaatctaaaagccacttgtaataagttctcgacaattatgaaaatacatagagaaaaaataatccataacaattttatgcaacataaataaaaataataatttaaaattaaatttccgaaaataaaataatttaattaaatatcaaataactttaagccttcgttcgtaaatcatgtctcataaataactggcagaatttttgatctaataaataaaattataaatataatttaattgaaaggtaatttgataattgcgctgattatattttgctatttaaaaagttaaccttaatcttgattaagtcggcacacttacgggtaacggaaattatggcattttttgaccccgtaattacggattatgtgttacggatttttacaatttttctgtaattttaaatcaaaaactggaattttttgaagattagcaatttacaaaaaaaaaattatattttggaaaaaatgtattaatgcaaatttaaatcaactcagatttaaaatataagacgcaaattggttttcattgagaattggcgggcggtcaatataaataataatttaaacctacataaaaaatgcattttcatatattttagaataaaattattaaaaataaactatacgtatgatttataaaaaattgaaaaataaaaataataaaaaatatacaaaaaaaacctatctaacagattataaatacacgattgcattgtacatgagaaattaatacataaaataaaaatgactataagaaatttttttaagataaaaattctcgttatagtgttgataaaattatattaaatggaaaattcattaagtttagaaaaattattagtttttttattatagcataaataaattaaaattttaaaagtgattgcttcattaataacatatttaaatttaaaaaaagtaattatataaaaaaatctcgtcttaatcaaagagcaaaaaataaaattaattttatcaatttaaaagtttaaagtctattaaaaaatatttttccaatttatatgagaataattcacagtaaaaaatttaatttgaaca

SEQ ID NO: 27078 - DNA, 747 bp, Heterodera glycines
atctccacacgtcgacgcacttcctccctgtatcgtgccggatcgctgcggaacaaaacctgaaattttgatgaaatgatatatattcattcatatgccgaagaatcaatccacttacggcagcatccacattggccggactgttgaagttcgggacgggtgggggcttttgctgggatttgatgaatcattgcgcgcttttcttactgttcggatgaagaatgtcggtgaggaaagtcattgttggcggataagacgggaacgaagctgggaatttgagcagtgccgtaaacgtgcatcccgcgctaaaaaaaggggagaggagggattaatggggaaacaattaatttgattgatttgcacttttcctctgccgccgccgcccactcactatggtgtatccggcggaccatcgatgaaaatgcgccatttgaagatctgtttaaagggatgggactgaaatatgcataacggaaaagcgtatcagatcagttcggtcggtctcacattgccatcgttgacacgcacggaatccgctgtttttgctcgcgctttgcatcaacatttcgagctggcgcatcagcacacttctcggactttccctgctgctgcttctgtggcttcttgttgttgttgttgttgtcctgcctcggcttctgttgctgctgcttcggctggttcttgtcatttgcggacggtcggagtcgttgtggtcgtcggcacagtgaacacaacacaaaaagcggg

SEQ ID NO: 27079 - DNA, 706 bp, Heterodera glycines
ttttatattgtttgaaaaagttccggtgtacgacttccaaaaaatttttgaccaccgaaattacgatttccgaaatctttggcctcggaatgccatccctggtctatacccgttaccaaaacggcattatttggtctttcttttgcacgagaatttcaaatgcatccaaagtctggtaaacaatgtcacggtcaacgtaaacagttgcgcctttttcaatgccataaccaccaactcctattgttagctggttttgccaaaacgattcgaatttataaactagaccagtcaattttagactcaaaaaatgtaacattttttaagaaatttacgaatccagtctcctttttgcaaattcagaacccagaattcgatcgaaccttctcgaaaattccaaatttatttattgcattgaggcattactctaaccaaaaagtagggtcagcgacaaattagcacagcatatttagctaacaattcagatcaagttgccggattattatgagatgtacatacggccgtttttatacatccgatttatttacatatattttagaggggttgaggtttttgttcataaaatacattttgatcactgatgaattatgatcggtcggtcattcttaattaattcatttcttctgcggccaatcactgtttttgttggtttgtccgtcactcatttggggatccgacgcttagggat

SEQ ID NO: 27080 - DNA, 793 bp, Heterodera glycines
atacaatttaaaataatttttgaaatcattaagccataaatgtttcttaccactaattgtaagcaattaattcttgcacattatggcatagatcgctccggacaggtgcgatattctgggcgatgactgtgagccgacccgagaaattttgctgcaaattcaagacgtgctgcagtgctgctctccattaaacccctggaagcaatgcctttgtgatgggtcgacgaacactgtggatatagtaatgaggagaaatttttaaaatttatagcaattagagagagcatttggccaatttttcagagtgaattcgccgcactgccgggggaaaaagtgtccgcgccgaacacaacgccaagcagtagcaacagcagaagccgatgggcccatttgggtgatccgctggaagcggacgacatcatgtacaccagagagcaggcgcaagaaaaatacgacaatatcatggagagtaagtgtcaaaaaatgtatcgtaaaagttagaattttctatcgtaaaagttagaattttcgggctagaaattgatcaagaattccattgggatgaaacaaaaaatgttagggattttcacccttaaagtattatttttggcataataatttccgtttacaaaatgagaaacagggtaatggcatagcataagcgccttatgtttaaaatgttcaaaatttccaatttttccccccgcgcgcctgtcggcatcacgagacccttcaaaaaacttagaaaaatgaaccaaaattgcaaaatttgctgattttttgatgaaatctg

SEQ ID NO: 27081 - DNA, 930 bp, Heterodera glycines
gtctatactggggccccttaaaaaacaaatgtctgaaaaatcctgaaagaataccataatgagcattgataaatttattttagtggcaaaatcgttatgttgtttgccagaggcgctgcttgtccgaggctcctttgctagtaattccttcacgcagaatttaaacaataaaaaaatcagggtattttcaaaaatggaggttgtcgtgaaagaggcgaacatttggaacttttctatttgcagaattacatcggatacgaatatggtcgtctttaagcctctattttttgaacaattatagtgtattttaggttttaaattcaaacgctcgaataagacgctcgccatcttgatacaaggccaaactttgatcttctcatttagcaatgtcgagagcatggtgttttggaaggagtggttgaaggacgtttgtgggcgaagtcatttatcgagccgcacttataatgacagtgcttatttttcaggtgccatgtattttgtcaagtgccataccattccaaaggacaattccgtcatcaaattaaactctcgaagtgcacgaattcacatcactgtatttttgtagaatacaagtgccactttcaaacgttattctttaaagcgctacgccctcgtcattgtccaggaagtgccgcctaaacagcgattgtatctcaacttggaagatttgtccggtaattactgctcggattggtcaattttttgtttttcatctatcagcagatgttgaatgcgttcaaaatcgctttgcgtttcgcgcattgacctacccctggtcaacaccgcaaagctttgtgttcactagcgatcagatccctgaactgacagccaaattgcagtgtctcctgaaggtgcggtcatagggtcttttctgggatgaaagcctcgtttagacgaagcagtagcttc

SEQ ID NO: 27082 - DNA, 973 bp, Heterodera glycines
  unsure (1)..(973): unsure at all n locations
tgatagccgaaattgagcacaactcgggcggatgagcagtaaacagactacccacccgatcagacagctgatcagcgacccgatgattaggaaaaggaagacagagaggcgggggttgcaccgccaattggcgagttggtcaatgcaaacggagcagtcaatcaactcgcattcgtcgatggctgagcagacggtttcggcggcgcaactgcgggtcgatgagaggctgaacgttgcggaacagccgtaattgttgacgagaaggtcagcggacaactcatattcaatggtggcagcgcccaaccgatcaaagcacgaattggcgcaacaaatcgtgaccttctgtacggcgggagtggaggagactcggacgcctcttctggtgcaattgacgtggtttccgatgcaatggaatgttgggggtggctcgggatggtctgaggcgaatggccaaattccttgtgctggggaggcttggacgcccaggaaagtgacgaggatggccatgatcatggtcgtggtgggaggaatcgcgaaaagccgtgattttcgtcgcgtaagcatgccgctgtgcttactgatcatcggttctcccgaaagtgaagggaccggcggcatttcgtgtacagacatttcggcgtttttggggtctctgaggccttgatcagcagggatagacacggtggcgtccgggggtggttccggggtctgggtttcggtctccagggggcaaagacggctgattggtcgcgtgacggtttgcccattttgcattcgcaactggacgcttctcacgttagggagtgagccgtttagtgcaacgacgatgcccatcggccataaattccggggggcggaggtcctcttcgacgatgaccacttggccgatgttgnggggcggtgggagttcgaaggcgggggactttatgagtccatccggcgcgctctctgatggcgaggaggtactcatgac

SEQ ID NO: 27083 - DNA, 1444 bp, Heterodera glycines
  unsure (1)..(1444): unsure at all n locations
ttttggtgggataaattttttaaaaatttgtttttataataattatttgtaagctcggagagtctcgtcgttctgctttctttaaaaaatgtcgggttttttagggtttcggtttggtatcgagcgccgtaaattttcggttccatgcggcattagtaattatcacaatgcaaacacacccatgccccagaaaatgtgcctttccaaaaacagagtgatcaggaacaagcggaaccgatgccgatcacgcgcgagcagttgcgccatgcctgcgaatgcgcgttgctcggccacgccgcatttgcgccgtactgcatgcagttgattgcggagaaactgttggagacggagggcggcaccgataacggaacaggcgcctcgggggacgacggatgcgcactgatcagacgacaattggaaatctgcgaattctttgtgtgtccttatgctgttcaaaaagtgccaaatcccgctgccggtgccgaaccttcggcgggtcttgttccgagtctcggattttccgaattttgagattgatcgaatcaatccacaatttattgaggaaagaacatcccattttcaactgggccatcccaaccttcaagtttaatttaagggattcttgaatctcggggttaaaactcgaaaaattttcagtctcggacattccccgaatgccaaagtcatacatcaaaaacacaatcgaattgggctttgacacttttcctcgaaattcatatattactggagacgaacaaaaaagtgccaaatgcttttgctcttcgaaattgccctgtaggggtctaagcgctccattcattggcataactttacattggattgcaatgccatacccaactactcgcattattacggtattatgtaaatttgttactgttttttctcagattcgctcctgcaccaaatttcacgatgtgtccaacagcgcactgcacgaacatgtggacgacctgatgaccgccgtccgtctgctcttcctcaacccatcggtgcagcaacgggaagagacactgctcaaagacatcaccgctactgtacgtgcgattaacttttggaatgaatactgtagttttggaatggtactgtatcatagcttggtaagcaaattatgcattaactcttgggagtatagtaatgggaagcgcatgttttcattggagctgaggatcaagtctactgtaatttggcataaaaccaaaattgattgtgagcatactgtatcatactgtagctagggcgaaaatcaggaccggttatattaatcttatgagatttagttgacattttcattttgggttgggtcaatgcttcccaaatgtcaattaattaattagtgactttacaggtcgaccgaatgttgcatgtgttggcatcaatgaaaggagcataantgcagcgaaattggtcttctgctccaanttaa

SEQ ID NO: 27084 - DNA, 1226 bp, Heterodera glycines
ttgaggaaaaaacaattattagtgctgggacagatatttattaaatccaaaaatatttacataatatttacgataaatcctgtaatgtttaccaaatattgagcataaaaaaattaacagctcataggtattaccacaaaatttattcattaatttaaagttaaatatatatatttttcgagatttttaaatgcatttttccaaaataaataaaattacaaaaatcacaaattttggccaagaaaaaaaataataagaatttctatagggaaatggaaaaaaaatatttaaattttttttattcttttaaatttataatttgtcaaattatgagctgatggcttcaaatgtcaaataaatattatgcatgcgtgatcactgataatcggagcattgaacatcatccctaataataaattttaaatgtcttgaagtgggaaggggttgtttagcacggcggagcagttattaattactaaattacgatttgcaaattcaaatttaattgttcacaaatgcccttcaatttgttaatttttcaaaattggtatcactctgatttctttctatcaatatacatgttttacatgtttttctatgtataatattcaaattattatgtaacactcaaaaatagccatttttggtatgctcacacagaaaaaagataatggaaattacgagggtggaagagaagtcagcgtagcaaagaaatagttcatctcatgcttctttctctaacctccttttcatcccacacataaaaatgcgataaaattccttctcctatatatgctctctaacgcaatgctctctcgccgatttgtgctcgctggcgccgtttcccgtccgcatgcgttttgtattttgtatacacacttggtcggagtccttactccccagtaaattccttaccgtattccttctccactgtctgagtctctctctgtggaaatatcccagtgatatttcgtcttgtgcgcgtacgcgtccgtctgtcactgtccaacagagcgcagagagtgcaaattgaaggcaatggaggggaacaatcggtgccgaaaggtccgtgtgggcggttgcattcggttggagtcggcttgagcgcaaatcgcaaattttttttattttaaaaattgaattcctgtaataatcagtagggaatggatttttaggggcgaaaaagtccaaaataggggcaaaaattttgcgaaataggggcgaaa

SEQ ID NO: 27085 - DNA, 873 bp, Heterodera glycines
tctttccaactaatcatttgccgatcagccataaaagcgaatgtgatatcatttattactaaatcaacttcagctaaacaaaggtcgaaaaaggcggttggcctatggcttgttggctgtgccggaatggtttatggcgccattacaattggaggactgacgcggcacttttaatttattttcaatttaatcatttccttttttgtttaggttaacggaaagcggcctctcaatggtcaattgggacattatcaaaacgatgaagccgccattcactcaaatggaatgggagaaggaattttcaaaatatcggcaatttccagaataccgattgtgtgtacatattattttgtttgatcacttttttttacaaatcagcaaaaattctgacggcgaaatgactttggccgacttcaaatttatttggaccatggaatatcttcatcggatgtgggggagagccatcggacttgtttttctccttccttgcgcatatttttggcgtcgtggttatttcaacggaccaatgaaattgcggatggttttttctggcctacttattgcttctcaagtccactttcattgattctttcgttagggtttccttttccgtctttttagggccttgttggctggtggatggttaaatcgggacttgacccatcaaataattcgaattccgacgtgcccagagtttcacattatcggtgaggactcaacatgccttttcacttaccttattttattttagggttgcgtccccgacgtcggggttggaaaattcggggttcggggttggaagtttcggggtcggggttgccaaatcgttcggggtcggggtttttcaatttttgccttatgccaaatagtcaa

SEQ ID NO: 27086 - DNA, 804 bp, Heterodera glycines
cgtcgaattgttgctcatctcgcggtccgttctgaactccagcagcattttctccaattccagacatgagcaggcgtcggcgaatttcagttgggtccaaaagtgatgaagcaactgaagagacagaattatggcgagcctcgttttccaaacgtcggtctgctaggtgctgtggttctacaatttgttgccccacctgctggtttgcgttgttatttagacgaatgccgaggttgagtgctctttgacgagtaagcggaggcgaccgaagattaggcattacttcgcccttttccacaaaatttacttgtcgaattcggtgagaagaaaactgatgaatttcacaaaatttccgttctgtagaagatgaaatgtcgatgggaattactttaccctttttgtcgaatcagctttgtagacggaattactttaccgagctgacaaatcgttggtgaatttcttttcactttttacttttttgtcgccgcagtagttgaagactttgtagaatttcctacttctacaattccccgtataaaacccgcgtcgaccacacctttttgcaggagcgccacgtacaaataatttaattttactcagcagcacgtcgaacagttcagcacttacacacaattgaagcacacagaataaagccttattattttatgtcaggcaattccaaattaaagtctgaggacaaaaaaaagaaaacaaaaacgaaatcacaaacattaaaacaaaatgccaaaaatatcataaaatcaaaaataaaatgaggtcattattaattacgacataccgaaa

SEQ ID NO: 27087 - DNA, 1573 bp, Heterodera glycines
caaccagggctgggcgtaactggattttcaattacggaaatccgtaatccgtaattatggcgattttctcaattacggaattccgtaatccgtcatgacgggagtcaaaaaaccccgtaattttccgtaacccgtaatccgtaattttcaaaattttaattttttaaaaataattttcaaatttttattttaaaaattcaataattttataagcaatttaaaagcatattaaaaagatttggcgtgaccgaaagtgtggatagacgccgtaaaggaaaattttgaagatttaagtgcaatttgtaaaagattttgcgtcaaaacttaaaaaattaattttgtcaaaaagtaattttgaaaaaacttattttaacattttttggaaatttattagcaaaaatacaataaaaaagggaatacgcctctaaaaaatcgacccaaaaatttcaaaaaacacacacctaataaagtaaaaattttctcaaaaattaattaatttattatttcttgacaaggagtttaaagttataaatatgtgtcccaatactgatttggcttcattttgttgctttatgggaaaaattttacgcatttatcgcctaaattttagggtttagaatagggagaaaatttttggaaaaccctgaatcgaaatcccggttctggatcgggaaatggtaaaaaaaagcgaaaaaaattcggcaaatccgttcgtaaatccgggactgattgcggtaaaaaaaaacagaactggcccggtattttaatttaaatcatcatcaaataaaaataaacgtgaaattttattgcttaaaattgtatccatcacacaaattcaatgaatatattccattgctttttgatcatctcatcttgactagtttgataagagcaactgatcaatggacaagcaaagaattgcttatttctttcgctttctcctcactgaccaacatttcgacaagtttcagcgcaaattcaaaggcagtgcctgcaattgaaattataaaaattaaattttcctaaatttttaactgatttgaaagttaggcgccagacaattgcgccacaattaaaatccgtgggttcctgtcagtttttttttgggggctatgctagaaattcattcgtaatttgatgatttctagggcttttttacagccatattgggggaaggggtggaaaatttccagaaaaatgcattaaaaatagtcagactcaaatttttcgcgctttagctaccccatacgctaaacggaccccaaattttatgcaacttgggttagattaaaaaaaataaaaacttaattatacataaaaactcaaaaaatccctgcaaaaaatcggttgccattcatcaaataaattaataatttttaaattaaattcaatcaaattgttgagcaaggtctctcaccaggtccacggcttgtcaccacattgttgaacacgcacacattgtcatccgtgtatgaataaccatcgccagcaattttgtcctgcgaatatttaatacattattaattgaaaaaaatgttccaaaaatatacagtgtttttagttagaaaacacc

SEQ ID NO: 27088 - DNA, 1827 bp, Heterodera glycines
cactatttttggttatttgatcaaaagaatgactacttcttgtttggttattattgttattggcagttactatacttttccgaagggaaatgcgggcttttagtcagttggtttaagcatggcaacatcattgcctccgttgctacttgaggtaggcataagggattccctaggatgctttctcagtgcgtgtggttcagttttaaaaatgattatcgttttcttgtttcggacatagaatgattggttgattgatttgttctgcctgcttgtgtaaatgcctattgttcctttaagcgcctgaagaagcgtgggattgttgcgtcaaagaatggtatgtttttacactaattggctggttttaatgtgccgttatttcccttaacattcagaggacgaggaagtttttgctgagagttatgatcaagatgacgattcggttggttgttcgcattttattcgtttgatcattttctaatttataaaacttgcagaaattggaaatttcccgtgagaaatatcgcggcggtgcccccggatgtcctaacaagcacaatccgttccacgtctgcacagacttttgctttgaccattggcaggagggctatccggagagtcggtaagccaaacaaacaatggacaagtacaaattaatagttataaaaaatggcggaattgagactatccgataaatacttggagcagcggaacaaaatgttgcggaattacccactgccgaaggattgggtcgaaatttacgacccagggatgcaccgccattactattggaaccaaatgaccgacgaagtgagctaaaaacaacaaaatggggcagattttgaaagcactaccaacttttaggtcagttggctctccccaaaacacccaaaggccgtcatttcggaggcggcagcaaaatcggcaaaaggtttttgtttgtttgttttatcaagaatttttctgttagaagcatggaacatgagcaaaatcgagcgcagtgaaggcgaaagaggcgggcgaagaggggggcgagagggcgacgaaagagagggcactgagcggaggggcaaagagcggtacaaaggcaaacggacaaaggcaggcacaatctttgtgggtaaatatatgtctgacattgaatttggcaggattatgaaattgctttgccggacagtgatgaggaggagggccgaggccgagctgtggttgaactgagtgaccgcgacagactcagtaatcctccattttgtcccccatttctccatttgttccgcaatagaacgtgcaaagcggcgtggaattgacccgatggacccgtccgcttacggagacgcaccgtcgggtggctggacaaccggactgcgagaagtgagctaaaattgggacatacccattaaatggcaaaagttccctcttttctgaccctgagcgtgtgaataacctaattgcattccattttaggaccaggaagtgaagactggcgtggatgtgacggcgtctgggccggtgtgtcttataattgcacttctcatccctttttaaatgcctttctaatttattgccgttctcagctcttccaacaacgtccttaccccgcccctggtgcaattctgcgcaaacagaaccccgacatgtacaagaacaactgacaatgagccgatgtcaaataattattttggaatttattacattttaaaatatttttggtttattttttgtttcttatataaaggctgtttttggaatactccccatattgtaatttatcgcatggtatcccttggctctcaaactttacaataatgcaaatcagcatctttatatgac

SEQ ID NO: 27089 - DNA, 1049 bp, Heterodera glycines
ttataggccgggaatgaaagtcccggtcaggccaaaaatttttctatttccggaaagttatgaaattttttcaaaaatgccaccaatcgatagagctcaaaaaacggttgcttgaaagtggtctccgttttcctgggaaaaatcggcaaaaaataataaaattcaaaaacgaaaaattttcgagggggcctagctcgaaaaattttgaaaattttcaaaatctgaaaacgccatcggatgcagctttaaaaactacacaaatgcttaagcggcgccaacccgctccgcttaacccccagcgagttattcccgaaaaacggaaaatgccgaaattgggtgccaaattttgccattttctgcagcattggcatttacagatagccccgccaaataagcgccaagttttcccaaacattccaacttaaaatcctaccagcaagcattttccgctcccgcttcttcccgcaaagttacaggccaccaaagacggacaaaaaaattttcgggccgtttcagcgccgctggcgctcaactggccaccggagcggaaaacctatagttttcctgaatgcgcctcaaaaagttgtaagacccttccaccactttcagacccctcccgacagccgttcgactcaaattagtttttaagacgaaagccaacttttctctatggtaatataaactagcgtgtggcggcgcagtagttgctcggtgtagacagtatacttttggtatatatgggcgggcgctgacatgagcgcttcgcgcaaaggacttcgttgctagtgcatgcgcgtttgttaagtgatgagcaagtgcattcggccgcgtcgcggcctcagacgggcgctttgcggcctcacgggcgccttgcttcgcgcaaaggacttcggtgctagtgcatgcgggttttgaaatgaatttatggatgtgataagggattttggtatataggtatcgcgaggacgcattcataattttgtggaaggacttttcgggcgctttcgcggcctcaaaggggggctccgcacccttttttatatttaagg

SEQ ID NO: 27090 - DNA, 1875 bp, Heterodera glycines
acatatttcgtgattttatacatatctgatacggattttggcttttttctgacatattttcattttttaaacatattttaaggatttttattgaaattttggaaatcttcaaaaaaaacccccaaaatttcggcaaatttttcgtacatattttcatttttttaaatattttgagaatgtatagaaattctcacgaaaaattaaaaattttttttaatgtacaattaaaaattcttgttttttccaaaaaaaaagatattaaaaattattttaaatcgatattttaaaaatgtatgcggaataatgtatttaattatttattcttgttatttagaaaggaaaaagaagttatcaatctgggaaattggtttatttaaaattttgggtgaggaagtggcagaatgccaagaatgcaaacaaaaactttcaagaaaatggggcctatcatcattgaaggatcaccttttctctgcaaaacatgcgaattcgaaatatgccgaacattttataaaattggaagaggaaaaaaaagcgcgaattgttacaaagaaaaaaccaacaattgaaagtgtgataataattaaaataaaaattaatttataaataggaccgaaaatttaaaatggatttttttcgtaaaaattaagggaattaggggcccggcggtgtagacatatatcacagaagaaaaaaaaaaagaaattttaatacaatagttaagaaaaaaaggaataattaagatctagatgagtttatattttcaaattctgttcgttttgtggcgccgaaaattgaaaatttaattcgatttttgttaacagacttttcaacaaaatttccaattttattgttttcctaaatggtttccgcttcatttccataactttattgagaaatcattatatattttaaatttaataatctattctttacaaaatgtctttaaatgtaaatcataagtattctgtgcttctcaggtttcccttcgccgcgaccctttcacaatgatcaattgtttccgtgtgatcactactagggcttatatttatagttgctaaaagctgccaaaatattagtttttagtttctaaaagacccccaaaatagttgctaaaaatgggtaaatatagttgctaaaaactttcaaaattatggatgtaaaacaggggtgcgatcgaaaaattttcaaaataagaacaccaaggcaaaaaaataagatttttggatcaaaaataagaacattttgcgaaattgcttcaaaacaattatttttcaattttttcgatcaaaaatgtattaaatactatatttttagtctcccattattggttttaacaattttggggaggaaataagcaaatcataaatttcagtgcattccggatcaaaaactcagttttttaacatttttttttgcggcgtttttttccaaaaaaaaattggtgaatgggcgaggggatagtgtccggcggtgaaatttttgtaaaattttgggtctgacaatgagtcgttcgttagtgctttatgagcgatccccctcccccccccccaaaaaaaaagaaataaattgggctcaaattagccaattctattaaaaaaatttcctatcaacggcgcgccgtagctaaagtttttcgaatgatttgacggcgccgtcatcggaaattttttcatttaaaaattaaataatttcctctttttgcaggcccgtctgaagaccatcaatgacaccaaactgtgtattcccgaagttttgccgccggaattcatctctttggtcgacccaaatccgaaaggtattgtccaattttttatgaaattacacagtatcaaatacgattgaagattggttcatgtttaccgtagccaaatttaa

SEQ ID NO: 27091 - DNA, 1402 bp, Heterodera glycines
aatatttcaaaattaaaaaagcaaatccaaaaattagcgacaaaataattgctaaggaatttgaaattgaatatgaaacgctaagaaaatggaaaaagaaatttgcttcagtttctgagatgtgctttttgaagagtgctaattgatgaatatttttccattgtaatttttgaaattttctcaaccccctagaaatttttttttgaaatttacccctcgttcccagccaaaatgggctgatcagatcaccatgaaggagtgatctgatcaacttggtgttgctaccttttttgatcagcatccaaagttatgcatacctgaatttttttaggcatttttattgctagaaaatatgaattttctgaagtgttcctaaacatatgaccaccccgaaatttgactatatggaagaaaacacaaatttttacaaaaaggaataaagcaaacgagaaatgtgtggtaccaatggatagcccagaaaaaatgctacaaaatgcattaaaaagattattgattatttttctttcaatccagagaagcaatattttcaaagaatttatttaaaaaaagaggtgttcctaaacatatgaccatgactgtattaatgttataaaagcacagttacctcttaaatacattagaggccgctcttagttaagattaaaaaatgaattgcagtaaaatgttaaaaatcaattaacacttataaattttttaaagctttttttatttttttattttataatttttttttatttgcagatcaaataaatattagagtgcagcgggaccgggaaatttgggcaagaccgggaccgggacttttttggttgaaaacccgggacttttttggttgaaaacccgggactttttatattaaaaagaaattttatagagaataaaaaaaataaaaaacaaatatttcttaataaattggcaaaatattttttttataataaaatcaatacataatgcgctaagaattgaagcaaaaaactaaaatttttgctcaagagagattttgaaaataaataattaaattttaaacaaataaaaaaattaaataataatatcaaatgtacataataattgtagttgcagtgagccaatttcgaagtgaaaaggaatggttaatattaatgacatttaattaaattaaccataataaaactcgaaattaaaaaacaaaaaaataatatgatttactaattgataaacaaaacataaaaattataatttttataaagatatttttaatttaaaatttgaaaattaataaaaaaaatttttacttataataaaaaacctttcaactttttgaactaaaattttttactcatattaactcaaataaatattatattaataaaaatatttcataatattaaaagagttcgataaa

SEQ ID NO: 27092 - DNA, 1096 bp, Heterodera glycines
ccatatttcgttgactgattaattcttaggccgaaatttctcgtccaactaatcgttccactcgttgcactcgtgggttcgatccgttgcctgtgccattcacttctgctgtttaatgtaaaatcccttttcctaaaaatttgcccaatttcattctcattgattgtttctttagctgccgccgatcattcaataatcacttttcggccaatttctcagcgggcctctcttttttctttttgttaaattgatccatacgccctttaatttctttaaaatttttgtctgtccattttcctttttgcttcaactccaatcgatcggacaattttcatttaaatgctttttaacattatttaaactttatttaattaatttattttattatccgtatatgtgcagctatttacaatcagtctcgccaagtctcgtcccctaaggcgggacctccatgaatatagatggggacaagggggtgcccaaaaggtctaagtgccaatgtctgactcttccaatgaccaacagcacagtctttattctggtgtccaatgttcaggatacaatgggcaacccccaacccgattcggtctcggggacagagactgatgggcgggagccccgggcaagactgagagagagaagaggcggatgaacacttataaagagtctcgattagtgaaaagaaggaccgccccccgggctgacattgacgggggaacaatgatcagaggataagagagagaaagagagaattaagaaattaagtatatcaggggcataaatctaagcaaattgtttgaacaaacattttaaatttatattgcctacaatttaattgccagtcaaaagtggcaatgcaaacgatgcctttgtgttatttgaaatgccattcaaaatttaaatttttgaaatttattatttaatttgatttatcgtgaattttatttctctaatgtaatgcaaaagttttatcgttaattttcaatttcctcatttgcaaaataatttaatttcgcttatcaaaattccagagttaaattctttgatcaaaaaaaggatattatcgaatatattcgtcccatttgtcccatttatg

SEQ ID NO: 27093 - DNA, 664 bp, Heterodera glycines
tttagcacattgaatattaattcttatccacttttattacaaattctgcaaattgtttttttttaaatttggtctttgtcatttctaacctccgtccttacagagattttgtttctaatacaaattgtgatttttttagttcagttattattttttattttattttatatttaataaatatttttttgggaacatttgtaacggacacaatgaaaagcaaagcgtaagccatgcttttaaggaggaatgacaaatgagacttttcgattgcttttggctttaaagtagggttcggaccccgtgcccgtcacccccgcccccgccgggggcgggacaggttttttggcctcacccccgcccccgcgactctgacccccgacatccccagcccccgcgaccttcgcccccgcgggggcgcgggggtgaaaatacacccctaataatggcatattcgtgggataaaaggcagaaaatttatacaaatttgaatttttaaccatctttgacaaattttttatgaaataaagaaaattttgctgttaatttccaatatatttgtggattagtggttagtggttcaggagccaacacatgattcataaaaattaattatttatgagattttttggagctaattcaaatcttaccgccgcctccgtccccg

SEQ ID NO: 27094 - DNA, 1049 bp, Heterodera glycines
  unsure (1)..(1049): unsure at all n locations
aggggtgcattttttgaaaaaatgtttaggtcgtttcttaggggtgtattttttggttttattgcatttttgttaaggaattttcctaaaaatgtcgaaatagtaaattttcactattttagtacgaagcgccaaaataggtagtgatttctagtgcccgatagtgacatcagaatcgaaaaatttcaacgaaaaaatacgttttttgagctcctttcttcaaaacaattgaacaaaaaaattcgttaaatcactaaaagtagcgacactaatcatcagaaaagccaaaaaaaaactaaaaacttttaaaattaaaattaatattaaaaaaaataaaaaaaaaggcttcttcgtgatcgtttcgtccatctttcaccattaaaaattccaatttttatgcataccggaagcaagaaaatgatagatttttgtcattttggagtcattttcagaagttctttaacataaatgcaataaaaatgttttttttttgacgcgatgacattttttggcgacatgttcaaaataaatttcaaaaattttccactaaataaatcatcgaaaaataatctcccagtctccattagtctaccaatctccaattatctacccccttctgaggaggttgaaaaataatataccatggcatataaaaagagcaaatacggtattctcggattttttaaatatttttcaatattttttaaattgggcggataccatttttaagaaacgcgccagcactctttaagtttggtttggccactctctgaaagatattttgatttttcacatattttgctttgtgcttttattgtgacttttcttaaatcccatttttacaattgaaattgaatttatgtactccaatgtaacatttaattcttctgccaccccaaataaacatattcttataaaacattttttgacattcatttgatgagaattttgcattaaatgatgntnattnngtgtgntaaaatgatgaaaaaaatgaatgaatggcttaatcatcatcagcaatcagtgaatatgataatgaactacag

SEQ ID NO: 27095 - DNA, 813 bp, Heterodera glycines
  unsure (1)..(813): unsure at all n locations
ttagcaaaaaaggttntgatttcantttcatcannttcatttttagagggaaaaaaattattaattcatcaactctttttttttaaattttgtttccagccctcaggcttgggtttggatttaaagatttaggatagatggggggaaaaaaatttttgaaattagtggttgcctaatgctaaaataaataaatgtggttgaagttgattaaactaattcccattccccttttagtatggcaaaaatgtttgatttgtcgctggacaatttgaccttggcaacaaagagatgatgcgcagtggacattcagttcggcgcttgacgttttgaacccggaacaccaggtggttaagcagtactaagcgtcaacgacgagaggtaccagtgatgggcagccgttttttttttaaattttttgttgttgtcggtcaacgcatggagagcggttagtcgttagcgaacctattttctaatattttcttttgcttttgctttccaaggcaacaaaaaaacatcaaaaactaaattgtgagagaagaagcagggaaaggaaaaaaaatttgtccaacaatttttgagggtttttttttaaaaaccaaaagtcactaagcaaaggaagacgaaaaaaatcttttttttttgcggaattatttcgtttcgatatcaatatttataaatacaaaaaaatatatttttaattttcataaagaaaatgtttatgcggaaatatttggctttttaccaatgttttgataaatattatatacctatacatttcgttatactttattttctttttcatataatttgcct

SEQ ID NO: 27096 - DNA, 1016 bp, Heterodera glycines
actcattttagcgaaaaatcaacctgaaaagcgaaattttcgtcttttttcttatttttgacataaattaaccaattttttagaaaatttaaatttaatcaatattttcgacaaaattttggtaaaaaatgtctttttcggaaaattttccggttttcggggtcaaaatcccaatttatgcgatgggggccgttctaatagagatttttttgaaaaatgccaaaatataaaatatggaaaatatggatatagaaacccatcctaaagcttcaaaccaagctaaaaacatgtttttcgtgcgtttaaggcctcccatagtccaggaaaaatgtggatttccatataattcaacgccctactaattaggtcattttatggcatttgtgcttgttcacgcttttttaaaagaagttattagttaattttttttcttaaaaggttaaaaaaagattgtccaaaaaatcataaaaaagtttatttacatattttggcttttttgtacgtatttcttatatatttcggtttttttttaatatatattttatgtatatattttgcggttttttcttacatataatttctgcccttaataatggaaaataaattatcaaattaattaattaatgaactaattgattaaaccgttgcgaaagatgtgccttcggccatgtagtcgtgctgttaattgactcatgattggcttcactgttggccgccacatcgtgatcatttgaatcaatcaatgaggagatcattttcaaatatcaacaaattaattaaaattattttgaatttttcaaaaatttgtcaaccaaattctatggttttatatacttatttaatattttgaacattgcgcgaaaaatttaatcgacaaaaatgttggcgttttctgtgtagtaataataatgcgattataagtgtgggggtggttgcctgctgctgtaattgtttaactttttcacttaacaatgtgacaaaaaaaaggaaatcagtcacatttttttattataaaa

SEQ ID NO: 27097 - DNA, 976 bp, Heterodera glycines
tattattgccatttaaaacacgcagaaattattttgcaatttactggaattttattaaactgttctgaaatatacccgcatttttgtggatgcgatgttaatgagaaaaagcaattttgcttttttaaatattaaaaaaggcataacaataaaattttcctattccaataatgtatccaaagagtcagaaaatgggcagattacaatttatttggagttattattgcctttaaaaacccgcagaaattgtttttggaattttctggaattttattaaactgttctgaaatatacccgaatttttgtggatgcgatgttaatgagaaaaagcaattttgcttttttaaatattaaaaaaggcataacaataaaattttcctattccaataatgtatccaaagagtcagaaaatgggcagattacaatttatttggagttattattgccatttaaaacacgcagaaattattttggaattttctggaattttattaaactgttctgaaatatacccgaatttttgtggatgcgatgttaatgagaaaaagcaattttgcttttttaaatattaaaaaaggcataacaataaaattttcctattccaataatgtatccaaagagtcagaaaatgggcagattacaatttatttggagttattattgccatttaaaacacgcagaaattattttggaattttctggaattttattaaactgttctgaaatatacccgaatttttgtggatgcgatgttaatgagaaaaagcaattttgcttttttaaatattaaaagaggcataacaataaaattttcctattccaataatgtatcccaagagtcagaaaatgggcagattacaatttatttgcagttattattgcctttcaataacccgcagaaattattttgggaattttctggatttttattaaactgttctgaaatatacccgaaatttttgtggatgcgatgtta

SEQ ID NO: 27098 - DNA, 2011 bp, Heterodera glycines
atgaagaacaaattcgaaaataaggaatgattttttcgaggtgcacattacctatccgatcggttggcgaggcactgagccaatttatttcggtgctttggtcgggggagtgcatttggtggacgaaaagggacacttcgactacgccagtgcggtcagaatgacattcaacgtaaggagcggagcggtggaggaaatcagcggacggtggaagaaacgattggcagaggtaaaacaaaaagtgatcgaagagaaatcaaatgaaaaataaccaaaaaaaaagaaaaaagtttctctaattatgctaataaatgcttttccattttcagtttttgtccagcaaaacttcgcccgccagcggtgagaagggaaaccgccaaatgaaacgctaacacacaaataaatggcctttagatttgctcgaatttggactgtatcacaatgaaagtctgcccgaggggttacaggtgaaaagcgaacgaaacgaatgtttgccattgccccccccccccaattttccaattggaaggacgtggccaacactttgacgcccaaattggccggttgtgctcttctgctgtttgtgttctgtctcgcgtgcagcatcgtttttctcaagtgatccctctagaattcgcctacatttggctaatgcctttggcttttcactctctcctccattattccctccctttcccccccccccccccaaaagtgcctcttcctccggcaccaaagtgattggcatcgattgggtgcgcagtaagcccattctcggtgtggctgcccttctctgtcccgcgttggcttctgtttcggccttcggtgcgctcctttggatgggctctctgtacaatgccattgtcaatgtttcgccgttcatcgttctctgttccaatttgtccttctttgtctttaatccatgccaatttgccctaaggcgttggcattgacgacgcttttctaatgaccgccgcttggcatcgcacagacccaaaactgaaggcggagcgacgaatggccgaaacgctggcagaagcggcggtggccatttcaatcacttcattcaccgacatggtaaagatttcatctctggttaaggcagactcagttcgcttaccgtaatgcctttcctaccgtaatgcgttgttcccttttggcatcgtcccttttcctttcagctttcttttggcatcggttgtttcaccactcttccggtggtccgtctcttctgtctttacaccttcttcggcattttcttcacttacctttaccaaatcacttattttgccgctgtgatggcttttgccggccaaatggaacagtcgggcgatcattcgcttctttttggtcttcgcgcactccgtcccgaggaggcgggtgggaatttaatgggactaattaaccccaaaaatatttaattaattaactcattcagacagcactttcaaaagatggatgttggccggttcatcagcagaagcagcagcagatgagggagaagaaaaggggggagaaatgaagccaaacggagccaaagacgggaagagaagggaaagggacaaatgccaaagggtggagggaacggaggaggacaattggcaaacggagggacaaaaggaccaaaaaagggacggacaaaaggaccaggaagaggttggcacaggcatttggaaaaacatttacaatggcaaagtcccattaaagtgccatccgtcgcatttagcgcaacaaacgctcgtcaatcggtcgctttttagcctcctcactctttcactttctctttcatttcgctgcttaaggcttttccgcgaaatttacggcccatttttgctcactaaacggaccaaactttacgttttgctgtgctatgtgctgttccttctgttctctttgctcggcatttggcaaatgcgcgagggattaaacccaaagaatttaatccgaccaaggcgaattagtcatttgccatttgaatttattcaacccaattttgctttttcagctttta

SEQ ID NO: 27099 - DNA, 1334 bp, Heterodera glycines
cttaacttgccagatcggacgggtgcgcatgattccactgttccaagcaccccaccaaaagcaaaacgatataaccaaaatataaggaaaaattttttctccatcttcttttttgatactaaagcatcagagtgctaaaattaagttgtaaataaaattttggtgcactttagagcactttctgaaaaaaatatttatgaaacaaaaaaatcgattttttcaagtgtccgtttggggtactcaaacaattatggggagcaaaaatccaacgcagaattaaagtacaggctatagggaagctattcccgaaggattcggtctccccataaatctgggcgcatcggttcggggggactgccccgaaaacaaaaaaatcgattttttcaagtgtccgtttggggtactcaaacaattatggggagcaaaaatccaacgcagaattaaagtacaggctatagggaagctattcccgaaggattcggtctccccataaatctgggcgcatcggttcgggggactgccccgaaaacaaaaaaatcgattttttcaagtgtccgtttggggtactcaaacaattatggggagcaaaaatccaacgcagaattaaagtacaggctatagggaagctattcccgaaagattcggtctccccataaatctgggcgcatcggttcggggggactgccccgaaaacaaaaataaatcgattttttcaagtgtccgtttggggtactcaaacaattatggggagcaaaaatccaacgcagaattaaagtacagactatagggaagctattcccgaaggattcggtctccccataaatctgggcgcatcggttcagggggactgccccgaaaacccaaaaaaaaattttttggataaaaattatttaaatgaactgactagataatatttaaaataggttatttctcttcctttcagtatccctgcaaagtttggtgcgcttctgatcagtttctgaaaaaaaagttaagcctaaactttttggcctgtttaaaaaggaattaaaaatttttaaaaattttattcatctccctttttgatagaaaaagcatcagagtgcctaaactaacatgtaaataaaatttggtgcgtttcagaaccctttctgaaaaaatatttaagaattaattttgcaaaaaataaataaaaacgaaagactcagattttcgaaaatttttttgagccagctagctcggcgctcatttcagtgtaagttagtcctttaccggggagtatccctgcaaagtttggtacgcttctgctcaattagcaaaaaatatgagtgatcgaattttcactaaaaaagtta

SEQ ID NO: 27100 - DNA, 968 bp, Heterodera glycines
agctatgacggcaagtaaggatgatcctgtgagacactattatcccaggaaatgcgttggaattcaacatttcaacaactcccaccaaaccaacaaaaagaaatgtataatttggtaaagaatgggccaaattcggcctcttctagccgaagtccacagccatttcaaagttcaaaccaattcccatcaaaccaatttgggtcaggtcagtcgaacagattctgtgcttaattagctgaaaattaactgaaatggagaaatttagctaaattacgtgcaaattaatttgctgatgttttaggcactgtgccgttggggaaagcatatttgggccaacaaccattggtggcctctggttcatcaagtagaccattacaatccagcggcacctttttgagaccaaatcattcgagaaatcctagatttaactcatcaggcaactttcaagtaccacagaacagttctgcaaatgcttccgccagttcttcatcgtttcactcactatttggattggaggaccctcaaaagaacactttcgaatcgatgttcggatcaaagaagggataaagcagcattatgtgctaatgagctaagagagaagatgagaaagaaaagcatgatgttcgaccatcatatattgttgaccaatttcatttctgtcccttattttttgtaacgtcctttttctttcataaattactttactaggtcacttcacaaaaagtgcaaatcggggggggggggtaaccaaaaaggcaaaaatcataaatctgactttttctatggattttttattaataactttcagtttttgtattcgaataaataatcattaaaatataaaaaatattaaatcaaataattggctgaattttaaaatatttatgaaaaattttcattccaaatggactaaaataaataatgaaactaaaatatagaaaactgatataggaatgcatccgtttcac

SEQ ID NO: 27101 - DNA, 1588 bp, Heterodera glycines
gtcaaattggggagaatgcgagcgcgacgacggcatctgttggtaataatgattgtgacttttttttgacttttttatatttttgggatttttatgaaatttttgcactttttttgactttttcgtgactttttaaggcaaaatttgaattttagcgaaaaaaattctgaaaaataaaggtaatgcaaaaaagtccatgaaaaaaatagccaataagtcgcaaaaaggcaaaaaaaagcactaaaaatgcaacaaaaaaaagcctgaaaaattaggcaaaagttaaaaatcccattttttaacaactgtattagttgattatttataaaattttactgcctaaaaacccgggtctctatttataaaatgctatcctataaattgttgaaaaatgggattttttaactttgcctagtttttcatgacttttttgcattttttcgtgcttttttggcgttttttgtgactttttggggatttttaatgacttttttagtcgactttttggagatttttcgtggcttaaattctcagccctaataatgacaacagcgaatcactggcacaaatttaaccagtaaaaatggtccaactttttcgtgccattttccctcctccgtttgtcttcccttttcagtccgcttggtcgtcccatttctgcgctttcttcctccggcgaaaagattttcctaaacgcaaatttcgaaagctttgccgaattcgactgtgccttcgaagaatggaagagtctgtacaagcatccattcagagttgccagttcagagaagcaccatgacgcgaagttcaaatatcgctacgtggtttaccattgttcacgctacggcgagccgaggaaaagaggtgggaaaagtgagagagagagagaagacaaggggagggaagagagtgagtggatggagagagagagacagaggaggataagggatgtgttgagaggtgctaggacgaagtgacaaaaatatcagtgttcataataattaaattttattattatttaaattttatttgctaaataataaagcataacttagcttaagacttaatcaaatttattcatcttggtattagaatgtagctctcatattctctaatatctatgtaatttttaaagaattagtaaaaaagttgtgaccaaaaacttccaaaaaatttagactcaacaattttgactagagcccggaaatttcaaatttgcggatcctgttgcaggattggaattcaaaattttttgccggaccggatccggccggattaatcctgaaaatcctgcattttccaaaaaatgcaggattgcggactgggatcctcgaaaatcctgcgcaggatccggtcctgctccgggctctaattttgaccctaacttttttgaaattcaataaattttttcgaaatttaactgaataatagataaatctttgagctatctttttatatcatctgaataattgaatgtttgaacaattttatgcatttaaacgaccttacattttaggatgaccataaaatataacattattaattccttcataggaagtcagaaagaaccaatttatttttatttatataa

SEQ ID NO: 27102 - DNA, 1900 bp, Heterodera glycines
  unsure (1)..(1900): unsure at all n locations
atttattaaatttaaatttntgtttaaaattttgattattctttttttgttatttgaaataaaatagaaaaatttaattaaatgcaacataattaacaaagtccagctgttggttgctcttttgccctttcactgccattcattcatcattgatcgtgatgtgcatggagtcgtccagtccgcacgatgaatgtgtcctctgcctctttgttgccaattgcctcttccgcttccgtgctggtaaaagtttccgccacgtcctcgtccgcgtctgttccaagcaccattttcttgccaatgttggatctctcccttcctctcaattaaacccaaaacgttttgcacttcttcgttgattgacaacgccatttgtcgtatttcccccaactttttgatcaccccttcatttccatttccttcacttttccacccattgcccaatttctttccttccggaggaatttcttctcctcgtctccccacaatatccatttccgccgaatttatttccgcttttaataggcgaaatggattcgtcgcttttttcggttttatcatttccgatccattttccattttggtttttgattttgctctgtttaagcaagactcaaaaaatccgaatttctcggtttcttgccctttcagaggctcgtacagcatttgctcctcttcttcgagatttaaataaatctcatcatccacaagcacttgccgaattctttgcttttcttttctttcttcgatttcttcattactttcaccaattccttccttttcttccagattttggacttttttaattttattcatgaccatcgctttttcctcttccatttcatcagttttccttttttcggcctttttctcttttttcattttcgccaaactctttttcagttttgtcacttcctcttccagtcttttttgagtcctttttgcttcctcctccttcatttcctttttcaatttttccacttctttttcaaatttcttttgagattcgctgtttgcttcctccttttcaccttttttgggctcatccgttcccaacatttcttcgaaaagatggtcaatcgacgacgacatttctaaattgtttttaagttccattttggtgtttatattgttatttctgttatttatttcgttttgaatgttatcatttgccaaattcacatccgtaatactcaaaaaattttttgttattacatttatactgtaattaaaaatgtcattttcattttcttctgcattttctttgtgtgtaacccaaatctcaggtattctttgaatctccacaaattgattttcctcccaaaataatttttcccaatacgtttcggtatcatcaaagacttttaaagtccatctctctccaattaaaaattgtatgtccattcccaaaataattttgtcgcttgagttattaatgaacacttcaaaactctccccgaagaaccaaaactgcacatatttttcattcatttggttttcgtatatttcccaatgctcattcacaagattttcagggatggacgaaattaatggtacaattgtagggtttaaccagcctgtagaagtctcaacaagttcagattccaaccaaatttccaaaattgaggaaatttgctcgagtctgaattcatgccacaaattatttggaataatttcagggccttcctcctcattttcattttggctttccctcacaaacgcaattcccgcactttcctcctcttcatcactgctctcaagcccaaattttgatacattccctcttattttattttcagtaatattttttggttcttcaactgttttttcaatttcattttctgatgcattgctttcatccattacctcttgctctaaattgtgatccgcatattatccataa

SEQ ID NO: 27103 - DNA, 1763 bp, Heterodera glycines
gccgtaaacgatctaacattgaaggaacgaattggtttatgtagtttgtttccgtgcatttaaaccggttttgaatcaaaaatgctaaattcaaaaatttgggtttttggctttttgttcgaattcgggcccggggttcggaattcagaacgatgttattatagaattctactttttatacctagtacaatgcttaatgctgcaaatctttattttaaaatattttttatcactgactcattttccgggcacgcgttagatgggacagaataaaacgaaattggaaaatgaataattaaacttcaaaattttcttcaataaatctttttttaaatgttttaataaatgaataaaatatatattttttttttgaataatttatcttcaatgatttaaaatatacaaacattatttaaaatatttataaacaaaatgaaaaataggcaaatttgttatgacccacaaagaaattaaaattgaagaaaagagaatttaaatatctacataacaaactaatttaaaagagaatttgggtgacaattttatataattttggtgttttttttcttttacattcaatcggttccaaattgtttcctccatcttcttacatttctcatgcgaatttccaactttttggcaatttgtgcaccactcaaattcggatttttctttttcattcggtcaaacttttccacagattccaatttttcagtttttgtgtattttttctgttttgctaaaataatatttattttaaatataatttagttaaattaaaatattacggatgaattgtccgagttttctcccccaatcgaaaattgtcctcactctgacgccaaatttttccgcaatttttgcttcaattttctgagttgttttcaaattgaattgcttttctaactgttctttacacttttcgaatttctcaattatttcaatttttcgctggtttgagaattttctcaccacccctaaagtggtgggtaaaattaattattttaattaattagttaattaggattccactttttattcgatattattattattataccaaattccttcttccatttgtaaatttttgtccgactaattcccaaatccttcgcaatttctctttcaattttcgctatgtttttattttctaatttaaacccataaattttttcttttcgcatttcttcaaattttctgaccaattccctttttgtgtcttcatttatctcctccttttcttcaattagcttctgtgattgtcttaatttccttttcatttcatcaatttagtttagactgttcgacaattttttagcagtgtttttttcagagtgatataaggataagtttctataaatgtgatgggagaatgattgtcagtgtcatcagtatatgtcagggtaggatctggagatcttcagcatgatcttccagggggtttccattgggatatttatagatattaaggtatcagacgataatgtcaggaagggaatttttggaatggttgtcaggtggttggaattttagggaaaatgccagcaaaaatgcttttgcatgattttctagcgtcatacggacatataataaatatggagttttcatagatattttatggataagaggataaaagatattaaatttttgagtgagctgattcagaagagtgcagcagatcgtcagattgcgaagagccagagatggtgggatcggaggattgtttattgtcaatgccatctctgatcatgtggtggtatatt

SEQ ID NO: 27104 - DNA, 829 bp, Heterodera glycines
agcgcacggttgcgcacgggtgtttaccgcacaaacccgtgcctatgggaggggcgcagccctttgatgttaccgcccggggacattttcccgcacaatcccaagcctataggaggggtgcgtgccaaccgaaccctatgtgaggggttgtttctttgaagtctgccgccttgtagatttaatttactcaaatccgcactggcgattttttttttttcactccccctctccgcgccgcgcagcgccgcggaaggtcatcaatcatccacctgtcaccaaagtggcaggtgaaggaaattcaatttttctttgaaaatttaaaattttgaccccaaaccttttagcattttattttcacaaatcctgagatttttatgatgggtttttcggatcctgaaattaaaaattcatttttgaaaatgtgccaaaacagtgcgggttttttttgcatttcctccccgctcgccccgcgccgcgatgccgccgccgcgaaaaaaaaaaatcgataacggaatttggaagaagtgcaaattaattgatattggcagcaaataatatcaattataaattggacaataaaattaattatttaaattgtgtttaaaaataaaaatcgaaaatgaataaataaatcggatgaaaaaccttttcaaaagtaggtcacctgtcaaccaaaattgattgatgggtttttatttctcttccattattccccaaactgtacgtgactttttgttccacttatttcccagtgtggaccattatttagggcaactggcaataaaatgggatttgattgttttcttattgaaaatttcaccatattttt

SEQ ID NO: 27105 - DNA, 857 bp, Heterodera glycines
ttatcctttctgtcacccccctgaaaattttaaaaaaataattttttctatggtaattttatgcgctgatcgcgtaaaaaggccttccttgggggtttttcgaggtcgctgaccacgaatctgacatccatttatattaattcagaacccgaattagaataaaaagttgaaaattcaaatttttaaaattttcactattgccctaaaattgactaaaaacaaaaattagtcacaattttttgaaacatcaaaaaatgattagattcgtgttccgcgcataaaaaattctaaaaattattttaaaaagaatttcagggggagggggggggggggtgacaaaaaggagaagtacgaaaaacaaaatcgtacgtttagtaaaaatgaaaactaaaatcctatttggtaataattttaaatgcgcagtttttaaattttatacacaatttaggacggatttgctcacccaatgctatttttgcagcaaactaaattaaaatggataaagttccatttggtgttgttgttgttgtgtccgtacccaaactctggacttttcccggttacttttcagcaaggcttcttttaagacaatttattaaaatggaaatcaaaagtggaaatgcaaagttaaataaagaatgatcgctttttaaatagtaagaaaacaaagccaattgttaagtgagttgtatcgctttaggcagggaacctgagtcaacgaatgggtgagtaaaatcctgaggataagagaataagcaaagacttaaataccaatgacaaatgggaggggccaaacagatggaattacacaatattgattggaagaatatttgccgatggattaaacgaaggggtca

SEQ ID NO: 27106 - DNA, 1036 bp, Heterodera glycines
tttttccggttttgaatcgcggaatcgtggcgggtttaaaatttaaaagctgaaaagtttctatgatttttaacaaaaaaatcatttgttttttttttcattttttagaccctgaaatagtgcatgaaaaggggcgggttagacgacgagggaattttttacaaagggacgcaccccatctaatttttgcaattttcagttccattagagcccaaaatcccccacctaaattgactagtgatagtccaattaaggtactattacatccacatttatgtggcacccaaattttggaactgtctcgccctcgggtgggacttaaaagaaggtggaggcaaatgtttgaaattttcaagtcaaaattttcgttcttaaatataatgcaatagttttctcgctttttttcacggttttgaatcgcggaatcgtgcgggtttaaaatttaaaagctgaaaagtttctatgatttttaacaaaaaaatcatttgttttttttttcattttttagaccctgaaatagtgcatgaaaaggggcgggttagacgacgagggaattttttacaaagggacgcaccccatctaatttttgcaattttcagttccattagagcccaaaatcccccacctaaattgactagtgatagtccaattaaggtactattacatccacatttatgtggcacccaaattttggaactgtctcgccctcgggtgggacttaaaagaaggtggaggcaaatgtttgaaattttcaagtcaaaattttcgttcttaaatataatgcaatagttttctcgctttttttcacggttttgaatcgcggaatcgtgcgggtttaaaatttaaaagctgaaaagtttctatgatttttaacaaaaaaatcatttgttttttttttcattttttagaccctgaaatagtgcatgaaaaggggcgggttagacgacgagggaattccttacaaagggacgcaccccatctaattttcgcaattttcagttccattagagcccaaaatccgccacctaaattgact

SEQ ID NO: 27107 - DNA, 1496 bp, Heterodera glycines
actccggctgaatccattgttattcgtgccacccgtgctaatttgagtggagtcgcatctaatgatgacggcgggccaatgggcagctttttgggtccggtaacgtctactgcggcaaccaaaaactcattaaatcaacaaaatatggaaacggcgcgtccaatcgcacgatatgccgtaattccgcgcccgatcagtgctgtgggtttttatattaggagagtattgggtggattaattgttaaatttacagcgatatgcttcatttactggcggtgctgatcatctcccacacatgcccaatcagcaccaaatttctgctagcggaacaagacaacgtttgggggcattctccacgacttttatgattaccaggcgagcgggtgaaattgacgcaatttacattttgattaatcaattgcattggacaatcagtcactaattattagatcgcttttgctatatttgacgaatgagaattttggtggctagggatttatcctgctgcaacatggacttaagaattgttactcatcgtcagccttttcaacaccaccgaccgatttcttatgcgacggagggaatagtcgaatatccggcccaagaatatggggagatacatggacaaataatgaacactccgtctggaaaccataaaatacttgtacaggatgaggaagtgattatcgaagagaacgatgaacgagtttagaaagggtgcagacttcccattttcaaggatcgatcttcgattgattgctgacaatgaattcacttaaattttttatataaaattttctcacttgaatatttctctcgtttgaattaaaagttagtttatttcttcatatcttgtatttgattcatgacatcattaatcattatgcattttaagtctttgattctacaaattgaagtcgttttttgtgttaaatgggttcgatttttgatgaaattgttcaaagggctgaaaaattgcacagtgatgttcgtttgggcggcgtcacagaacttcgtcttcccgattcgtccattattcctaccgatgtacattaatggatcattcttttcctatcgtttttatttattccatcaattgcagagaggaaacggcacttcgtgttccgctgctttgttggacgctggtttagacgatgtattcagacgcagtgaagagatttggtcgagaaaacagtcactgcggccgacggccgtcggaatgggcgcttcgctaaagacctaccaggacttagttggtggaactgttcattcactgtttaaagattaattcaaaataatcattcagagtcagctttcatccacccgtctcccaatgtcaaaagttgccgaaaagcctccgtcggctgatgcttctgaccgttacgaggatataaacactgatgttttgaatgaacgatttacggatgcggaaacaaacaaatttgtgcaacgtacgattgaacgagctcagattgaggcggagcggaccttcctca

SEQ ID NO: 27108 - DNA, 1345 bp, Heterodera glycines
tcctctatttacctgcaaaattgcgaaaaatttggttaaggttcaaaaaagttatggccagaaaacttcaaaaaactggttttctaaacaattttggccggaacttttttgaatcttaatgaaaattttcacaattttgcagaataatagaggaaatatagggctatcgaatgatagcaagaaagttggatttggttgacaatgaaaaaagttatagtacaaaaactgcgctggcgcgaaaacgaccccgacccttagcaaatgcccgtaaaagaagacatttaaaatgattttaagattgtttaagctaaaaatgttttgccatttgaagatattttttcacatttcaatttgctcacttttgtttccgtgccttaccgaattaattttattcttattttatgatttcaatttctttagcttcccatttctcctttctatataaaggaacagttgtgatcaaattttttagtcaaaatgccattaaattaattaaaaaattaattgtaataacactttggcgcaaaacaatggcatcgacgtggataatgccacagtaattgccattttgaattatatattttcataaaaaagcacaaaaagatctgctgatcaattgatttaaattaaaaaggacttttgcgcattcttattttattctttttgcatttctttctactaaatcaaaaaactcttcccaaaagcaatgccaagcgaaaacaccggtggaatgatttggagaaaaatgatgatcactaaaaaattaacaaattcataaaaagaaaaattctgataaaaagtttgcaataaaaaacatttaataataattgtcggagggaaagggcgagaaaaacatggaaaaattatcattattattattattcttattattgttattattaataaatgattctcgtggcaataaaaatgaatcgtaaacaaaaattattaaaacaaaaagcgggaaataacatggcgctatcaaaatgtcgttgagtcaaaatgtcgccaaacttaaaattatagaaaaaatcgaaaacaatatttttttgtgaagaaacgatcattaagagatgtatgggtgtatatattgctaagtttgtccatataatagtatataaaagtataaaattaataattctatcatttttcgatttttccactaattttcagcttggctactttttgactctttttagcttcggcgacatttcgacgcggcgacattttgacgggcggcgggaaataacattttttttaattaaatttcccataaccactagaaaacaagaaataaaaaggacttttttgataattattacagtttttaattttgtcaaatcca

SEQ ID NO: 27109 - DNA, 1416 bp, Heterodera glycines
  unsure (1)..(1416): unsure at all n locations
ctgatccaaatcaaaagtaacgaaaagaagcaagagtactactaccccnttgaccaaacacatgattactagttagaattaataatcatataagtaataaatttaatttaccaaaagaaaagctaatcattaggggtgaatttttcacttcaaaactcaatctttaggggtgtctttttcccgaaacttctttcagtgccttcctattcaaattaaaattttggaagtttaaaaatctgagtttgatttcttggcattgccttcaattgttttatcaattataatgcaattttgtttttgataaaatatattaatactatattattattatttttaaaactgtgatatctttttattctttaatattttaattatatacaaatattaatttttattcgaaattgctcaattatgatttaatatacatccctttcaagcattatgcttattgattagatgcatttttttaattcatccaatttaaattttagcgtataatttactatatatttttttttattaatcagttagtatttttattaagttattaacttttgtctgaagaggcgactccgtgtgaaaacggcgcgattccctcaactgcaagcggacaagtcgctcgcattatccttggcgtgcggccttatgctgctggcgttgttcaaattctgggtcttgcttcggtgctgagtcgctatataaaaatcatcaataagggcgttatataaaagccatcaaatgaaaattttcagcaaaaaactgcacataacttttgttataacgaaaatttttcactatacgtaaaataattttaggcatcaaacattctgaccaaaactttcttagaactaagaaaattaagaaatcttgttcgatagccctacgtgtcctctattagcctgcaaaatttcaaaatcggtatgtttcaaaaaagttatggccaaaaatgtttgaaaactcggctccttggagtttttgttgaaatttttcatttgatggttttttatataacgcccttattgatggcttttatataacgacatagcacccttggttcgcgtcgttttcttggtcctgctgctgaagctgtcttgaggaacgtccactttctaagttcttcttcaaagttcgcttgccgcactctttccgctcgttcaagtaattgttaaaaataagtgtaaaacgatttattcaaataccgtatgaaatggcgtttaaattatgtatcaatttgttttttagttttagttgtatcaggtctatattcacttttttccaaactacaaaatttttcttcaccttaccagcctgtttataatgcaattgtttcaaatccatattcttcttttttgctttatattgccgaagcattttatttttatttatttgtctttcaanaaattaattaattagaaa

SEQ ID NO: 27110 - DNA, 1476 bp, Heterodera glycines
  unsure (1)..(1476): unsure at all n locations
ttttaaaatttatttataatgccaaatntaatggattttcccatgnatggcacatgtctgtcctcctgtccattatgtgttccttctcccatttcggcaccattcctttcatcttcgcctcccccagtagcaatgatgggacggagacggcacagctcacaaacacataaaaagatccatgccgtgccgaacccatcaaactgtggggatggaatttgatgggaatggttggggatgaacacagcacacacagtgggagacaatgtgatgatgaagatgatgatgatggtgatgacataagacatagtccatttggagagcttaaaacggggagccgaaagtcggggattggtatgccatgaaaaaaagagactttttacattttatacccgaaaaatttgggggaaaattctttaggaaaaattttatttagtttaaattgcttaaggaacaaattaggaccggttttccattaaggggaaggaaatataggggaaaattattaattttttgttttgaaaaagaatttacttaaatttttcatgatttttttaaatatttttttcattttagaatttttttatcaaatttttttttataaagttataaattaaaaacgccgataaaattgggttttatttctgttttggctattaatgaaatttgatacgtgcgcaaataaataattatagttttgcgagggatcttcagcacagcagcggtactttatggggcacctttccattgaacttaaaagggtgtggcgctggggtcactataatgaaaagttttggacggaaatttaacaatggcatgctcagagtcttactgtattgactttaatcttgtttactgtatcgaaaaagaagaaaaggagaaaatttaaagaaaaaactattttttaatttcgtttttaatatatttaaaagaaaattaatatcaaaagattaattttaaatttaaagaaatataataaaaaatattaattttaattttttattttaaaagaaaatttaaatatcatcacaaaaaaatattaattttttaatttctattttaaataattaaaagataataaaataacaaaactttagatgaatgatggataaagccttgtttattaatttagctattttagtattttattgattaattattttgaaaacatacattttttaaattaaattattggaataattgcattattttttcttttttcattcttaaattttcattttcaactatttttaaattcttttcacattcgattaatttttttttgtaaattatttaaattaacattaatatttatgttaatttaaattaaatttcttattttttccagggacaattgttgtgtgtgagggtgggctcgcttcattgcattgtccggcccaacatggaattgtcatccatgaagcaaattttggacgctttacactgcttgagtgcaccccgaacagactgaccaacatc

SEQ ID NO: 27111 - DNA, 1452 bp, Heterodera glycines
tagtcggtcacattcgggaaatggtctcgaattttttcggcaattacgtgcaatcattttaaaagaaaaaaaaaacataaaagctaaaatttattaatttttttagcgcaaaatcaacaacaaaagcgaaattttcgcttttttgcttatttttaacataaatttattaatttttaagaaaatttaaatttattcaatattctcgagaaattttggcgaaaaaatgattttttgaaaaatttttcgggttttgggctcaaaaaggctaatttagctgctgggggccgttctaatagaggtttttttgaaaaatgccaaaatatggacataaaatatggaccaaaatgccaaaatatggaaaaatatggaaatatggacataaatcgcgaaatatggaaaatatggatatagaaatctttcctagaagcttcaaaccaagctaaaaacatgtttttcgtgcgtttcaggcctcccacagtccaggaaaaaaatatggatttccatataattggacgccctacttatctaatatatgtgttttaatgctatttattaagtaatcttttccaagtgtcaatttcttacattttttttgccttttcgtcgattttcttttccctctcccccttcacctcactcttttctttcgtttctcctgcggctgccctcctctttttccattttccctctcttcctctttattctttctctcacttcccatttgttttggtccaattccctctcccccaaactcaatgaccaattaacatagaattttacaaaataagtctgtctaaaagttgctgaaatttatcaaatctgtccacctgtgaacttttgcccattaattttcaaaaaatgccctcatctgaaaatgtaaaggccaaaaaagccacaaaattttatgcacttttaaaacattgagaaaatgatttttgatgccttcggaaccgacgagacagaaaatacaaattattttggccattttcagctctgggccatatgatcaatattttcctataaaattttggcacataaaaacaatcgcacatattttggctactttggaatttttaacacatattcatattagggaaaaatctataagagaaatacaagaaaattgaaaaattcacccttaaaaactaactttcttttctttatttatttcgaattccaaaagtggccaaatcgaattattcattattcgtcattggacttcgaagttccctgctgaaactttcaatttacaacaaaacaattttatcagaataaagaacaatttaacccgaacacctcgaaatgtagatttgcaattgtgcgggcgaaaagacaaagaatgaaaattttctgggatttttatgtataaatacaattgattttttcaattttcgcacatttttgacatttttttttggtttttagcactatatatgtatttctagcattttt

SEQ ID NO: 27112 - DNA, 1416 bp, Heterodera glycines
  unsure (1)..(1416): unsure at all n locations
ttccatctgtttagacaaaacaaaagtcattcatttccaatcagtccaaataaattccatttgaattgcattttcggcttttctcatcaatttaatttaaacattttcgaatataatttcgaatataattaattaattgaattattttcatttgaaactcttacccttgggcagtattttaacagatggaccttaaaaagtgagattaatttacgctgtttcttcaaaatatggccaaccattccgtccattgtcctcgcattttccttcgcccttttcactgagtctctttcggctgcgctgaaatggctccatgggagatcgcctgaggggaaacaaaaaaaaaacaaaggcactccaatcggtgccaaaggcgacaaaccggacataaactcgacgacgacgctaaacagtaattaaatgtggcaatgagctgctgtactcactagaaccacgactccaagtcgtccttcggcgacagttccatcgcgcgatgcgccgccagcgaagcgtaacgaacacttcccctgagggtggggagaagaacacttggccaaatgaatggccatttaattggccaaccatggagtgctttccctctcttctcacctgaattgcgttttctccctgggcggtttaattccgccggtggccgtctgaaagtgtcggcaaaggccaaagtccaacaaaattacacggccgccactttgtccattctcttcggacagagcaaaattggttggcttaaagaacatctttttataatgctagaattaattagggcctcgaattgtctttttccttttccctaattaataactcttttctttttcgtcattttgctttcactttggcttctttctgttcacctttacgtcgcgatggacaaagccaaaagagtggagctgttccagggactcgagcatctccaaagccaaccgaagcgaagtgggggccgagaaacggtgctgttggaattggagtcgcaatttgaacaaattgtcacccaactaaaaaacaacaaaagaccattaggaacaatcaaacactaattgccatgtccatgacgagaaatttgaaatggtccttaatcattccccggtcgaccaaagcgcagaaatggcccaacttcgctttgttggccgccctcagcacaacgtaatcctttgagaacattcggtgggaaaaggattaatgaatgggacgaaaaagtcacgacaaatggccaccatgttcagcgcgttcaatgccgccattccgcacacctccaatttggcagcgaacatctctgtngtaatatgtgattaatgctttgtaattgccctaatttggtcattttcttcccttttccactcactattcccatttttgccccgcacaaaataccccaaaagattatcactcacttccgtccct

SEQ ID NO: 27113 - DNA, 496 bp, Heterodera glycines
aggtcgcaaaaaaataaaaataatgaaaataactaagcaagaaaccttctagggcgaatttattaattgaacataaaaaagtccaggcctcgagtcgcatcgagtctcgaagaccgagacccgaaaaactcgcgacagagactcgagatggagaccaaaaaaccctaggcttttctcgcgactgagactggatcaaaacaaaacttggtgtacgaaaagccatttttttaaattttcaaatatgccgacaaccaatgaaatttttcttacaaaaaataagcaatgaaaattggaatttccagcagtcaggtaacgatggtgggagtgagtaaatccccctttttcctttgttcattgttctccccagttatttattaatgggcacacatatccccctcccatccatccatcattttttgtcccttattatagggacactgtgaaaagcgatgtgggggcttggggatcgggggggggggggggagatgaatgagtg

SEQ ID NO: 27114 - DNA, 1028 bp, Heterodera glycines
tgcatgatcagcttcttctcacccgatgatctcaagtgatctttttattgttttaatttttgaaaacttaaattccactttttaaggtacacttttggcgtagatcacctaagcagaggttggttggcattttcaaggacaaaaatggacttaaggactattgataaaaaaccacgcgtgtattttgttttttgttaatttaaaatttcttgaaaaataaaatttatctggtaaaaatttcccgaaaaatcaattcacttggtatgaatgatgcctaattaaggagggacaatttgttttcaattcatatccttaaatgggggtagcggctcattagggaggggggagcggctaattaccgaaatgcagtaacttgtgttttcaattaatactctttaaatggggcgcggaagggctaattagtcgggagggggaggggctaattatcgaaaatgcggtactaattaccgaaaatgcgttaaaatttggaatgccaatcccccatttatctcacccctccttgccagtgcctccccatcggctggtcactcctcgtctgatcgctcgtccccgtcccgtccgcccggatgacccgttgttcgacctgtacctgcaaatggctgatgatgaacagcctctgctgttgccgttacactcgatcactgatcaattattggccgatcagctcactgtggtcagacggacacggcccgacggcggcggccatttttcgctgggccgcgagtcgcgcgcgatggtcgacgactgccatttccatcaccgatcggaacacattttggccgcaatttccaactgtgacgggctggaattggtgagaaatttgttgcggcactatttaattgtaggaaggagaaaattatcccgcaaaaaaaaattgtacgatcgacagttttgagagtgtgttttaattgaggctaattagtgggtccagatttatgagatctcaaatttttttttttttataaatttccgggaaaaaaagccatttagggggaaagttgaaaagt

SEQ ID NO: 27115 - DNA, 490 bp, Heterodera glycines
cacactgagttttttttggaacgcccgcactgagtttttttttggaacgcccacactgagttttttttggaacgcccacactgggttttttttttggaacgcccacactgagttttttttggaacgcccacactgagttttttttggaacgcccacactgagtttttttttggaacgcccgcactgagtttttttttggaacgcccacactgagttttttttggaacgcccacactgagttttttttggatcgactcagcacggataatttactagtgggaattaatcacaaaaaagattttcaaatcgtttatgaattaattaaaaaggtgtttgctaaagcaggaatgaatgtgcgtgagtttgtgtcgaatgaattaagtgagcttcaaaaactcccaaaggaagaccgaatcgaaaaagaaactgtcaaattgttggaaatttggtggaatgtcaaaaatgacgaatattttataaaaatgccaaa

SEQ ID NO: 27116 - DNA, 1227 bp, Heterodera glycines
atcaccattgttttgttcttttgtccgtcattcattgccattagaagacgccacttttgtgatgctttgtcccgcttcttcttccggtggcggagacaatgggctaaattaagcgctattttaattatttaaacaaataaaatgccttttttttattgctcacccaatgcaattagtgtcactagaaagcaaaaggaccacatagttacaattttcatctttcttttgctgctgctgcttctcctctttctccccaataattttgcatcgtttcattatccatcggttatccaattcatttgttttggtcagtgtcagcttttcctttgtcaattcgttcaccaattcaaatggcacaatttgtattgacggcgcatgaacagaaaaatgaatttggtaactgacggaagaaatggcattggcacggagaaattgctaaacaatttgattggaaaaacaaaaggcaatcatgagagggagggcggtgcgcaatcgccatttaatttctcagagaatttatatcttatatccaagaaaaatgactatctcttattttgagaaattttatacgttacaaatgctctcgagcatgataggaggggcggtgcgcaatcgccatttaatttcacagagaatttttaaatttatcttatatccaagaaaaatgactatctcttattttgagaaattttatacgttacaaatgctctcgagcatgataggaagtgcggtgcgcaatcgccatttaatttcacagagaatttttaaatttatcttatatccaagaaaaatgactatctcttattttgagaaattttatacgttacaaatgctctcgagcatgataggaagtgcggtgcgcaatcgccatttagtttcacagagaatttttaaatttatcttatatccaagaaaaatgactatctcttattttgagaaattttatacgttacaaaagcgctcgagcgtgagagggagggcggtgcgcaatcgccatttaatttctcagagaatttttaaatttatcttatatccaagaaaaatgactatctcttattttgagaaattttacgcgttacaaaagcgctcgagcgtgagagggagggcggtgcgcaatcgccatttaatttctcagagaatttttaaatttatcttatatccaagaaaaatgactatctcttattttgagaaattttatacgttacaaatgctctcgagcatgatagg

SEQ ID NO: 27117 - DNA, 1590 bp, Heterodera glycines
atgcaataaaatagaaaaacacacccctcagaaatgatcccataaaattcagaaaaacaccctcctaagaattgaaaaattttctcaaaaattgatggccaaattttattttttttttgttgatgaaaagttttaggtttaaaattttccttattcgaaaaaaaattataaaatatttaataaccatttaaatgaccaaaattaagttttttgattaacttttacgtgttttgctacctaaaaatccttaaaaaatattttaagtgcctttttcatgcctatttgaggatttttatgccttttttgcaatattttaaaccaataaaaacaaatataaaaccataaaaaataaaaatacgaataaatataaattcacgtaggaaatacaaaaataaatacaccaaacgtccggaaaatacatatgtaaaagaaacacaaattcttggaaagacaaatggaaaacacataaaccgtgaaatacaaatgcaacggaaaataaaatacaaaaataccatgaaaaggagtaaaaaatacaacgcaaaatgtaaataggaattcacatttaaaacacaaacataaaacacatgaaaatacaaatgtaaaagaagcacaaattcctgggcccgaagaaagaaatcgaagaatatgatccggccacaagttacccccacctctatgttgctctctctgtaaggaattctggaaatattctgaggaaaacccacaaaagagatgaataaagcgattatgaatttcgttatgcagcgaaattaaccgagtgaaagactgaataaattcattgaaaatttgagaatttattaccagggattctttttttatgtaaatacatgtttttttctggattcttcatagcctaattagtttgaaaaacactttcttttttgtgtttgagtaataacacacccgggacctctgtagattgacactaattataagagacaggtggaggggggaggggtgtcaattagtcactaattgggggtggggggaactaattgagtcagcaggcaagagggcactaattggccagccggagggggtggagtggggagtcaattaattaattaaatgtgggggacccatacctattgaacggtgtcatattgacatttactttttttgacctataatttgattgatttaaaaagtgacagtcgaggtggagggtggatgtatttggaggatggatgcattgacaaaagacccttttgaagaaatatgattagacgcttttctgttttatgagtatttttttgaatagacggagtccaaacctccggagcgtattccaataaaggcctaatataagttttatataacgtaatccaaatcttagatgatttggatttaattattcggaacaaggaacgcatacgtaaatacgcattccttgttatttggttaatatgatcggaaaattgtaatttgttatcaatgattactcctaaatccctagttgtatccacagcatttattgtatttccatcaaatttatatgtttcttttgagttgtttgaacccaactataatacaaaagttttttgaattgaaacttttatttgccattta

SEQ ID NO: 27118 - DNA, 988 bp, Heterodera glycines
atcaacggccaatgtcactttgtccccgtctttgtcataaaatcctctgcttgggtccattaattgcttaattatgctcatttttaaatggctttaggaatgaaaaagctcaccgcaaaagtgatgaaagtggggaatcccaaattgttcaatttattgttgaaaatacggccattgaattgtccaattaaattctccgccccgcccttttgtgagacaatttgaattgtggccgaacatttgcaactccaattttcaccttaattgccaatttaaataatgggataattcccattttgtgccactttttgagccggcacataaaaggtaaaatgccaaacacttttcgctgcttttattattctgattgattatcagtgccaatatcttccacgaaagtccctttatttgtttgatttcgctgctccgttcactcaaacaaatctctcgcgaaaattccgccaatttgccaatttccatcacaattttcccgtttgttttgtttggatttgaataatccaatttctccgcattttcttccttcaccataacatcgatggccaatgtcactttgtccccgtctttgtcataaaatcctctgctcgggtccatcaattccttaattataaagtaaaaggcatcccttaattttctcttacagaaaaagtgatgaaatttgagaaacccaaagtgttcattttgttgttaaaaatgtgatcattgcgttttccaattaaatgctccgtgccgcgcttttgagaaatgattcgaaatgtcgctgaacacttgcaactccatttcgggtcttaatgaaaataattaaatataaaataaccaattaacattaattaggtgtcattatcccacctgcccttggcgcggtgcactgaaggaaaaagcccaaacacttttcggtggtgccattttcgtttttcgtcgtatttattttggcacatattttccacggaagtgcctttatgtgcacttt

SEQ ID NO: 27119 - DNA, 1434 bp, Heterodera glycines
  unsure (1)..(1434): unsure at all n locations
tatgtgttcatatttacaaaaaaagcagtttctgaatgtcgtcgaaatttgtggtaattccatggctatagcccgaccccaattggcgctggaattttgccatgaggcttattttttgtgctggtttcgaatttacaggcgcccatgcaattggagcgcattaaatttnttgtcgatttttcttcaatancccaccattatacgataagcatttcctcgcacaccgctcttatttgctctgttttaaacaacaaaattttcccaagcattcatacctactttcttaattgcactgggatcacatctaaacgattatgctaaaaacggggaactaaactgtattaatatttttaacaaattgccgcccttttcgcctaccctgttaagagaaatcttaatttcactaataatttctcaattttcttctataacagattaactcttctatggtgagtttttcaatttctatgtactttattaagtaaacaataattatcaaacatttttctatgattgcaaagcatttaaaaaatcataggcttgtttattttcattatgttttggaaaaggtcaattaaataaacaatttttttttgtaattttattaattgtataaatcttatgcaattttctataagcaatcgatagtgtaacaaatagagaagataagttctgatcaagcacacacctttcattatttccggttaaatatgtgttcatattttaacaaaaagcagtcttgaatgtcgtcgaaatttgtggtaattccatggctatagccccgaccaattgcgctggaattttgccatgaggcttattttttgtgctggtttcgaatttacaggcgcccatgcaattggagcgcattaaattttttgtcgatttttcttcaatacccacattatacgataagcatttcctcgcacaccgctctatttgctctgttttaaacaacaaaattttcccaagcattcatacctactttcttaattgcactgggatcacatctaaacgactatactaaaaacggggaactaaactgtattaatatttttaacaaattgcagtccttttcgcctaccctgttaagagaaatcttaatttcactaataatttctcaattttcttctataacagattatctcttctatggtcagtttttcaatttctatgtactttattaagtaaacaataattatcaaacatttttctatgattgcaaagcatttaaaaaatcataggcttgtttattttcattatgttttggaacaggtcaattaaataaacaatttttttttgtaattttattaattgtataaatcttatgcaattntctataagcaatcgatagtaacaaatagagaagataaaagtctgatcaagcacacacctttcattatttccangttaatatgtgttcatattttaacaaaa

SEQ ID NO: 27120 - DNA, 922 bp, Heterodera glycines
ctatctctttttcgaccaattttgtaccgatcaaagggaaaatggcttaattcaggccccaatgtgcgcctgaatcgctaattagcttggcactttcgaatattacatataaattagccctctcaaattttccttcgggcctcagaaaatggctatctctttttcggccaattttgtaccgatcaaagggaaaatggcttaattcaggccccaatgtgcgcctgaatcgctaattagctttgcactttcgaatattacatataaattagccctctcaaattttccttcgggcctcagaaaatggctatctctttttcggccaattttgtaccgatcaaagggaaaatggcttaattcaggccccaatgtgcgcctgaatcgctaattagctttgcactttcgaatattacatataaattagccctctcaaattttccttcgggcctcagaaaatggctatctctttttcgaccaattttgtaccgatcaaagggaaaatggcttaattcaggccccaatgtgcgcctgaatcgctaattagctttgcactttcgaatattacatataaattagccctctcaaattttccttcgggcctcagaaaatggctatctctttttcggccaattttgtactgatcaaagggaaaatggcttaattcaggccccaatgtgcgcctgaatcgctaattagctttgcactttcgaatattacatataaattagccctctcaaattttccttcgggcctcagaaaatggctatctctttttcgaccaattttgtaccgatcaaagggaaaatggcttaattcaggccccaatgtgcgcctgaatcgctaattagcttggcactttcgaatattacatataaattagccctctcaaattttcccttcgggcctcagaaaatggctatctctt

SEQ ID NO: 27121 - DNA, 2171 bp, Heterodera glycines
tttcactatttcaatgtcaatgtcatcactttgtcttcatttttaacgttaaagtttttctcctggtcctttaattgcttaattaagccaatgattggtcaatcaatgaaaaacaaatgaccatccactcaaagaaagtgaaatgaaactcggctattccgcgctttcgattgtttgtccaaagtgcgctaacaaatccgtcaagttgaattctcctcacatttattataaaaaacaattttgacaacttttgtatttcttccctcctaaaatttttatttttctccctagtttgctgcttttaatttatttgaatttaattgaaaattctgcagttgatgtttaacttccattataggcataatggtacaaacaaaattacggcaaaataatgacaaaaagggagaataacggagaaaatttgaatttaattcatcagcaaaatactgaccctaaaaggtttttctcatatacgaagagaagaggcaaaaatgtacaattcagatttgcaaaagatacagtacactcgctttttttgtcctatacttttttcaaattttttgactctaaattcataaaagtaaaaaatcaaaaaatcaaatgtaaaaaattgaggcaaaataatgccctgccgatgagcaaaagaaagtaaacgccttattaccccaagattttgccaagccgacaatgattttgtaattccgtttaaaacgtaaatatgaaatgctattctcacacctttctcttcgtggttaaattgttcgggttttatgaaacgcggctgcaacgcgcggcgcggttcgttcggtaccctttgttatctcatggctaacaggaccaagccacaattgaaatatatctgaacataatggtaaaaaaaaggtgcaccgcaatttgagtgtccaaattttaattcggataaatctttgttcggaaaaatagtgccttttcattaatttcaattggtcgggtacgaaattaatcaaaattacgggtacaaattataatggcacggtctccttgtctatgattttgagggtcgcagccggcggagggtggatgtgatccccggacatatcgtagaacggagagagtgaggatcattaaaccgggaaccacaggaaatgggaattcgtaaaccggtgaacggggatagctggtatgaaaaaactcgatttattgaaacaaataactttttctagttattttttggctactttctaatttactgccaaatctcaaattttgaacaaaaaaaaaattcatttcagagaatgcttcaaaaatgcaattttagaaaaatgttaattaagatttatattataattaaattttaaaagatgttatttttgaccataatatcttatttttaccagttattttcttatagagcagtgggagatatgcaaaaaaaatattttaaaaaattttaaacttgtgaaattagtagtgaaaaacgaaaaatttttctgtttttgttttgaaaattcatatatgagttgccattgactcattttgacattttttaattagcagctgaacaaattaaaagtgaagctaaagctaaataaagttttgcattttcttttttccctttaatttaatacaattatatttgtgtatttaaatttgaatttgaattattattttattaattatttgacactgatgataattaaatgctttttgttccgtctaaatgaacattgcgtaattttgaaatgggaatttgcaaagctgggcggacaagtccaatgatgttgtactttttggctaattagtaattcattaattatttttatttcctaaaaagatcaaccggcgtaaagcactgctatcgcaaataatttaaattgtaaatcctccatttgttcatttttgtttcactatcatcaacctacagtcaatttcaccactttgtactcatttttgcgttcaaggctttgttcgggtccattaattgcttaattaaccaataatttgaatttgggcggtgcggacggagaaatgcctgccgaggaggagggagcagttgattatggataattgaaagatttgaaaaaaatataggcaaggctcgtggtgagccgaagcgacaaaaatatgggtgtttgtaataattaaattaaattataattttaattttatttgctaagtaattaatcataact

SEQ ID NO: 27122 - DNA, 1313 bp, Heterodera glycines
tgcagctgttcacgggctctctaaacctatttttatttttttctatctcttctctgaatggagttataacaatttttcacaacagttttgcatttaacagacacattctaaaaattctaattagtatggtagtccaagcctattattattttttttgactagtgtctgaatgggttatcccagttttagtatcctttttgaaaaacaacaattttaataactgatacggtagcccaacatccattgccccaatgtacccttcggtttgtcaacgggagctaacaattgatgagtttgtttggtttcttttttaagcaattttccgtcattgctcaccaactgttaggcgtacagcaacggcgttgcagctgttcacgggctctctaaacctatttttattttttttctatctcttctctgaatggagttataacaatttttcacaacagttttgcatttaacagacacattctaaaaattctaattagtatggtagtccaagcctattattattttttttgactagtctctgaatgggttatcccagttttagtatcctttttgaaaaacaacaattttaataactgatacggtagcccaacatccattgccccaatgtacccttcggtttgtcaacgggagcaaacaattgatgagtttgtttggtttcttttttaagcaattttccgtcattgctcaccaactgttaggcgtacagcaacggcggcacttgcatccgatgcagctgttcacgggctctctaaacctatttttatttttttttctatctcttctctgaatggagttataacaatttttcacaacagttttgcatttaacagacacattctaaaaattctaattagtatggtagtccaagcctattattattttttttgacttgtctctgaatggggttatcccagttttagtatcctttttgaaaaacaaaaattttaataactgatacggtagcccaacatccattgccccaatgtacccttcggtttgtcaacgggagcaaacaattgatgagtttgtttggtttcttttttaagcaattttccgtcattgctcaccaactgttaggcgtacagcaacggcggtacttgcatccgattcagctgttcatgggctctctaaacctatttttatttttttttttctatctcttctctgaatggagttataacaatttttcacaacagttttgcatttaacagacacattctaaaaattctaattagtatggtagtccaagcctattatttttttttttgacttatctctgaatggggttatcccagttttag

SEQ ID NO: 27123 - DNA, 886 bp, Heterodera glycines
ccctttcacccattgctttacacttcgtcttcatcttcttcttcttctcctgctactgttcctttctttctgaaaacaattttctcaaattgagaaaaagatgtcgttttgttttttgtcgctgcttcgtctccccaaattttaagcattcattggctgaccaaacaaacgaaattttattttattgttattattattaattattattattaatcatctctatgttttattcgttatttaattgatctcattaaccaataaactcattgattagcaacagcatttgattgatgtccaattttgccgttttcttagccacacatatcacaatcagtcaatcaaattataatttgtcaaataataatggatgacttcaaataaatttgttgttagcatttggcaatgctttgtcagtgaagcacagactttggccaaattgggacaacaatccctttaatgctaacaaagttgggaatttatagcaaatgcagagacggaaaaaaatcttcggtaaatttttatgctcgtccataagactattttttacaaaaattccaaccccaagggattttttttgaagattttcttgaagtgtatctttcagtgtcaagatcaccttgaagaagaagagatctgaccaaattgatgcaaagacttgatcagcaccaaaagttggacaaataggaactttttcaatatatgtatttaaatgaagattttaatatttttcattaaaaaaatcgttaaaaatcgattttccgattgacctggacaaaaatccagatccccaggtccaacccagcaggtttatttattttatttattcaaaaataaaaataaccaaaagaagggcatgtgccacttatacttttggcggtaaaaattt

SEQ ID NO: 27124 - DNA, 1561 bp, Heterodera glycines
caaaagagcagcggaagggaaaaagcgtggttccgaaatgaacaaccagaaaaaaagtggaccgatgggaaaaggctctgaaccgaaaaatgggtcagattttgaagcggaattttttacggccgaggaaaacaagcttttccgacaacttttgggccgattacgaacatttgaggctgcagtttgcagccaattcagacaaatggaaaacgaaataagtaagaggacaaatgaaacatccacgcacttgggaacaatggaacgatcgatcaatgagacgaacgcgagtggggaaattgaaaattttgagcgtgaggaaaaaattgcaaagttggaaggagaaattgataatttgggagataagtgggcagaatacaaagaaaatgcccaaagggaattgagtgaattgtcaatcaaaatggaaaagaattttaatgagacaaaaagttctattgatggggtgaaactaaaattggaatcagtggaaaatgagttgaaaaaatcaattgacgttgtcgaaacaagggtcgaatttctggaaatggaaaatgctagtgatgaagacatgtggattgataacggtcacgaggatgctaattttacggacggaaatgttcagaaaaatgagggtgaagacgaagagatggacgaaagtgaagacaaaaataatggagaaatggaagatgaatctggggaaaacgaagggaacaaagacaaaagttgtgaactaatgatggccgatcctttttttatgaatgtagcacccccgggagtatacgatgggaatcccgccatgccgttttcacgttggtatgagaaatttaaggacttacttttactgtgcccccaactcaacgaagagcagaaattaagccgattgcgtgtatgtttggccggacaagcacgaggggaattggactcaatgagtccagcaccggaaaccctccaggcggcaattgatcatttgaaacgcaaattcgaaaatgaaaacacaaaatccattgctaggcaagccatgtcgatttgtaagcaagccccaggggaaaaagttatgaattcgcgaaccgactgaatgaagcagttaggactgtgcttgccggagagacccaaggggtgattcaaaaaggcttttagaggaatttttagaccgtttgacccctgatctccaatttgaagtaaagtcgggaatgtcgacagattactcgagagcctatgaattggctcaacattttgaattgttgttggcggctagaaggtctacacaagtctctgtagccgaattgacaaataaagtcgagacattgaccatacaacaacaaaatttcaatcggcaaagggtttttccggaaaaacgcacctgtttttattgccgccgacccggaaatttggcgagagaatgccgtaaaaagaaaaaggacgagtcgggacaaggccgagaaaggcaaacttattataataatgggccaaggagaaaggatagccgaaattgggaatcgggtagtcgagactggagaggcgataatcaaaataatagaaatttttaccgccccccgactcccat

SEQ ID NO: 27125 - DNA, 2180 bp, Heterodera glycines
tgtcttcagcggagttcagtgtccattttgggaagatggcgaacggagtcaatttcactaaattaatttgaaagatatgaaatttgaggcataaaatgatttaaaatttggtttttattatacacctggcttggctgtgttttctggataatttccatgaaaatgaaggttcaggaaaattccaggatgctaaaagtgccaaaacctaccctaagatatgcatatagtaaaccgatcctaattttccgactttttcggcctgtctctaaaccgttggctaataaattcaataaaaatttcgcacaaagttacacaaagggtcaaaatgtaaaatttgtgggcgacttacacgctcaaaaatgcctcatatcgatgtgccgtctcaatgcgtcgccagtccaattcgcatgtgacttggcccgccccgtcaaaaagtgggcaataaaatttgttgcggtccgccgtgcccaacgtgggccatccgaacagcgaaagatcgggcagaaaacagattggcaattgcacctttgatgtgggtttttaaggaatttaaaattcccaattccaatttatgtgtgctagtgaaaatcgcaattttttattttttgtatttgcattcataaaattcatgcattttcatagttttttttttgaaaattgacccaaaatgggaaaatttggtcctttttggcgaaaaacagctacaaattcctgttttttgctctccggcgcagaaattaaaaaaacagagaattttttagagaaaatttttttttaaattcgttttggaagcaaaaacctggacatattttgcgaaggaattgtccacaaaacgggttggaaatggccattcattttcattgtcgagcaaagaaaattggtttgatgaatgcttgttgatgctgtgatgatttgacgatggcaaaacgcgaaaccatcgaccggaacgacaattggcaaaacggggacgaattgtcaaggcggacaaatcatcagcaaatagcaaatggcattcattgcttgtaatgccaacacaaagagcaagacgctgttgttgttgttcttgctgttggtgtttaatgtacccaatcggcgaggaatgcattacatttaatggaaatttcaaaagaaaaaaatataggcactctaaaaaggtaggggataaacgaacgcatgcaaaagcactaaataagaaaagaaacaaaaagataattagcgcaaatacggtaatattttcatttttaagtccatttcaatctttcagctcttctgatgatgattttatggtggaaatggggggttgggttcgtttccctatgaccatttccctatgaccgtttccctatgaccgtttccctatggcccatttccctatgggccgtttccctatgaccgtttccctatggccagttccctattcacgtatttaggctattttcatatcaaactatgaatataaataaacacttaattaaaacaagcaagaaaattaacaaacattttatctgtttcaaatcacggtctcatttcataatttcgagaaattccgatcaaaaaggtaatgataaaatgatgattgaaaggctgatgaattgggaaaatgttggtgtctccgttgttaaatggcaaataattttgaaccatcgtgagaattcggcggtctgctccgcgatatttctttgccttttgcggtggttcttgtccagttgaacacttcgcgaagtcatcatccgacaatttttgatcctttcgcagaaggtcaatgaaacgccaaatcgatggatgtgaacaggcaaatgagcactgcaggcgtctgttcgcggcttctgaatggttattcgtccggtcatcgccttgcattgttcgagtgtaaacgctccaagtgtttgggtcaaatcgcgggcgcgttcggcttccatcattcttaagacgacccgtgtagttcatgatgaacctaataaataattaaagaacaataaatactaaacaatttgtgagattgtcaatttaccagtcaaggacgggagtaagttcgtcgggaagagccatgtccccagagcaatgattccaggggtcaaatctccaattgggagaaacgcgagcgacgagacacatcgtgccatttctgcgaatgtcgggtcattttgatagcgctaaaattttcgaaaaacgattttttt

SEQ ID NO: 27126 - DNA, 1141 bp, Heterodera glycines
tgagcacgggtgccacgcatgcccatcccatctgagcacgggtgccacgcatgcacattcgccaagccctcgctttctgactgctcacgggtgccacgcatactcattccatctgttcacgggtgccacgcatgcccattcgccaagcctcgggttccaactgttcacgggtgcacgcatgcccattccaactgctcacgggtgccacgcatgcccattcgccaagcctcgggttccaactgttcacgggtgccacgcatgcccattcgccaagccctcgggttccaactgttcacgggtgcacgcatgcccattccaactgagcacgggtgccacgcatgcccattccaactgctcacgggtgccacgcatgcccattcgccaagcctcgggttccaactgttcacgggtgccacgcatgcccataaaccaagccctcgggttccaactgttcacgggtgcacgcatgcccattccaactgcaaacgggtgccacgcatgcccattcgccaagcctcgggttccaactgttcacgggtgccacgcatgcccataaaccaagccctcgggttccaactgctcacgggtgccacgcatgcccattccaactgctcacgggtgccacgcatgcccattcgccaagccctcgggttccaactgagcacgggtgccacgcatgcccattccaactgagcacgggtgccacgcatgcccattcgccaagccctcgctttccgactgctcacgggtgccacgcatacccattccaactgttcacgggtgccacgcatgcccattcgccaagcctcgggttccaactgttcacgggtgcacgcatgcccattccaactgctcacgggtgccacgcatgcccattcgccaagcctcgggttccaactgttcacgggtgccacgcatgcccattcgccaagccctcgggttccaactgttcacgggtgcacgcatgcccattccaactgagcacgggtgccacgcatgcccattccaactgctcacgggtgccacgcatgcccataagccaagcctcgggttccaactgctcacgggtgccacgcatgcccattccaactgccctcgggtgccacgcatgcccattcgccaagccctcgggttccaactg

SEQ ID NO: 27127 - DNA, 1777 bp, Heterodera glycines
  unsure (1)..(1777): unsure at all n locations
atttttcaatttaaatttgggtcttttcttaccgatggaacatttaaattcaatgcattgaaaatgttcagcttgcgtatgacaaagatcatttccataactagaatatgtataattccattggcctttgaacatttttttattttcacattccggataatagagtttccctcaaatggaaatttaaaaaattaatttaatttgtaaaaattcattaaaactcactggcgccacaaaatacaattgcgacgaacaaaaaatttaaaagaaaaataaaattcatagtaaaaattcaaaatcgctgaaataagaatgagtcctaaaaatataagtagagaccgtgactggtccaggttttattatcaggaaatgctcaagtaccagatttctttccttttttcgttggtttatggcccagaaccgggttcactgtccccagatttctcaaaattcccagtcccgtcctatcctataaaatgaatgaaataatttaaattcaaaaggacaaattgttcactaccatttttgattgaataatattaattaatattttatgggaataaataattgatgattcataacatttattttgttattaatttttttcattaaataaaagaatagaaaatcaattacttttaaaaacagaaaaaaccaaaataccaagaaaaaaattaaatgcttattaataaaaccgttaaaattggctaaaattaaaccaaattaatacttcttgataattcaatagctttaattgttctctttcagaatataattttctaaagttttttccttaagtataaataaagttataaagctttgaacatggctatgttttttgcaanggtnatgnatataaacatttattatttaaagtntataaaatgtaattgagncaaaattaatttatattttcaatagccctaagaattttttgaacccattggcggatttacgaaacgcgcatgggaggcggtttttacgaaatgcagtctatgacgttttctgctgattgagtgatgaatttcgggaaaaacaaaataatatgcattgaatttaaatatccaacaaatttatttatggaaaattttttcgaaatttatgttaattctaaaaacttagaactaatttcacaatttttataaatttaaaagaaaaagcattcagagagttcaattatgtactttaatcaaaaaatcaacaaaaaatgcattgataaaaaactaaattgaattaataaattttaagagatttaattgaattaagttttcaaatttattgaaatttattgttacaatatttcgaaagcaaaatatagaaaaacatgaaaaagtttgaaaaaaaaatgctgtaaaaaattttgttttttcctatttatgaaaacccaaaaacagtgaattcaaatggcagccgatttgcacattatcaatcagactttttcaatcaaaaagtcgaatttgaaagttgggccaaaattggcctcaatttcgtcgccagggttgagaaaagaaaccgctggttggaggccgtcaattgagtcgacaaagaaagtgggagagcctaaattcattcattaattaacccanatgattttataattaattaattaaagtttaatgattggcaatttcccactggtcaatctgacgccgttcttcgtgaaaatgatttgttnngctggcaaatcgatgccgcagccgacgatgtcgccaatttggaaattggcatccgaattgaacgatactttgaaaacattntcttttgccattggccataa

SEQ ID NO: 27128 - DNA, 2311 bp, Heterodera glycines
attttaattgatgctgctaattataaataattaaataaattttatcaattaagaaattaaaatttttctcaagaaacataattaattttaaattaaattaattttcttttcccaactatttttttaatggatgaatgtcaaacaatttaataatacacatttctctgatcagttttatatgaaaagaacttttctaatcaaaatataataattcaacgaaaacagggcctcaaatgtttttatgtgcgctcaaatgttttgaattaattctcagccgcagtctgttcacatatatttaaggaaggaaatattatgttggaaaatgaaggacaatttaattaagggcaaaaaataattttaaaaaactcaaaaaaaaaaaaaaattatttcatacaaattgaaaactttatgaaattgaataaaattaacaatttttctaaaaaaaaatacgacatttattaaatttatgtggggcatgaaatgggattaaaacagtgtgaaaacgttgcgaattttttttttttttgcttgggcaaatcaatgcagcactcatcactgatttgatgatgatgaagaagaaaaaaaagagattattggagaattatgtggcaccgaaaattgcactgataaaaatggataataaaatatttataacacattcattcatatggcatatgagtgagcatcagcagagcatagagcactccacaaaagtgaaagtgataagagcatttgaaataaatgaaatgataaaaaataaataaaataattaatggggtaataaaataccctaattggggaagtcttttgggggttgaggacaaaataaagcaaaaaaaaaaaaacaaacaaacaataataaaaataattgcagtaaagtatttattgtttcttagcaagaaaatattttaaattttaaaaattattaataaataaatactactgaaaattaatttcttttatttattacttgtcgaaaatggaaaagtttttatgtaaattattaaatgtaagcaattattaaatagtttatattttatttgaaataactgaaaaatttttttttaatgatttatgtaaaaattgtttaagttgaaaaaaatgtaaaaataaaatatgattttataggactacaatttttcatgaactcacaaattctcttatcaaaatgaccttatccaaaatgttccaccccaataaaggaatgaatgaaaattgataaaatgttggtggtggtgttaatgatcgattggatgggaaatgagagagcacagagaatgggaaagtaattaaagttgttcactaattaattaattacaaataaaattgtttatttgttggttcgctaatgtcgaaactttaataagagagtttgaaatttagaaataaattaaaatttaacagtaaatgccgaaacccgttgcataaataggcaaaaatgttatgttttggcatttgccgtgccatcccttttaggccgcaaaagagtaaatccaatttgtgccaagagtcactaccaatcaaggcaaaacacagaagatgaagagaattgaaaattgtaatttaaataaagaattgtataaaattatataataagaaatatttttcaatggaaaaattagcaatcaattaaatttatttaattaataatttaaaaatgggtaaataaaatgtaaaattttgcatttcatgccgtaattttatgattttaaatcccaatttttacagcgtaaaattctttttgctatccatcggtaaatattttctggtgggctgatcacgaatccgacatacatatcttttaaccaattccgacttcctaatctgaatttgaacaaaaataataaaaatcataaaacgagaaatttgaattttcaacttttgttcaacttgggtttcgtgatagaaattggtcaaaaatagttgtcaaattcgtgttcaggaacctcaaaaactagagcaagttttcaatagtttttatcacaaaaaaattttttgcaaacctaaaagatctcagctattggtttctaaattaaatattcaagaaatatacgattttaacaatcgccgaaaacgaatttttgtaaaaaaaataaaataaaaaaattttgtaaatgtattaatttggcgattgtcatgccgtattttattttatgcaatgaatgaaaaattggcaatgaaaattatttttttataaattaataatttcaataaatggatggataaataaattgaaaaatttggcatgtcatgccgtaattttatgtcaataaaaatccctaatttatataacgtaaaattcttttgccct

SEQ ID NO: 27129 - DNA, 1041 bp, Heterodera glycines
  unsure (1)..(1041): unsure at all n locations
ataacattacaaatgggaacggtgctgccaataatgggccaatgccttgnaactcggcgggtgccatcgtcgagacgacaaccagcgcaacaacaacaacgagagcaagcaggtcaacagcaagtccttgggggagagagggaaatgccctcgggcaatacaatgaaatgggggagagagaaaggggagaggagagagtgccctcgggcaagaggcgagagggaagagagagcgaaacagcgagagtgagagagatagagaaaacgagatggagagaaaagggggtagagagaaatttctcgtcacttttcaggtttcgaaatcacaacaaagttgttttttacgcgccgtccgtcgtgtccaattgcgaccgttactttgaacgcgtgctgcaaaaggacccctcggcaattcgaatgaaggcaataaaaatacagtttcatgccgttctctgccctttcatttttttgatgcctttttcagccagccattcccggcatttccagcggagtgttcttcgagaatttgtactccaaatacaggtgattggagctgagagaagcgtctgtgccttcgtggtcgtcaatttcggcaaaaatgcaaatcaacaacccaattactgtcccatcccgctaatacacttaaaatgccaaacccaagccttattggggatttacgttttggcgaatgaatgccaacatttttttggcattatgccttttttgtttcatttgaatccacaattatcattccactaatttttttgccattatcagacgaagtggcaacgtgctgaccaagttggactcgagcaccggcgaattgccgccggagaatcgacggaccgccttttgggtgttcacggacaccaccacttcgttcatgtgggggcacaatgccaatgacatcggacattacaaattctcccaattttgcaggattttggtcggcgttttcttcccctccgtcaccggcattatggcgggctccaccgttccggcatctacggngtgagtcgcttcatcttgtatattatctcat

SEQ ID NO: 27130 - DNA, 1179 bp, Heterodera glycines
  unsure (1)..(1179): unsure at all n locations
ctcaaatattcctaaaacaagctttatttttactgactatctttttccagaaggctataaaatgcaataaacaattcgcatgcttggatagaaaagaaatgggctaaaaatatttcatcacttagtcgtgaaccattacaagatttctatagcagggccatattggcaaaagaagcacatgtagagcaggctcgaaataagggcaaatgccgaaaattttaaaaattcttgttttattagacccactctgctttgactggccatatctcgccagggagtggcggtagaccctttgttgatacatttgaaagggtagagcgcgcctagctcattcgaatagcatcaaattggtttgcatttgtcccgaaacaacccgcttatgacacgtctaaagaaaatccgttaaaatttgcattcacaaactccattttttcattggcaaacgtgtaaagcaaacccgaaattgataggaaatatatattgctcataataaaagtacaatttttatttgtcccacgccattttctgggaaaactttttcgcgaaaggcgaaaaattttccatcggcctcttccaacggcaacagatgcgtttcaaacaattgacaatataattatgattgaagtcaaaaagcctctttagaaaatgctcaaaaaatttttgttataaatgttcacaaaatattttttttgttactgacaattcatttccattcaatttaaaagcgataaataatgtattgagatatgaacaaacatctagaaaaattatctcaacaatctgtcagaaacagtccaggaaaaactttgcgcgagaagccgaaaaattttacaactgcatcactgttcatttgatagggtcaatcaattcaaaaacataacttaatataaaatattgataaaaaaattattttccttcatttttagaaattgcccaaaaattgttgttgtaaatatactcaaatattcctaaaacaagctttatttttactgactatctttttccagaaggctataaaatgcaataaacaattcgcatgcttggatagaanagaaatgggctanaaatatttcatcacttagtcgtgaccattancagatntctatagcagggccatattggcaaaagagcacacgtagagcaggctcgaaataagggcaaatgcccgaaatttttaaa

SEQ ID NO: 27131 - DNA, 967 bp, Heterodera glycines
atgtaaataaaagtcccaatttttttaaaattaatttaaaaaagttaaagaaattatttacgagaattgatcgaatgaattcatcatcactttattattttaatagaccaaaagcaataaatggaaaaataaataaaattcagccaccacttttagttaatggggaaaaatagaaagaaattcctatgctaatatgttgggacaaatatgcaaataaaatttaaaaaaatgcataaagatttattataataaatcattaacagctctgttaaaagtgtgtattataataatgttcgatttgatcatgtaataataagaaagggacaaaatgttaggtgccgggtgggaatcgaaccccacttcagagcctcttttcatggccaaaactctaccattgagctatcgaagcagttcggcacgtaatcaaccccgcttttacaaactggagaccaaagtttttttttttaaattatgcacttaaatgtaggaaaaaactctctatgaattaaatatataattttttgatgcttttcctatttttgaaaaatttaaaaatttttattttaatttgatataaaataattttttttttttaatatattattattagggttatgagttgtatgcactaaaaaatgccaaatatgcgcataaaatatgccctaaaaacccgaaaaatacccaaatatgcactaaaatatgccttaaaaactgccaaaaatggcttttaaccagggttcccagatcaaaattttcaaaagcctcatttggcaggcaaaaaagcctcattttgggtcaaaaagcctcatttttacaaatttattcaaaacacattaaaaatgttcaaatgttatatttctgatttgtccatgctcaatttgagcattttgtgaaatctaagcatgaaaaaccagttgatttttttgcgatgcttcttccaaaaaacttttggggaacaaaggggggg

SEQ ID NO: 27132 - DNA, 721 bp, Heterodera glycines
ttgcctttctccaattcagggcaaatcgtaataattcaggacattttatatttttcattttgcctttctccaattcaggacaaatcgtaataattcagggcattttatatttgcctttctccaattcagggcaaatcgtaataattcaggacattttatatttttcatattgcctttctccaattcaggacaaatcgtaataattcaggacattttatatttgcctttctccaattcagggcaaatcgtaataattcaggacattttatatttttcattttgcctttctccaattcaggacaaatcgtaataattcagggcattttatatttgcctttctccaattcaggacaaatcgtaataattcagggcattttgtatttttcatattgcctttctccaattcaggacaaatcgtaataattcaggacattttatatttgcctttctccaattcaggacaaatcgtaataattcagggcattttgtatttttcatattgcctttctccaattcaggacaaattgtaataattcaggacattttatatttttcatattgcctttctccaattcaggacaaatcgtaataattcaggacattttatatttgcctttctccaattcagggcaaatcgtaataattcaggacattttatatttttcatattgcctttctccaattcaggacaaatcgtaataattcaggacattttatattt

SEQ ID NO: 27133 - DNA, 1477 bp, Heterodera glycines
  unsure (1)..(1477): unsure at all n locations
gatgctcagccaaaatgaaagtgctcagcttttnngggtccaataaacgtgggaggagccgtattgngatggaattgcttacaattgcattgcacccggcaaacgctttcggttgagaatccccnccattttcaaaaaggaaaaactttttagaccgatggacaatttgagcggtggtgagaagactgttgcggccttggctttgcttttcgctattcattcgagcaatccgtcgccttttttcgtgctcgatgagatcgatgctgcgcttgacaacacaaacattggaaaggtgtgtcatttttgatttcatagtaattttgccattattttaaatttgattatactttttaataaataaatttccaagaatctcccttggtaatttgttaaattagagtgaattactaaatttggcttttccacaggtcgtgcattacatcggtgaacggtctcggaccgacatccaattgatcgtcatctctctgaaggaggaaatgtacaacaaggccgactccctcattggtgtgtttccccgttccacgcagccgtgcattgcgagtggcattttgacatacgatctcgaaaactttagccaaatgctcgaagagcaataaacacttttcctctcatctctctgagtttttgcttattttctcacacttaaattaccttgcattttgattttgatgtaaatttctatgggatatttaggcataactgttcaaatattttgagactgaattaatccagcaaaaatgcgcccaaatatcccagttatagttggctatttaatcttttcgacttacttatgctattttctgacgtttacctgatgataaacttaacctttgattacttatccacattcttttcaatgttttaattcattttggcttactttcttttaattcttacttttttcataatccgtcttaggcagcagatttggagatgagtcaagaagtgagttcggaaggcggcttccctaattacaaccgcaaccaatattttaaaagcattagtaggttttgttttgggtttaggtaattgaccttaaatattttcagtcgacagtttgtcacagaagggacttctcgaagcgaatcgtcaaccgcccatcagtcactcgacactcagttttttgatggaaaggaaaaaggacccaatgtcgtaagtgttcgtcccattatcattcttttttgattcattgtcagaatggtcaacatttactgctcggcttcgggtgagcccaattttgagttttttgtctttcaacttgcagtcaggccaaggttgtgggaattttcaatggtggttttcctaatcgagacttcagcaaatttgttttcatcactgaattgagaagtcgncccgtttatggcttttgcgcagcgtcaaaaaaggaggccaaaaanccttncncatggggtttgaatgaacattttgatgacagaagaacgagtcggaagaccaa

SEQ ID NO: 27134 - DNA, 1405 bp, Heterodera glycines
ccaaattgaacagttccgaatgtccatttgcgagttttgaagtgttcttccacataatagtcaaaacggtggctgatcatcgcaatgccaaagccaagctgacgcgggggaagcaattcgaagacacaaagccaacagtcggcggagatgaaactggagaaaagggaaaacaaaattgaaaattgaaaattatgctttcatctcgcacaattggacaacggatcaacaaaaacgatgtgttccatttcgttcttttcaatgccaaatgttcacgagttaattcattggtcatcacaaatggcacaacggaattagcaaaagacggcggaaattgaatgacaacaatgaaattgacgggtgatgaagccgaggcaaatgcctaaaaatgaggggggaaattgaaaatgccaaataaatcaattcgaaatcaccgctttgaagtcttcaatgtccgacaccaaaaacccatcattcatgtccaacggacttctcaacacctttggcacgttgctttgaagcggagtgaaaagccatttggccaccgcttgtccatccgatgccgcggcattgtcatcggtcggaaatgcgatgaagagatcgacagaaaaggagacaacgcgaagtggtggacattcgttgagaattgacgggacgaattgacgcaaatgattgaaaattctaacggacatttcaatggcatgaatgttttttccaagcattggccaaatattgcgcaaaatgaactccgaaatgcgataatcatcacgggccgtttggatggacaaattaattggacagacggcgaaaagttggcgaaaacggtggagaaaagcgatgacattgcggtcgatgtaactgaaaaaaatgaagactcattaccacttgacaataattgattcattttactctaatgaaatggccttgaatccgacgactttctttggcaacggattttgcggaattggcattggtcgttgataacaattgacaacatccatttccttggtgccattcttcccgattttgcttccaattcgaataattccgaatgtccatttacgagttttgaaatgttcgtccacataaaagtcaaatccgtggctgatcaatgcaattccaagtccaagtttacgtggagagagcaaatcgaacgcacaaagccaacaatcggcggagatgaaactgaaaaaaaataaaattcaaaattgaaaattgaaaattagcatttttaattttaattttacattgctttttccatctttgcctccgcttctttccgattgtctgacattttgttgaggtcgaattattaagacggttattggcacttttgcacttaaatggctttattttcttcaaaaattcacataaaaaatgaatatctatttgcataaaatgtcataaa

SEQ ID NO: 27135 - DNA, 1159 bp, Heterodera glycines
  unsure (1)..(1159): unsure at all n locations
ccgctgggagatgcgttagaaaagaaagaaaaatatgttccgacagcttttgaagacctgcattgaatgctgcagttgccgctgctgtacgcccacccggttgttgagttagggtcgagatcggcatgaaaaaagacaaaaaggaggaaaatgaaacaaattcgcggctttgccctcgcgtnggagaaagcaatgcgcagaataactggagagacttagggttagcgcatcaattatttttttcagaatgtgatcggggtacaaaaaatacgggtccaaaaatgggtgtaaatccgctcggagatgcgttagaaaagaaagaaaaatatgttcggacagcttttgaagagctgcattgaatgctgcagttgccgctgctgtacgcccacccgttgctgagttagggtcgagagcggcatgaaaaaagacaaaaaggaggaaaatgaaacaaattcgcggctttgccctcgcgttggagaaagcaatgcgcagaataactggggagacttagggttagcgcatcaattatttttttcagaatgtgatcggggtacaaaaaatacgggtccaaaaatgggtgtaaatccgcttggagatgcgttagaaaagaaagaaaaatatgttcggacagcttttgaagagctgcattgaatgctgcagttgccgctgctgtacgcccacccgttgctgagttagggtcgagagcggcatgaaaaaagacaaaaaggaggaaaatgaaacaaattcgcggctttgccctcgcgttggagaaagcaatgcgcagaataactggggagacttagggttagcgcatcaattatttttttcagaatgtgatcggggtacaaaaaatacgggtccaaaaatgggtgtaaatccgcttggagatgcgttagaaaagaaagaaaaatatgttcggacagcttttgaagagctgcattgaatgctgcagttgccgctgctgtacgcccacccgttgctgagttagggtcgagagcggcatgaaaaaagacaaaaaggaggaaaatgaaacaaattcgcggctttgccctcgcgttggagaaagcaatgcgcagaatactggggagacttaggggtagcgcatcaattattttttcagaatgtgatncgggtacaaaaaatacggggtcaaaaatgg

SEQ ID NO: 27136 - DNA, 1050 bp, Heterodera glycines
aaattgtcccaccagtcgaatttgttaaggaaatccattgggcttcgccgggaatggcccaactggggataacagccaaagagcctcagattttgctgggggtgcgggaattttggagatttttccttggaaaacgggaaattctcccggggttgtaccggattgaaactgtttttggaccagttttcgggggtgtgccatcctttcccgtgactttggcgcccgccacagccattaatccttcatctgtctgcccggtggtaagccgcaaaccggaggagctggtaaagcagttatggagcttagaatccattggaattcgggacccattggaccccaatgatgaatccctcgctttggcccttttttctgactcagtgaaatttaaggaagggagatatgaagtcggctggccatggcgtccgggggggtaaggaccgactttcaaccaatttttctctggcctattcccgtctttctgctctgtcccacaaattacgggacaactccgaatttagggaaaaatatcaggcaactattacggagcaaatagaacggggaatcatcgaaccggcggttcgaaagggtgctcaagagcacttcattacccatcatgcggttgtgtctccgaaaaagctccgcgttgtctatgacgcttcagcgcgcgaaaaggggaaggcatcacttaacgatttactcctacccggccccaatttggtccccgaattagccggaattttactgcgattcagagcttccacctgtccagttcttggggacattgaaaaggcctttttggccgttgggctacgtgaggaagatagggaagtagccaaattcctttggttccgggacccttcccaaccattaagtcaccaaaatttcgttgtttaccgattcaaaaggattgctttcggcgtcaatgcttcgccgtttcttcttgcgttggttctgcgtcaccatttgtcgacgaggggggacccattggaaatggccaaaaatttttatttggataatttgttaatttgcagcgaatccccggagaagcgg

SEQ ID NO: 27137 - DNA, 1167 bp, Heterodera glycines
tttttattcgagttcgggttagggattagaaattagtcaaaatacatgtcagattcgtgattagcgacctttaaaaccccggataaaaaattatcatggttttttatcttaaaaaaattttgcaaaacaaaagggtccccccttttgtttcaaaaaggcccacttttagtatagcgccgaagttgttatgatcccaaagcttcttactgcaatgctgtgctaataactgaaatcacaggcaattggtttggtgttatttttttaaattctttttaattcattcataaacttaggaaacttaaaacccttaattttcttaaataaatttttacgggtgattacgcaaagttttaatgcgggattgcgtaagttaaccccgcttggcataccccgaaaaaatttttgagatgcagcggaatctgcaaatttgaaatttctgggctccagtccctaatatagcttgagattgaacaaattaaagcttttaatacgggattcaatagatgtgaaaaaagtggggggttttttttgaccccgtaaattatcaaagactaggcccggtcccagcattttcaaattccggtctttagacccgttaattttggctaacttttcatatcttttttttccatttttcataacttttggcgcttttgttagaaattaatgtttgtttaattataaatttaatttattcctataattttcataaaatggtcattttttatgtaagaaaaaaatttgatgaaaaaagcaatattattgtttaactataaaaatcaattaaagaaacgtttttataatttgttaaacaataatttaataagaaaaatttattaaaaatataatttcaataaattaaatcttaataaatgttagttctcaccttgcaattcgccttttttttacattggattccttaacggaatgttgttccatgaccgcaatgaatacaaaactggcaagagaagactttggccatgttattaagcaaaaatgaaatttaaccccccccccccccccctctttttcaccttcgtcccgactttccgcaaagcgaacttttatgtgccattctttgagcagtcgccgccattcctcggctctgacttttgaacataacaattccacttcggagctttcctaagcaacagtaaacattgttag

SEQ ID NO: 27138 - DNA, 1542 bp, Heterodera glycines
  unsure (1)..(1542): unsure at all n locations
ttttttcgggtaatatttgtagaggaaatattaatttggaattagctattaagggacggagggccaattaaaaggagcaaaattctgacaaagcatggactggcaaccattgtttttatatcccatttaaaaatgcaaaaaactggacttacttgagtgtctctgattatatttaattgccagttggcctctggcaagccattaataaatttaaaatattaattaatcaaaaaatttatttgcttttttttgtttgtttgtgtgcgctttttaagttagtgtgtctacggttgggccgaaacacccgtaattagttgctttttaaccggaagagaccgtactgacgaggcccactcttccaaaaaattttcttaaaaaataatttttttttattcagaaaccgtccgcaaatgtccctccgcaaatgtccgtccgcaaatgtccgtccgcaaatgtccgtccgcaaatgtccctccgcaaatgtccgtccgcaaatgtccgtccgcaaatgtccgtccgcaaaagtccgtccgcaaatgtccgtccgcaaatgtccgtccgcaaatgtccgtccgcaaatgtccgtccgcaaaagtccgtccgcaaatgtccgtccgcaaatgtccgtccgcaaatgtccgtccgcaaatgtctggtagccaaaaaaagagacgccgtttttcgatgagaaagatttgttggatgtgaggtgaggataggagagcgaacattgccaacaaccaacataaattatttcatttacatacattgatttattttttggtgctggttttatcacgaaaatgcaaaaatatttacaatacaccaggggtgttatctgtcctgatttatcagatttgtcttgatttgaagggtccaaatctgataaaataataatgtcctgatttgtttgatttttccggcggcacctatcggcaccgccggaccccctcctctcacccatttgtctaaagttattttggaaaaatgcaccgcaaaaaattattaaaaatctgattttttgatcacgaatgcattaaaatttacgatttgctaatcccaaaattgttaattaatgtgagatgaaaaaaaattatttgataaattgtaaataattgatttttaagcaatttcgcaaaatgtctgattttcaaccctaaaatctgactttttggtcctgtggtctgattttgaaaattggaaatcagaaggaaaaattgcctcgcggagaaatgtggttgaaaatttgaaaaaattgaaaaaagaaattttcaattttcaatttttttttaaataatttttaaatgttgccagcgcccgacccgtcctgtgccataaaaaatgnattaatgtgtagcaataattaacacaaaaaaatgtaacatttcttaattaacttttggaaaaacgaatgaaattttcacggggggaagcgttataaatttgttaatttaaatttattttaatttcccccccctgaatcgtcacactatttttatgaaatctctccccctgcccccgggaatgtttcaagtgatggaa

SEQ ID NO: 27139 - DNA, 1365 bp, Heterodera glycines
  unsure (1)..(1365): unsure at all n locations
atttttatttttaaagacaagtatcctccgttcttagtggtntaagtcactcttttttaaggtgccattttttatttccgataaaaaaccaaaaaaaaaaacaatttcggcacaaaatgcacaaataggcaaaattgggacgaaaaattcatcctaatagttcaaaaccaaactaaaaatgttttttcaagcttatgacgataaaaaacataaagcgaatgacatttaaaaatgatgggcctaaattggaaaatttaatgaatttaaaaaaagttaaattcaaatgtttagcctgacttttatagctgttctttcgaatttaaaaagattcttttggcccttagggtaaaagaaaattcttttaaaatttgttcacttttcatttcacattttttgttcagcaaattctatttttctttctcaaagcgatttaaatttttattaaattttcgacttccataggcaacaaataaatattattaaaaataagaaaagagatttttaacaagccacaaagttataggaagaagtaatttcaagcaaatgaataatttaacaaaaacaaacaaaaaataattcattttcttacaaaacaaaaaataaaaatggaaaaaagcttacaacaccttcgattcccaggacgtctccgttccaagtactaagaaggcccaacgttgcttaacttgccagatcggacgggatggcgtgctttcaacgtggtatggtcgtaagcgaaaggcatccaattgaaagcaattaaatagtcttttttataatccatttttcttttttgattaatttaacccagaacaataattgataaggtatttagaattgaaagagaaaaatttattagtttttaatgaatcagcgaaaaatttggaatttttttaacaaaattatctccaaattcgcaagtctttagaaaaattgaaaaattgataacattttttgactttcttcacaaattctctttaaaacctatacaaaagccttttcctatacgtaatttttcgaaaatttgaattttcatatgactaaaaaagctagaaaatcagaaaataggctaagaaaaattaattttaattgtcaatttttaagacaagtatcctccgttcttagtggtttaagtcactcttttttaaggtgccatttttttattccgataaaaaaccaaaaaaaaacaatttcggcacaaaatgcacaaataggcaaaattgggacgaaaaattcatcctaatagttcaaagccaaactaaaaatgttttttcaagcttatgacgataaaaaacataaagcgaatgacatttaaaaatgatgggcctaaattggaaaatcttttgaatttaaaaaaaaattcaaatg

SEQ ID NO: 27140 - DNA, 852 bp, Heterodera glycines
cagctgagagggtgcaaatttgtttaaattttcgatttcctttattggtgggtaccccgccgaccaagaccttccccactcatatttttttgttaatttacgctaaattttcccaaaaatacgcagatttaggtgaaaatctgttaagaattttgagttaagagcaaaaagaaacccactccctccccgagaattcaacattgaaattttaatcactgggggggggggatttcaagttttatttatttttttctgtttaaattttcactcgccgcttctccgtctccccctccgccgtcggtcaatccctgcggcattggcacttcgttaacgcaaagcggagggccaaggccaacttcgaaccgataccgtgttttcgtttattatgtcatccgggaaaatgccaacaattttttgtccgcggaagactgaattgatgtgccaagctgagccaattgagtgcatgccattgctccatatttacacaaaatgcgttgcagttcatcgactccgccacaccgagttaatccgtgcccacagggcactccattgatggacgacaaaaatgagccgttgatctgcgggaacagcttggccgcggcggacctcgcactgtttggtttggccccctgacagccgcacatcagtaccaattggagacgggatttcccagctgggatgaggaggatgccgatttgaaagcgggatgacgcgaggaagccggtttacggcataattggtggactttttgcccatcgtaatttcaatctcgaccaattagcaggaaatattaaagtgattactaagtctgatgccccgtttccgtatcgttgggcataattggccccaaaa

SEQ ID NO: 27141 - DNA, 102 bp, Heterodera glycines
tttttttttttttttttttttttttttttttttttttttttttttttttttttttttttttttttttttttttttttttttttgttattttttttttttttt

SEQ ID NO: 27142 - DNA, 573 bp, Heterodera glycines
aaaaaatttaatttaataaaataagaatattatggcttgaaaatagattaaatgagaaacaaaataatatttataaattataattataaattatattaataaaaacggttttaaaatgtatttatacttttgaagacagattttgaaaaagaaagatgaaaatttaaagttcgatgcatttaataaactggtaattctgttcggaatcgctcgatcggcattgatttgcaacgcatattttgttcaattgggcgaaatatgtaagtagagggggcgggggatacaaatgccaaacatgctaatattgaacagtaattaggcacgggatttcggattaaaaaatcttaaattttccacttttttaatctttctctttttcccataatttaatacattttaaattttaggtatttattattaattgatttttaattttttaggcgccttttcattaacaaactctttgtatgagttgacatacattgaatattttgatgataacactgaattaggcaaatggcgaacaaaaatggtcatcgaattcaacctgtacaatttttggatacaaaattt

SEQ ID NO: 27143 - DNA, 968 bp, Heterodera glycines
aattcaatgtttttgtttgcgttgtctttttcctttattcattttcacacccaatgagagaaaaggaagattttcatgaagaaattcagaagcaaagtatgtaattcttggttaaaaatgaacaaattccctttaatgaatgttgccaacagaaaaaaatgaaaatataaaaattttctcacgaaacaagtcgccaagtcactcgtgccgagaagtacaaaatcatttttcgacaaattgtttatttacgaatgaaattagtcacccttacagggattccccccccccttctctctctttggatcaattcattattaactatatgtacactatatgtacatttattgagtgttattgtttttttatttgagtttttaaatgtttacacataattttttgatgatattttaaaattttattttaggttataatttcgaagatgagttctgctggcgttacggaaactctcatttccccctcgtcttacatagaaaaacagtaagggtcgtccattctccgtttttcatttgttttcttttttgcatttttagcacattgtctgggttgctgactgaggatgtgcttcattttgccattggaaagaatataacgattaatgtggaagaaaaggcggtgccgcgggtgcgggacagtgcccgcgcgaaatggaaaaagtagactttttggaatttagttttaagcgaagaagctttccagtttatccgatttcaaaagcgacggagtcgaaagtggcgtcacttctggtcgcattttggctgtccgagacaaattggtgagtcatttaaatataattttattcttaattattcaatttcaacgcaggtggcttatcgtttatataatgagtccatcggtgaggctgttcgagtcatggtcagtcttaatcggtttatgtattatttaatctcacttttgcaggattgcgaatcgcatgtccgccagctgat

SEQ ID NO: 27144 - DNA, 967 bp, Heterodera glycines
ttaaggattttttcgaaaaccctaaaataggcactttaggcacaaaaaccccgaaataggcaaagttaggcattataaaagtcatcgtagacaccccaaaccatgcggaaagggcttttttcgtgcttatctgtgcgtattaagtgcgcaaaaattttaggcatttgcctaaaaatcgcatccctaatcattacacttttttaagcaaattgtagaaacaaaaaatttaaatttctttccattttgttggttcatctttcaaatttgtatttcttttttatttttatttttcgcgcagcaaaacttctaatgattttttttatttaaatttattaaaaaaaggaatttaatcgctggaaaatttccattttaaagaaaccaaaacatataaaccgcttttttgcggcttaccttttccaaaaaacttttcgagtacgggggcaggtggtgtcaataggcgtcgccgggaaaatttttaatttttaatgtgagttagcagatttttttccaaaataaatttaatagagaaaaaattagaaaaattcctctaatttgtaagccaacttttgatgctgaacaaaaaaatcttttgaactaacaagatcagattgttccttcatggcgatctgacatcccaaaagacactgaaactcgggaaaattttagaaaaattcctatgggagttgagaaaatttttctggaaattttgattttaagcctgtaattttaaatataagcgacgggaagaaaaaactaggaatttttagccgtttttgcgccaaaaaaggggctgttttttgccattttggggtcaaattttcaaaaaatacggtaaaatgggggtccgtccggtggtgtcgacaggcaccgccgggaaaaatttgaaattttgagtgatttgttaactgattttgtcaaaataatgtccaatcattgggtattttattggtctatggatgtttaaaaa

SEQ ID NO: 27145 - DNA, 903 bp, Heterodera glycines
gaattttcgactctttgttcgaattcgggcccctttttcggaataggccgaattggatgccggattcgtgatcagcaaccccgaaaagccttggaaacatgttttcatgacttttgaaaacattaaaaaaaaattcgaaaaaggggggaccagccttaccattaccgagaagcggtatttccgtgttcagctaaggatcacgaatatggtgtttgttttgacttcttctgatgacacctgttcagagatttaacaaaaaatccaacaaaaaatccacgattttttgaaaatgtaaaatatgaatttttaaaatttctcaaaaggggggggggggtagtaaaacccggaaattaccagagaagcaacaaagttaatcaattggtctgtgcctgtgcaagaaaatgtccgcaaattttgtcctgttcttcttaatgcggcgtttttcgcgcttttcttccacaaaaaacattgccaacaaaccgccgcttttaaacttgccccactgttgacggagttttgttatacaatacattttttaaattattcactacctaaaataataatataccgtaggtattattataagctggctggatggttgatgggcagggctcccaagtttttttttctaacaaaggacaaacgatgctaaaactaagatttagaagacccaaaaataagattttttgagaaaatgactttttaccttgtaaaaacagttaaaagcattaagcttttttgattttcaaatccaagaataagcacaaaacaaggaggtctttccaaaaaaggacaaatcttagaaaaaaaagacattttaactttctaagatccggcccgtctaaaaaaggacaaatcttcgaaaaaaggaaattgggagccctgttgatggggaaagggggg

SEQ ID NO: 27146 - DNA, 1243 bp, Heterodera glycines
cggtgaacgggatttttaacgggagcgggatttttacgggattcccgttcgggactcccgtcaccggaaaattttgaactcccgatcctgctcccggaaatttttacccaaaaacgggagtaaaaatgcatctggtaagaattgatttttttggtaaaaataatgatttttcattgaaaatctgttaaatatatagccaaaatttcaaaaaaatttcccggcggcgcctatcggcaccgccggatacttaaaatccttaattttcttaaaaaaacttgctcaatttgcaaaaattggtcatttttgaacagaatctaacaatgtattgtattaaaattttcaatttttttcccggcggcgcctaccggcaccgccggcctccctcctcctccttggtcaccaaaaagttttttcaagaaatacaccgcaaaaaattttgtaaaattaataaagggagtcaaaaatataaagttaataaatgttttgttcgaattaattataaaaaataatttatttaagcaatttgaaaaaattttctgatttttgactcaaaaataagatttttttatttcaattctccttactaaattttctatatatttttaatttaataaattgattgtcctttaaatttgtgcattaaaaatatttttgtgagtttttaattaaattttcgaattactcccgctcccgcccgggactcccgttaaaaatggacgggattttaacgggagcgggatttttacgggaatcccgttcgggactcccgtcccggaaaattttgaactcccgatcccgctcccgcaaacggaaattttttttaccggactctaataaaaaagaagaaagaaagaatttttttgtttataaacaacaaatatgttagtatttttaatttctattttatttaaatgttctatcaatgattccatataccctatggttgccaactgaaaattttcaaaaacagcattttgtagaaaaaatcatcattttagaaaatttttcaaaattaaaaaatcaatagtttttttgggcttttacaaaaaaaaaactttttgggaatagagggccggcggcgccggtaggcgcctccgggaaagtttttcagaatttgaatgcactttattttgatcacgattcacatatattagagagatagagagagaaagagaagacgagtgagagaagagagagagggaacgagagagagagaaaacggtacttgtgtggtttacctgac

SEQ ID NO: 27147 - DNA, 1969 bp, Heterodera glycines
atatttccaacctattaagccattatttatttgctttacttgagagaatttatgctgggcatcacttcatttttgggccgattcgatgcctcgccaaattaaataaattcagagcaaagtggtctttgcacaccaataacatttagcggcccattatttgggacaatccatcccgattattatacatatgtttttaattaggatggattaatggctttttgatcaatccgtaaaaatgagaaatttgtttagccatgaaaacatttattttgttaactttaatttttctgaatttcattctgaactgctgtgccgcaaggcaattaaaaatgtgcgtcatttttgaacagacggatcgaacgcgcgaaatcgtagtgaatttgcaggcattttctgccgtcggatatagcgaagctacgcaaaaaaatatgcaaaacggaaaatattacaaaatttttgtgcccgattttattttattggatgttgttgagtgcaagtttggcatttttataaagccaaaagagcaaaacgaaaatggtaatgagaaaaaggggaaaaagaaggcaattattgttgaaaaccaaatggataaagatgaacaaaaaatgtggacaatgcaccgatcagtaaagcttaatctgagcgatatacacactttgatgaagaagccaattgtggtcaatttgggcaaaattggtggccccgagctttttttgaagcgacgaatttttgtggagacgaataacgatttgggcaattaccatgcatttttgtacgcaattatagagggaaatgaacagaacgccaacgaaatgaacgaaaaaaaaagaatttttattggtcatgccccatttgtgaaatttgatgaggaagcatcaagctcaagtcaagcaaatcacaagaaaaaatctttgctcaaaaatttcttatccggcaaatcaaagcagatggaaaaggcattgcccgagggacaacaggtgaaacagtaattaaattaaattattaaatagttttttgttaagttaattgaatatcatttatcaattccaattgaagagaaacgcatgtttggacataaaatttgtgatttaattttggctatttttcatgatcaaaaggtatgaaagttcggagtgatgtacgagagtggaaaaatctgtgaaatttcaatccgatagcataattatttcaatcttttcggaaatcccttttttggattcccgggtttatttatcagtttcgcatctgacttaaaatgggttatttcttgcttatctaattgaaattcagggggataaaattgaagaagttttaaatgttacgaattttgaagaaacagaaaagtgggaatgttcaatttgcaaagatcaattgaataatgaaaaatcgttaataaaaatacacgggcaaaacattcaggtgcaaaaattataatttctttaatttataaaatttttctagcatttatttcacaaaccatgcatctttaattggtaatttggaaataattagtaagattttttaatttaaaaaaaatatatttttataggtttgaagcacaaccaaaaatacgctgcccaatttgcaattggcaaccaacatttgtcatggtcggtatttgatgaatgaatctgcatgctttttaatcagaaatttaggatgctagattgaatgcaatttttgatggacctattggattttcttcgatttttgccataaattcgctgggcattttatttaaaattgccaacggtcaactggaaattgggcaatttaagcaaaatcaggcacaaaactttattagcaaaagcaacggaaatttaaaaacatttgagcatgagctgagaataaagttttctattgcgagtttttttcatttatattcattaattcttcaaaatttatttgaaattactgccaaagggttgcgagcagagtgccgtccttcgacaaattcaaaatgaactcg

SEQ ID NO: 27148 - DNA, 1516 bp, Heterodera glycines
gctgtgtttcgctccgctccgcgacttcttccgcctccttttgctccccctgcggtgtcggcgcttttggcctttgctctccgcgttcaccggcactttccatcgcaacgacaattggcaacaatttgtcttttttggtgggtaaagaaaatgaaaaaaaggttaaaatttgccattaaaatttaaaaatgccttcaaagcatggaaagagtgaaagaatgcgttactaagccaatgaaagagttttgagtccttacgagtcaattagccaacatttagagaagtaaaaccaattaggcattcaatttgtatatatattttgttaaatatcgaatgtgttgcacttgccaattttaaatgcctccgggcaaaaaaggaaagaaaattgcctaagagtcagttaaaattatgtaagcttttaaatttaaaattacactaatgtatgtttaggcttcttcatgcggttaattttgcgttccttttccctttttgtctttttaattggttttgtgcctttctctgccggggagggggcggcggcgacgcattggcaatggcatttcctcagggattaattaaatttaggaaaaaagcacccgccgttggggacgacagaacgactggcgcattggcacgtgcagcggcaacgaaacccaaaggcaattaattttatgtcgggataaaccctccggcaatgcgcttatgtttttggcctgggagggaaattgagacacataaaacggagaaacgaacgaacgcattgcgaagcgaatggggcaccaaatcccttttccgtcacttttcgatagtttcttttcttaattttgtttttttcttccttctaccatcacttcctttctttctcatcctcttcctctccctctctatctctctctctctctttctctctctctctcccccctctctatctctctctctttctctttctctctctctcccccctctctatctctctctctttctctctctctctcccccctctctatctctctctcacttactctctcctctctctctctcccccctctctatctctctctctctctttctctctctctctctccccctctctctctctctttctctttctctctctcccccctctatatctctctctctctttctctctctctctctccccctctctctcccccgttctcttctctctccttccctcactgtttctctttctcttctaccctctcctcttttctcgctctctttcctcttccaatcatcaaatttcttcgtctgctgctgctgctctgatcatattccatttgctcatctgcttcccaatgcttctccattttgttcagtgtttcgtttgtcgctgttttgcactggcgactatcgaacagagtgattgatgctaacaataagctcaatcatcatcagcaaaagcagccgatcacatcactctcacattgccaccagctgaccccttccgaacaaaagcaccccccgagggcagtttcgattctgtccaactgtt

SEQ ID NO: 27149 - DNA, 1341 bp, Heterodera glycines
ggggaaaaagaaggggaaaaggtaaatgggtgaaaaaggggttccagccaaatgggaaaaaagggattttatttaaatttaattttaaatatttttattatttttttttttttttaaaaaccattggcccttttttcggagtggtatattatgggtatgaccacaaaatcttatcaattttatttggaaagatttgaaaattccacctctcaaacaaattctgccactttaattttttgggcggcaaattggtggcgagcaaagtaaaaatggtggggacatttttttgcggctaaaaatcttatgatccgaaacacgcggaaatttgagtgccaaatttgttttggcatttgagataaaacatagtgtaatggcggcagcagatttgcaattaatttgttttaataatggggtggaggcgaatggcgacagacgaattgtccgattagtaattcgcgcgaccttttggcgggtgaaagtcttagttcccggtttattttatggcttcaaatttaagccaaggaatatgccgcaagcgcaacggattaattaacatcattaattaacatcatttttttgataagagatctcacgttaccgtaaaacgcccattggagaattttaaattgcaaaatttgcgggaaaaaaaacttaaggaaaaatacacgattttttttaatttaaagcaattttcttaattaaattgcattaaaatttccaataatttttcccggcggcgcctaagggcacctaccggaccctcaattttacgatatttttgaaaaattgaccctaaaatggcaaaaattagtcatttttggcaaaaaaaaaaagagagaagctaagccctggcactgaaaattttaatgtaaagaaaacattcatttttggcccgaaaagcacagatttcccgcctccccccccctccgaaactttatttttttctggttacgggccttcctgtgccaacacgcacatttttcacattatttaatggacataaaacataaaataataaaaccggcaatttgcagtgccggcggggcacaaaatgcacattattttctgcataaattgcacatcatataatttggatgtgtttaaaaataacagccctcagggcaactgatttgatgattgattcccttgctgatgctgttttggactctgtgcggccgaatgacccaacgacaacgacaatgacggcgaacgaccaccccgaaggaaattatggggccaaaaagagcaaaaagggagagaccgccccgggggccaccgatggatggatggatgacgtaattgcatcaatttcatcattcttcattcattcattacacgcct

SEQ ID NO: 27150 - DNA, 996 bp, Heterodera glycines
tcgattttttcagtgtccgtttaggggtactcaaacatttattagggagcaaaaatccaacgcagaattaaagtacaggctatagggaagctactcccgaaggattcggtctccccataaatctgggcgcatcggttcggggggactgccccgaaaacaaaaaaatcgattttttcaagtgtccgtttggggtactcaaacaattatggggagcaaaaatccaacgcagaattaaagtacaggctatagggaagctattcccgaaggattcggtctccccataaatctgggcgcatcggttcggggggactgccccgaaaacaaaaaaatcgattttttcaagtgtccgtttggggtactcaaacaattatggggagcaaaaatccaacgcagaattaaagtacaggctatagggaagctattccggaaggattcggtctccccataaatctgggcgcatcggttcggggggactgccccgaaaacaaaaaaatcgattttttcaagtgtccgtttggggtactcaaacaattatggggagcaaaaatccaacgcagaattaaagtacaggctatagggaagctattccggaaggattcggtctccccataaatctgggcgcatcggttcggggggactgccccgaaaacaaaaaaatcgattttttcaagtgtccgtttggggtactcaaacaattatggggagcaaaaatccaacgcagaattaaagtacaggctatagggaagctattccggaaggattcggtctccccataaatctgggcgcatcggttcggggggactgccccgaaaacaaaaaaatcgattttttcaagtgtccgtttggggtactcaaacattatggggagcaaaatccaacgcagaataaagtacaggctatagggaagctattcccgaaggattcggtctccccataaatctgggcgcatcggttcgggggggactgccccgaaaacaaaaaaatcgatttttttca

SEQ ID NO: 27151 - DNA, 809 bp, Heterodera glycines
  unsure (1)..(809): unsure at all n locations
ttcagtcaaattttccncaccgtgagaaatgacgtggcactattcaattgaatggtctggaaagattcttaggtgggcggtaaaaagtgccgatgttcgccatttgcgcaaagaatcaatgccaaccaaaaacattttattcccatttgccaaaatgttgacatttaaaatgccatcaaatgcgcttctttctcaccaaaaaactgtcaccttcgtttttcatttgcttctcatttcattcatattcggctgaaaatcctttgctggaattaaatgacaactcaaagaaatgaattcgtcgtacggtaaatggggaaaagataaacagaaaagaaaagagtgatgtgacacagaggcaatggatgaatgataatttgtttgccaatttgtccgtccgttttattgagggaccatcgtttaaaagggccgcccctccccccccccccccccaccaaactctcattaatccccgtcaaattcgatgaaatgatcagcagaatgtgtgattggaaggtgaaaaaatgattggaatggcatgtacaaaatactgaaagaggagtcaatacacttatggaagtttaatggacaattaaatcgagtcaaaactgtatcaggcttttgccatttcaaaaaacaattgaacgggttgctcgtctttcgctttcaaatccctaccgggaaaacaatctttgcccatccaatccctcctcttcctcggcggatgccaacctttgcccatcgcccgtctcagctgacttcccaatttatgacctgcggtcggtcgtttcttatgctcataaggaatggag

SEQ ID NO: 27152 - DNA, 1215 bp, Heterodera glycines
gaacattttttagaaggtcagtttaacgaaaagcaaaattttgtgaggatttgtgtgattttcgaaaaatacgggaattatgtcggtgtacgttccggggttcttttttttgttaaattttgccattgtaattaggcattgcatttccttatgctttctctccttcttcagcttgccgtcggctttctctccctgctctgttctctgatgctttggttcaccgcttctgtccattaccaacgcttttaccttgttttgggttgaatttcgctttatatttaactcttggttactttttagcgtttttgtgcacttttctgctctgtctgacaacacttctcatcttttccagcaccgatccgttcatgggaccgttggccagcatggcaacgtccatccaagtgactggccacccttttcattgcctttgacaatgagtgttttgtgacggttaccaattcattcgcgccaatgtccaaaatcgggttcaacttaatctttttcattccctaatagcctaaacatttattatttaagtgatagaaagtgattgtgtctgataatttgatagttaataaattgttgaaaattcagaaactattcaaaacgcagaattaatgctcctatagaagattgtgttttctaaattttaatccttttaggctatagggcttcaaaaaaaaactgttttaatctgattttggcatagacgcaaatgtcttgacacggtgtgtgacagccttattgcaatttgcaaaattaaatatttcccgggcacaaataatctcgatttgatttgactgttcatgtcgttcaggttgtccttctcgtttacaccgtcattcccctgcctctgtacctttgcattctcatttgtgcaatttgtgagttgttttttggttttggatgggttttttccatattttcggttcattcccccacttttcccccacagattcgctgctcttagaattgctcagttccccccaaagtccgtcttcctctttcaccgcccttctccgtcccggcacaaaagcgacgctccatttctgtgtccatttgctcggcattcatttgtacattctgacccaagtgcggcagcggaaaacctttctgaaggtcggccagtcgttgttggccaggaaggacttggagctgcagacgcagttcaaggaccacatgatccagtctgtgatgccaaagaaagtgcgtttt

SEQ ID NO: 27153 - DNA, 1519 bp, Heterodera glycines
aaaaaaacgaataatacacccctaaagatcaactttttggaaatttttaaaaattacaccccacaaaacacgaaaaatttgagttttcgtcgtcattttggcattttcaataaatattttcgtcatttttttgcgaacatttctttttttttaatgagaatttttttcgaaatttggcaaacttggaggtgtttttgatacaacgaacaacaataaaaaatatgcatttttaagttttaaacccatttttttggttgtttattgtactttttaggtttatttaagcaaatattaaatatgcacaccttttttgggatttttgggggtttacaacatatattttggcattttttatccatattttggtccatatttggccatttttggcctttttagtccatatttcgggcttttttagtccatatttaatgtccatatttcgcgttttttagtccatataatttacaaccctatttataactcactaagaaaaaaaattgtattatattaaaaaaaaattggcattttgtatgaaagcaatgaaattatgtaaaacagtcagggaatcttcaaaaatttctttttcttcaaattctcatataaaaaattttcagaaattaggctagggtatttttatagttttttttaaatattattttttgatagatttttttaagattaaatttctaaaattacttgaacaatggacttccaaaaacgaagtttatttcatgattgatgcgccaaaaagattgcttgtccattaagcaattgtcaatcaacaatagttgtctgagcttttctttgatcttttccgccatttttggattaattaaatctttgatgatttgttcaatctgttgctcatttaagtgttcaggaaaagcaccaaacgaccacattaccttccaaaaaatttgttgtattgcaaccactaaaattgaatttgtttttgaaaaactcaaatttggaacataatttttcaatccctgggcgcgcttgggatgtaaaataagaaaacttggtcagagaatatggtatgagcttaagtaaaatatgtgatttagaaccattgaaaatttgaataattttttagaaaaacctaaaaagaaacatttaaatttaaaaaattcgaaaaagctaaagcaaaatgagttatatttatttattttatgtaaaaatatatttttttattatttttgattttatattttataaggaaaactttggaacaaaaattttaaaaaatctaagcaatttcaatgaattcttcaaaaatatttaaattttttttaaattttattccttttttattttaatatttataatttttgtttaaccaattaaatatctaagcaaggctttattttaattttgttcctttaaactcaattaacatttaaaagcatttcgtggcattctaaaaaatccccaccatttgaccagtttacttttttaagattagagtcaaaaaataaattttttgaacactttaactaaaaagtattttttatttttt

SEQ ID NO: 27154 - DNA, 1274 bp, Heterodera glycines
  unsure (1)..(1274): unsure at all n locations
ttcacaaaaataaataanttcgggtctctttaaatttagctttggtcaaaattgagccgagtatgggacgactacaaattgcgtaaggaactcgtgaaacggcgcaataagaaacgtctgtctttggatttgtcattaattgcttaatttattttaattcaaattcccaggctcgcattgccgtcagtcgcaactgcctccatcacaaccgttgccgttatatgttccgccagtgattacgggggtcagtttattaaaattttagaattgtttaaaaaaaatgtttttccaagtcaattagaattaattcaaaaaaatttcccaggtcaatcgtcaggagcaaatggaagtccccgcaatctctgtggcagtggtcaccgaagtgccaaaagttgagcaacagggtggagaggatgagcaggaattggacttgcgttaggacatgtaaccagagaaaattttagataaggggaagcaactgggtggaaaattgtggaaaatatttttgaattattaaaaaagaattttctctacaatgccaatcatggacaaaggttttaagttgattacaggaaaaaaagataaaaattggaaattgttgaaaaaaaaaagtttttaaatttacgacgatagtaaaacagatttacgatgtatctttctctggttacatgtctaatggaaattattaatccgttaaaaatgctattttttcattggttatttaaagcatttaaatattcaacgcctttacttatttttaacattaaattgatatgctatcattaaacaataaaataaaaatttttttgtaataaagaaaaatatttttaacctctcaagattttaaccgaaagctcacatttattttggtaatattaagttttttcctctgctcacttcgggaatcctttaaactatttcgcttactcttgttaactctccacagcgtatacgctatttcatttcttccctctctgctattatccctattgtcaacctttacactattccattcctgctctaaaatgtgttcactcctacagttttctctttcatttctgctctacactccatagcgtatacactatttcttttctcatacagtattcgatgtcctgctctaaaatgtgttcactcatacagttttctctttcatttctgctctacactccataacgtatacactatttcttttctcattatgcctcgtattcatcctaggtgatgcagggattactgtagttgtgtttgacaatatgcattaatctcgactc

SEQ ID NO: 27155 - DNA, 861 bp, Heterodera glycines
tcatcgtttcacttcacttttcgttcgtttattcaccaattcatcccaatttttgtagtctaaaacaacttccacttccattgttcacttatgttttagtcctccgatcaaatgacaattttcttccaaatataaaaactttcgtaatttgctacttaaagggacccctccccccccccccccctcagtcccaccattttccattgttatcaaatgacactcaaagtttcttgtttgggcttctcaagcatttttttctatgtaactacaatttaccaaggtttaggatgaattcagaacatttttttgtaccccgggtccccccccccacggataattcagacaaatggaagcaataaaaaattctatcgccgttataaaacaaacattttttatttgctaattaaatatcattacataaattaaattttcccattttaatgggtcgctaccgccctcctctcgcattattaaacaaacagtccggtaattcttaaaataaaagccaactgctgaaagacaaaagccgaaaagggccataatttatattgtggataataatggcacattgaccgagaaaagagaccaaaagtttattaaactgcccttgtcattttcctttgcgagtaacggcacaaataattcccaaagtgaccaatcagtttaatcagaagaagaaaactctgttcgcacgattattagtcagatatgaaaagagcaaagagcatcatttgtcatttgtgtgctcccaatttcagcgaatggttaacgacgccgcggggggggggggggaaaatcggacatttgaaaaaggggggggggggtcattaaaaaaaaggtcaccggaaaaaaggggggagg

SEQ ID NO: 27156 - DNA, 1275 bp, Heterodera glycines
  unsure (1)..(1275): unsure at all n locations
aactttcatttttttaaattttttttctctatttaatcatttttcgcgaaatntaaattttttgtacaaaatgccaataatgataataaatttgaatttttccgaatttactgcccctcctcctgcaggggccattcgctgacgccctcaaatgggtcatcgccatattcgtcaactgctggcagctcgacatgaacctttttcggagaatgttctctaaaaaatgataggaaaacaattattttaattaattaattgattaattaatttaattattattgcattaattacccattttcattttgggcgctgactttgggcgcattttgaaattgaaattgcttctcagctaactgtctaagagcttccaagtcttctagtgatgttgcctaaataaaaagtaatcttgtttaatttttaattttattttcaaaaattggaaccttattttttaaataattaaaaaaggagaaaagaaaatttggactaataaatttttggcaaatttattttattctactttcaaactttcaacccagatagataaaaatatatatttttaaaattatatttcacaattcaaatttatttttttaaaagaatgtgcgaataatgtaattaatcctaatcctaatcaaaaacactatttttacaatcacctcagaattttttttatcatttaattaaatgcatttttttatatttaaatgataaaattttaattaatattttaatttgctaataaattttaacaattctgattaatttcagtctgcattctccttcaacatttttttgattaaaaattttattttccaaatttgcgtaaaaaaatgaataattattttgcgccttttttagccctcataattccacaaatttgtataaaaaaatgctgttaaacaaaattccaaaaaatgctgtaacagagttcaatcttcgtaaaatcattttccggtcgaattattattaaccagcggcccaaaattgctctcataaaccatcaaaatttgtttttgttggccaattggcaatgtattgaaagtttaaactaatttttttgtttttgttttggcgttccatccaatgaaaattgttttaaattttttgggggccattaggcccatcggcgattttcgattggagcagaagacagtcgtcccaaaacataataatatggacgcggagaaagcaaacaagcaacaaaacgagtttcccccgataattcattcagccttccaacccattaaaaatgttttgcatcttttttgaaat

SEQ ID NO: 27157 - DNA, 1576 bp, Heterodera glycines
acaatttgtacaatttttattcaattgtttatttcaggttaatagccaaaaatgaagagatgatctgcgattctcttttcaaacatgcaatcaccaattaaaaatcattgaggaaattacatttttggtacaattttctttgtaaattttctcaaactatctatggagatcatcatcatcaatcacatttatttgtcaatttttgttcgacttttatctgaacatactgttggtaaatagtaggagtcgtacagcaaagggaattcacgagcaaaaaagtctaaaatcataaaaatatgaaattgcgtaattaggtattttctaacattaggcgcaaatgccttcgataaaatcttaatctagaaccgatcctttctcccccccccctctccccgtttccccattacctttccttttcccccacccaaactttgctaccccgccaattgacttctcccaccccttcgcccctctcacttttgattgatcgcttcttcgggtgctttggccttagaataacattttccttccccgtgcccctcggggatggataaatctctcccattgccattgccttcccatcgcccttctttggtccaaaaagtccccaaaccctccgagacgacgactgatttatggccatcagccgagggacaacagccgaaaagcggcggcagttaattgtcatctcagtcaaaaagcatttaacaataatacccatccgaaattggcgactcaaaagctcattactgattaatggcacaagcatttctgaatttttaactttttaattctcaattaaatgttaattcttcgtttttatcctcgccatttattgggaagtgccaacaaaaagtgggggcattttggccccgcccctttgcctttggtcattgcccccgggggacgacggcggagggacaagggggagggagggggagggacaagtgaccgcccccaccccgcagtgcggttaggaattgaatttcacatgaatccgatgactgcaaagcgcctcacgaaccactcaaatggaaagaggtgttcactgaacaatgcgtgccaacaatactaaaatgaataatggaaatcagaaacgaatctatggacgaaatcaaaaaatgccaaaccaaaaacccaagaaaaaccggatgaactttaccaccctttcatagaaagagaaattttgtcttgatcaacaaacgtaatgattgtgattaatgacgcggacctaatccatttggacgacactgacctaacacaccaaagattaacataagaaaaaggaaaatgaaccaaaaaaacacaaaaacgaccttcacttcaactaaataggaatagggtcgctggtcgcggtccatcacatgaagtatcgatgtgatggaaatatgatacatgaggtctaattcgatctaaaaacataaaatatatttatttcgaagaagaaaaattgaaaatatcaccgttatcccggaattcgcttgattcatcaaatgttttgcgaaagaacgatcaattgggccgacggagggaagcatcctttccttcccgacttttgttcgacagtaaagccgta
